United States Patent Application Publication US 2011/0183924 A1 - sequence listing, part 44

SEQ ID NO: 109729 - DNA, 430 bp, Homo sapiens
gatccacaatctagacatggaacctactgctctttgacaggtgccatctcagtggcatcactggaaagtccagattgcctgacacactggtaaccaatgactaggggtcaggtctcaacagatgtctgggcttaagggagttaagtctatgctgaaagatggaaagggagaagaggacataaaaacaaatttgtttttctataccacaaggcttttgtgccaaggtggccatgtgtgtcaaagtcagggaatccctcctcctgggagccaagagagaaatcacaaacaaggagtctggcctaaatacagccttctcttcctcttcctctaatgcaggaagagggatcaggtggcaaggtgtcaggctgaattgcaaaggtcaagtggaaatgatgtgactggctggggctgagaaaacaggcctaaggca

SEQ ID NO: 109730 - DNA, 179 bp, Homo sapiens
atgaagggatcttgcctctcttatccactgctgtaagcccaatcctcagtttaatgtatttcataaacacctgtggacttcatagacccacagtgttaaaacactgccaaaccctgcaggttaaactctgtattgcttctactggaatatttgcatttagagcaataaaataaaaatgt

SEQ ID NO: 109731 - DNA, 372 bp, Homo sapiens
gcctgacgcccctcatttgtcccagcgtcactgtggctgtatctgtgcctcagttctcaccaggacagcctgtacccaccagggacaaagaattgtggctgaaatctctctgctctggtcccagggaacccatggctttggcagtcccagctggccctcagcttgcctgagcagaaaaatgattttcaaatgaccacagattttctctacataaattcctgttcaatagggctcctctgaaatacttaggcattttctgagaaactgctttggcccacaggtaaaattgttctgaaacgcccaacatcacctttccttcatcagctgaaaatactctgacttctgcactgacacaggaaaacacccacttcc

SEQ ID NO: 109732 - DNA, 705 bp, Homo sapiens
ctgaatagtaattaaacaagatactccttgtaaagcacttagaagagtgctgagtactgaataaatgttagctataaataataaaagcagataaaaaactttaaatcaggaccctgattagtgtcatcttctcacttttcagaatcttcccctatttagtaggctcacgccaccctgtttcctataaagtctagagaaaatcaacctaatcatcaatttcacagtaagatgaaaaattcaggctccacatatactaattctttactcttataggctccctctaggagggaaaaatgtttcctttgaagggcaatgtttcaaaaaaaattactctagtaatgtaattcaaatgctaaagcaactaagaagggaagttattgcagactggggctaggtgtggttgatgggtgccttctctcaagagtcctggccaggcctggtgactcacacctgtaatcccagcactgggtgggtaaggcagaaggactgctggagcccagaagtttgagaccagcctgggcaacaaagtgaaatcccagtctctacaaaatatcaaaaaattagctgggcattgtggcatgtggctgtagtcccagctactgagaacgctgaggtgggtcacttgagcccaggaggtcaaggctgcatgattctcctgtctcagcctcctgagtagctgggactacagctgcacatgaccatgct

SEQ ID NO: 109733 - DNA, 197 bp, Homo sapiens
cccggctgggccgtggtggtgctgttctaacgcttgcagttgtcttgcagccttttgctcctgtgaggaaagggttgtggcctggccccgcccagggctcgggttaggatgagcccaagctcaacccaagctctcccttaccctggtggcagcccctgctggtagtggcattccctataagagaagcccatgccggc

SEQ ID NO: 109734 - DNA, 254 bp, Homo sapiens
gcggccgctactactactactaggttagcggcccgtcgagtaaaatttcatatatttaagtaacccatgtgtaagatttttcattgcaatcctgcacgtagtggcaaataacacacacacatgaaaaaacaaaacaaaacaaaacaaaaaaactaaaggatcatcaataagttactggttaaataaattcttacaatacatttaatgaatgactatgcagctccaaaacaacaacaacaaaaaaaaacagtgag

SEQ ID NO: 109735 - DNA, 407 bp, Homo sapiens
cagtttccgattgtcaccttcatttgtgtccacacaagtccaatatgtgagaaggtagcaatgtcagcttgagttaaaggcttgtcatttgtaaacagtactcatcagctgaagccttcttccatgacagctaagttgtattcccagagctgaaaatgtgcacctttggggctgcactgtcgccatcttaatgttcttcataaatgaacgccacactttgatgtaatgtaattgctgctcaatagtaaatgcaaagaaatggaagtactctttgctgtgtaggaggttaaaccctcttaggtttacccaaggtcacaccagtattgtaaaatctgggtgagattccccgcccccgcccccgacagtgagcctctcagcaggagccgccctaaagagccagatgcccc

SEQ ID NO: 109736 - DNA, 311 bp, Homo sapiens
aaagagtgtcataccagcatggacttgaacccaggggtcctgatcccagccccatgtcctcctcactccctcactggtgtccaacacatcagcaggggtgggaggcacccagaaccccaacccagatccctcacacctctctcgcttaaaatgaacaatgtcaaaaaaatagcatctctacagttcagcactgagctgagcccaagtctccatgatggtccatcaactggaagggatacagtattgagcgccccctgtaggtgacatcacgtgatgggattcctcattccaatagaaaataccattaaagg

SEQ ID NO: 109737 - DNA, 395 bp, Homo sapiens
ataattctgacccagggcttctagctagtggggggcagagccaaaccagatcgcaggccctttgtctccaaattctgtgctgttccatagagagcccagcttccagaatataagctccacgagggtagagactttttcttcttcacagctgtatggccaatcgccagaacacacagcaagcactcaataaatagttaatgaataaaggaatgaagtcaagctgccatggtttggctgtgtgaccttggaagggcttctcatcctctctaagcctcagtttccttatatggtgaatggaaggtgacaataatacccattccctgggttgaggtaaggattaaaccagaccattcatttaaagcacttgggatggactggaacataatgagcaacca

SEQ ID NO: 109738 - DNA, 643 bp, Homo sapiens
gattggggtggggggagattgagtgaggaatgaaataaaagatcaagtttggctctgagccagtctcttctctgctcctggaaaactcattacaacacaatactagtgtagttccataaaaccatcttcactgagctcagctgacatcagttgacacaggttaagtgcagagtacatgctaggggcagctgactatgccaggggaaaagaaaagaaatacacctaaaatctgaattcagaccaggcacagtggctcacacctgtaatccgagcactttgggaggccaaggtgggcagatcatttgaggtcaggagtttgagaccagcctgtctctaccaaatgagaccagcctgtctctatggtggaacgctgtctctaccaaaaagtacaaaaattagcctggcatgctggtgcacacctgtagtcccagctactcaggaggctgaggtaggaggatcccttgagcctgggagatggaggttgcagtgagctgagatctcaacactgcactccagtgagactccatctcaaaacaaagatagagactccatctcaaaaacaaaaaacaaaaaacctgagctctatctactctcaagtcatttgtggtccagatggggagacagaagtacacagtaaaagcta

SEQ ID NO: 109739 - DNA, 240 bp, Homo sapiens
gagtgacaggtgagcagtcagtgaggtgctggaggagggtggatgtggggggtgtgaaggtttaggagtagaaaaaactcacactcggggctctgggttgctgggtgctttctttgcagccctggtttgtgaagtgatttatgggccatacatcaccttcctggttggctttgttgacaccttgtcacattcttgcttgggcttgaggaattcattgttcttgtttgaactgataagaac

SEQ ID NO: 109740 - DNA, 297 bp, Homo sapiens
tccttaaagattttatcacctccaccagaaaaagttggaggaggaaccaccttgaagaacccaacccagggaaatacttcccaccatggttacagcaggaatccctaactcatgattttaaaaactgaaataatttcaaaatttacactgaagacaatactactgatttcttgttaactagtagtatcatatttaataagtttccttcatttcctagtctaggaataatcccatgggggtttcttctttaatttagtaatgtattgattttctgattctgaattctccttgttttat

SEQ ID NO: 109741 - DNA, 468 bp, Homo sapiens
aaatccaaaacactaacactaccaaatactggcaagaatgtggcactgtcactcattgctggtgaatgaatgagaaacacactcaactgatttgaaacaccacttttattacaaatgtatccaggcatttagtttataataaaggtggcatttcatattggtgggaaaaggatatattatacaaaaaattacggtgttgggatatctaggtaaacatgtaggacaaacagctgaatctgctcttcacatcttacaccatgataaattccaaatgggtcaaatattcaaatgtagaaaatgaaaccatagaagtatttttttaaaagaagaaagttagcttataatctcagaatagggaaggccttcccaactattaaaacctaaaatcttaaaaaagggaaaaaaaaaaagacgataaagtttaacaccatcaaaaatgactttaagtagtcaaaagacaaaaaactg

SEQ ID NO: 109742 - DNA, 368 bp, Homo sapiens
agccggtcgcatggatgtgttaacgcccagcgtctttgggagacacaagtgtttggtggaggcgcatagggtcactgccagctccttcctgcagatcccaccgccagccacaaaacacaaaaacaaaacacccaaacaaatccagaagagcagctgcctctcctgaaatctttcccaacaggtgagtgcctcaaaggtgtcccccactgctgactggaactgctaggtgaacatgtggaagaaagttgtcctcctaaaagagcctgaaacacaattttgttcccctaatgactaaaaaaagaaacaactttaaacttcacaacacagcttattttctcctcgtctgcgacccgagcggggtggatgac

SEQ ID NO: 109743 - DNA, 803 bp, Homo sapiens
agctattcgccgtagccttcaacctggtcaagtcttacatgagtgaagagacacgcaggaaggtggtgattctcggagacaactggaagcaggagctgacaaaattcatcagccccgaccagctgcccgtggagtttggggggaccatgactgaccccgatggcaaccccaagtgcctgaccaagatcaactacgggggtgaggtgcccaagagctactacctgtgcaagcaggtgaggctgcagtatgagcacacgaggtccgtgggccgcggctcctccctgcaggtggagaacgagatcctgttcccgggctgtgtgctcagatgtcctgaggttttacaacacctacagcctggttcattctaaacgcatcagctacaccgtggaggtactgctcccagaccaaaccttcatggagaagatggagaaattctaggtgaacctcatggtccccacaccctcctctttgatctctgaatccacaatgagttcacagccttccctggccagaccctgttcaacctctcaggaacagggattctacaacagcaggtcacagcctatgcatcacagctggcccactcctcaggaacggctgggacagtgtcctagtggtggcccgatggtcacagcaaagcaacacagacactccatccccactatgacctgctgtgacctcaagctcagcaaaaaccccaggcttttttctatcaaccaataccaagaaataagttactcttctaaaatatagtattaggccaggcatggtggctcatacctgtaatcccagcactttgggaa

SEQ ID NO: 109744 - DNA, 227 bp, Homo sapiens
cccttcttcctgcctcacaatccctcttccctgaggaaaataattacaacatcagtggtcttgttacttctcattctatagtgtttatggcttattacgatcacttcttccctctggttttagcaatgtgatcaggcgcctataatttctagtacttcatcttattctccttcccctcttgatggagacatgctgtagaattaaagcaaaattatgctgtcccctca

SEQ ID NO: 109745 - DNA, 452 bp, Homo sapiens
aaacccctagtgcaagagcacactggaagcaatagaaccaagattgagctcagatctctctgcctccaaaatgtatgcctttaaccatgacaccactttgcttattagtcaaatggccttgagccaggtacttcctctctgttcttcaatgtttctaccataaaatgaagagtcgaactccatgatccctgaagtctcttccagaaatgatcccagctcagaagctaaaaagaaaaggactctgaacaagccaaaggcttcatcctgtgtgtccagcagtgccagctgtgcccatgattgacggaggccttggaaccaggcgcctagtgtccagtccggtgaagcgctggaaggcgagagggggaagggctggaaggcgggaaggggagagatatctcccccgccactggtacccacaccccccctctactggcccgtggggcgtcatgagg

SEQ ID NO: 109746 - DNA, 599 bp, Homo sapiens
atgtttttttaacctttacagtgtttctcaaactttaatgagcatttgaatttcctggggatctttttaaaaggacattctgatgcagaaggaagaggacctgaagtgctgacagctggtccaagagcacactttgagtagtgagactccggaatactgagcagcgagcaccagagcagcagttctcatcaaaggagggcatcagaacaaacacgcggtcctcgcctcctgctccctttctcaagacagagacattctgatccagtaggtgtagggtgggtcctaacacaggtgtttcgaaacagtctcaaatggtttcatgcgcccatccccttgtaaaaactggttgttcctgaatccaataataatacctatgttaaccaagtagtcggcgtgtgccagatgacttaaacgcacctttccaatcattcctcacaacagtcttgtggaggaggttctgtgaggagtctcattctacagacgaggaaactgggaggtgaaggaaactgtcaagccacaaagcctggaccctcagtcacgatgctaaacagcttcctttgtcaagcagaagaaggaagcattggggtccaaggacctgg

SEQ ID NO: 109747 - DNA, 491 bp, Homo sapiens
gggggtggtgtggtcggcagtgtgacagtggcgcgtgtgctgggggcggtgtggtcggcagtgtgacagtggcgcgtgtgctgggggcggtgtggtcggcagtgtgacagtggcgcgtgtgctgggggcggtgtggtcggcagtgtgacagtggcgcgtgtgctgggggcggtgtgatgggacacctgctgtctgagacggccctggcccccgtcccagcgctgaccatgcacgtgagcggcaggcggcccctcaccgagaagagaggataagccgtggcacattcccacctgcgccacgtgaagcggcgccccaaggccaggacgtggtggccgggacacacgggtgcacggcaggcctcacactcccaggtggggccgcagggtccctaagtcatgggtggggctgctgctacggaggctgctgcaaggacgagaaggggacggagggatggaggctcggctgcgtccgctcacctatttctggggaag

SEQ ID NO: 109748 - DNA, 243 bp, Homo sapiens
ggaggaatttgtttgcatttcttttgccacttaaaattagctgtggtctgctcagccaggggacaatggagcttcaggaaggtctgaggcaacctcctccctggttctgtcaatagaaacccaatgttaaggcaattcctaaacagagatgcacctagcaacttgctgtatgtgttcattctttattgctttcagcttcagggggtgtaacaagtataaatgtttggtttccttatgaggaag

SEQ ID NO: 109749 - DNA, 1115 bp, Homo sapiens
tttttagctacaataaaagtatttccttagaaataatatatgttttagtaagcaatgtaatactctagaaattatctcaaaaagatgacaagaaataaaacaaacaaaaaaaaaaaactttttgggccccccgggcccccgaaaaagttttttaacccttccgtttgggcgcgcggcggggcccgcagatttggtgtttaggttgaaccgtgtggtctcattcgcggtgtgttttccctataggagagaatctcggggcgccaatgagcactatggtgtgctgtgtgggttttctctctccacccaatattaaataaaaacgccgccggggcggggccacaccggggctgctgttccttgtggacaccaaactctccgaaaatgtgagggcctccgagggagggaactacatatcaagggggtactctcttatctaccacacgagggagagctctcctaggagggagagagcgctcgcgacatatattctaatatatttatagcgcccccgccccgctggtgggataatgaacatacatgaacataaacagaacaacacaaccaaaccaacaagtaacaacaaacagaccaccaacacgacaaacaagcaagaacaaccaaaccaacgacaaccagcaagagacagcaaaacatacactaatactaacggcggaacgacagcacagcagtgccgatccacgagctcacgaacatcgagacacctgcacgaagacgaactagaccaagcaacaagcaacgcaacgcatcctaccactcacgctagatagctcacacggcaacgcaagtatcaagttctaagccctactaaactaaatgtcacgatatagcaatatctatatgcatacgagctgcacagcacataacactacttgaattattattgtaagacagagctagctatagtaactcacatagatgcaacaagtagactgtatattctaagatcttgtcgaacttctcgacacgctcatgtaagcccatttctcataagaactactcacatcgtgctctcatctcactaacatccaccaacacaacccacaaccgacatcaatctatatagcacatactttcatttctgcacccgtctgtcc

SEQ ID NO: 109750 - DNA, 376 bp, Homo sapiens
tatcttctagtagaaaagacgaaaagagatataatttacaaaatatctggtacatagcaggttaaaatcctaaaaggaatatgaaaatatttgtttctacattatatgacagttgtatgaattaatagaattttaaatatttgatttgagggacattttatacaataccttctttaatatgattttggccaagaatcccctttccaaatactttgggaatagggagactttttgtgttgcattgtaagactttataataggccaggtgcagtggctcacacctgtaatcccagcacttcggaaggctgaggtgagaggatcactggagcccaggagcttaagaccagcctgagtaacatgtcaggacttcatcttt

SEQ ID NO: 109751 - DNA, 343 bp, Homo sapiens
tgaggatccctgttgctaggtggagtgcaattgttctgaaatgttttcaaagcagttacatcatttaaaagaaatttcatgaatgctaaatatgtacaacagatgagagcaagcagtgactgcaatccaggtgaggggcgcagagccagttcttagggtgactctaccagacccaactaaagctgtttgttgaagggcaagctcctagctttatgtttgctgcctttcaaaagtaaacacaatagcataatggatgttaactctttttcaaccttattttgtcctttcttatgaaggattataaaacagccaggcacagtggctcacacctgtaatcccagca

SEQ ID NO: 109752 - DNA, 563 bp, Homo sapiens
cagctatgacatgtttaggattttaatgcgactccctataggggaatttggcctcgaaggccaagattcgggcagaaggctaagcatcttacacatatttctcattaaatccacaggtgaccattgtgaggtagatattttgttctaattttccagatgaggaagctgagaccctaaaaggctgaccggttccctgatgtgttacctgcttctgctactgatccaaactgcagaacttctcattcatccccaaggcctccaggcagtatccaatggggaatcagctctaaaaggaaccagaccaacgttttccagccccttcattctgtagcttccctctgtgtgaggaaaggatagaaatgttcaggacatcatcatacaggctcctcatctacaaagttccagtagcagtgacgcctacacggaagacttggaactgcaaacaggctggggtcacctcagtgacatctgacgctgtccaaccagaagttcgatttttgttctgggggtgaaggaggaaacagactgtactaaaggactaaaataatttcttgtctatacta

SEQ ID NO: 109753 - DNA, 1182 bp, Homo sapiens
ggactcttcatgtgcttttcttaactgattagagttaacacctcagctaaagtgtatagaacatacatggggcttcatcaggcttcagaatcagtttcactagatgtgctatgtaggaggccacggaaaaattactgtagtagtaaaagttatcagttctgatgtaaacaatcattttgtcccatattataaataaattggcctgaaaatatcttttcatatgtgaggaataagtatatgatgcctttctcctttaaagtatgaactgctaaaagacagggataacgtgtattctgtattccagcagccacagtgtgtttctggtctttgtaccaggtgctcaggaagtgttttcactggcttgggttgactacttgccatctgctctctgagcattcatttctgaatgaaaggggagaaagtgaaaggagaggtgggaagaaagaggaagctgcagaaatacgaggaaacagctggaggagggaggtgaagttgaggaggtaaggtcagtaaaacaaaaagctagcagagggcagggtcaggcccttggggtagagggctaattaacttctgtcagctagttgaatagagccttgtgtgctttgttagagaccaaaggtacttcaaaggaaaaaaatctagattcttccctgtgtaccttaataattgttcatcaggtcaaaatctatcctgtcctctaggaattctggtcttccctcaggcctagcagagagctttctgccactactcaggcaaccaagggtgaagtgcttcaagtagtatttgtggacagcagcaggctgaccggttccctgatgtgttacctgcttctgctactgatccaaactgcagaacttctcattcatccccaaggcctccaggcagtatccaatggggaatcagctctaaaaggaaccagaccaacgttttccagccccttcattctgtagcttccctctgtgtgaggaaaggatagaaatgttcaggacatcatcatacaggctcctcatctacaaagttccagtagcagtgacgcctacacggaagacttggaactgcaaacaggctggggtcacctcagtgacatctgacgctgtccaaccagaagttcgatttttgttctgggggtgaaggaggaaacagactgtactaaaggactaaaataatttcttgtctatacta

SEQ ID NO: 109754 - DNA, 2066 bp, Homo sapiens
tcaaggtcaagaaacatcctttaaaaagttaattcccttttctggagcctaagccagatcttatctaggccttgtgttgccatctgttagcattgatttctggaatggagcagctttctcaaagtttggtcttgctagtcatgaggtcatgtcagtgtcttaggtcactgctgctcaccttccttacccagggagtatactgcataggtttctgaacacctgttttcattattcactgttcctctcactgccaagaatggagggaccctcagttgaagatcaaattgactctgaagaaaaactggagatgtttctcttggagtttggatagagtattcacttgataacatgtttttcccctgccttgctcttcacaagaacatctggccaggcattaacaattagtaaatttttttgcatatgaacagtatttttctggtcatgtagatgggtgcacatgacactaaacagcattgtttagtgttatccctcttaactggtgggttgtatttggggtggaggctgtagccgaggagaagacattcacctctgtactcgagaaactttgtgtaggaatttagtttatttttttattttttttaattttttattttttactacttttactgttagcacaatgctataattgagctaatctttgtagtttggtgcaggaccaccaagtttgtgtgacccattacctactttttccatgctcagcccattacccctgtcctggggcatctgagggcagtaaggaacaggtgtccaaaggaggaatgttggtgcctatgagtatgttttccagttgtattgaatttcttacttggtgtatttttgacttgtcttagtttctttccttgtggtctatgctattttacttgcgatttgttggatattctccctgtcattaaagagttgtaaaatggaagttagtttctctatgcaaatgctttaatggatgaagctgataggtttagcattgatttttgctggtgtccttcaacaagcatgaaggtgataaatgtgtttccatggctttagactcatttttgaagtcttggattgtgtgaacattcttagaaacaataaaatgttttaattaaaagccctcgactaccagctgaattcagtgtctactaggaaaatgggtagatttgttacattgtccctttgctctctatgactttgttccagttgtcaaggaacttaaatgggtattcaggaaaaagaattcttgtttccctttcctcaccttgccagttaaataactcctggtgacacttcaggtggtagaattgaaacacaaacctgacttctgaccacatgggtcaaaggcaaaaggcaaatggcttcaaagcccttagtgtgcttatccagttcaggcagtgaggagataacctctgctttcctccctgaggagtttggagtatttaaggggggatggggggggtgtcactttgaaaatatgttgctttttctcctgattgtattgaggctgatatggaagggttatttctttctggccaatactttttggtatttctaaatattgcaatcttgatttttactattaaatttgttaattgtcagttctggcttttttgcataaagagttggtccattaacttgccaatttgaagcttctaactagatattccctactgaaagttttggatttgtttttagtttgtggagcagtcttagctggggacaggtaattgacaacggcagagatactttcttttcctaggattctaagtctgtaatccacatcctcaatgtattcacaggactttaaaattctctccaaatgaggaaggaaatatcctgttgctttctaatgtttactaaaagttgtgtttagaacaacagattttaataggcatcttcctttgttatgtgtcattagccctttgcccgtttaccttagggctctttgaaggagaaatggatgggagaaaacctgtcacttggcgaaagtaaaagggataattaactggctcagagcttatgacggggaatcagggttcgattccggagagagagaatatgagcgaagaaat

SEQ ID NO: 109755 - DNA, 611 bp, Homo sapiens
ttccttcagcttctcttcctctgtctcccccccatatccgtgcgccgagctgataaaggcgccattttggaggggccgcgggagacgtggtgccgctgcgggctcgctctgccgtgcgctaggcttggtgggaaggcctgttctcgagtccgcgcttttcgtcaccgccatgtcgggaggtggtgtgattcgtggccccgcagggaacaacgattgccgcatctacgtgggtaacttacctccagacatccgaaccaaggacattgaggacgtgttctacaaatacggcgctatccgcgacatcgacctcaagaatcgccgcgggggaccgcccttcgccttcgttgagttcgaggacccgcggtgaggcggcatggggcttgcagccttgaggaaataggtccgagtagttggggaaggctccaaggccttaacatagagaacggggaagcgggggctcttagagaggttggggcgagactgtatcgcccatgcaggagtcgagtaaggagctgagttgatgtggcttctctggcgcctcgccttggacgtccccggagcccattcgcaggctggagcgggaaactgaggcgctgagggctggtgtagtg

SEQ ID NO: 109756 - DNA, 1092 bp, Homo sapiens
ggactcttcatgtgcttttcttaactgattagagttaacacctcagctaaagtgtatagaacatacatggggcttcatcaggcttcagaatcagtttcactagatgtgctatgtaggaggccacggaaaaattactgtagtagtaaaagttatcagttctgatgtaaacaatcattttgtcccatattataaataaattggcctgaaaatatcttttcatatgtgaggaataagtatatgatgcctttctcctttaaagtatgaactgctaaaagacagggataacgtgtattctgtattccagcagccacagtgtgtttctggtctttgtaccaggtgctcaggaagtgttttcactggcttgggttgactacttgccatctgctctctgagcattcatttctgaatgaaaggggagaaagtgaaaggagaggtgggaagaaagaggaagctgcagaaatacgaggaaacagctggaggagggaggtgaagttgaggaggtaaggtcagtaaaacaaaaagctagcagagggcagggtcaggcccttggggtagagggctaattaacttctgtcagctagttgaatagagccttgtgtgctttgttagagaccaaaggtacttcaaaggaaaaaaatctagattcttccctgtgtaccttaataattgttcatcaggtcaaaatctatcctgtcctctaggaattctggtcttccctcaggcctagcagagagctttctgccactactcaggcaaccaagggtgaagtgcttcaagtagtatttgtggacagcagcaggtaagcttgatgtgttattcacagcttaaagagtagatgctgagtacagctgttgtccatgtgtagagcttttaataaccagcgcagcaggccccttcacctgcttttatgcctggaccagatgactgaatgtagaactttaggcacttttttttttttttgagacggagtctcggtttgttgcccaggctggagtgcagtggcgcaatctcggctcactgcaagctctgccccccgggttcacgccattctcttgcctcagcctcccaagtagctgggactacagactccca

SEQ ID NO: 109757 - DNA, 495 bp, Homo sapiens
atgacataataactcaatataatactcaagtatgactcatgtacatgtatactatagtgtgctcatttcatatattagcgtctttgggtctctaacatggtagtcggcacctgtatgtgttaccatgcttctgctactgtttcaatcctgcatagccttgtacattcttccctcaatggactaccagtggagctatcctacttgggcgaatcagtctcttaacacgaacgcatactcatccttttccagccccttccttctagcttccctctgtgtgaggaaaggatagaaatgttcaggacatcatcatacaggctcctcatctacaaagttccagtagcagtgacgcctacacggaagacttggaactgcaaacaggctggggtcacctcagtgacatctgacgctgtccaaccagaagttcgatttttgttctgggggtgaaggaggaaacagactgtactaaaggactaaaataatttcttgtctatacta

SEQ ID NO: 109758 - DNA, 279 bp, Homo sapiens
  misc_feature (35)..(35): n is a, c, g, or t
tccgttagtctcatctctctgcatccaggagaagnaaagtactttagcttccctctgtgtgaggaaaggatagaaatgttcaggacatcatcatacaggctcctcatctacaaagttccagtagcagtgacgcctacacggaagacttggaactgcaaacaggctggggtcacctcagtgacatctgacgctgtccaaccagaagttcgatttttgttctgggggtgaaggaggaaacagactgtactaaaggactaaaataatttcttgtctatacta

SEQ ID NO: 109759 - DNA, 425 bp, Homo sapiens
ttccttcagcttctcttcctctgtctcccccccatatccgtgcgccgagctgataaaggcgccattttggaggggccgcgggagacgtggtgccgctgcgggctcgctctgccgtgcgctaggcttggtgggaaggcctgttctcgagtccgcgcttttcgtcaccgccatgtcgggaggtggtgtgattcgtggccccgcagggaacaacgattgccgcatctacgtgggtaacttacctccagacatccgaaccaaggacattgaggtaagttacccatgtcgggaggtggtgtgattcgtggccccgcagggaacaacgattgccgcatctacgtgggtaacttacctccagacatccgaaccaaggacattgaggacgtgttctacaaatacggcacatcgtggccccgcagggaacaacc

SEQ ID NO: 109760 - DNA, 6169 bp, Homo sapiens
ttccttcagcttctcttcctctgtctcccccccatatccgtgcgccgagctgataaaggcgccattttggaggggccgcgggagacgtggtgccgctgcgggctcgctctgccgtgcgctaggcttggtgggaaggcctgttctcgagtccgcgcttttcgtcaccgccatgtcgggaggtggtgtgattcgtggccccgcagggaacaacgattgccgcatctacgtgggtaacttacctccagacatccgaaccaaggacattgaggacgtgttctacaaatacggcgctatccgcgacatcgacctcaagaatcgccgcgggggaccgcccttcgccttcgttgagttcgaggacccgcgagacgcggaagacgcggtgtatggtcgcgacggctatgattacgatgggtaccgtctgcgggtggagtttcctcgaagcggccgtggaacaggccgaggcggcggcgggggtggaggtggcggagctccccgaggtcgctatggccccccatccaggcggtctgaaaacagagtggttgtctctggactgcctccaagtggaagttggcaggatttaaaggatcacatgcgtgaagcaggtgatgtatgttatgctgatgtttaccgagatggcactggtgtcgtggagtttgtacggaaagaagatatgacctatgcagttcgaaaactggataacactaagtttagatctcatgagggagaaactgcctacatccgggttaaagttgatgggcccagaagtccaagttatggaagatctcgatctcgaagccgtagtcgtagcagaagccgtagcagaagcaacagcaggagtcgcagttactccccaaggagaagcagaggatcaccacgctattctccccgtcatagcagatctcgctctcgtacataagatgattggtgacactttttgtagaacccatgttgtatacagttttcctttattcagtacaatcttttcattttttaattcaaactgttttgttcagaatgggctaaagtgttgaattgcattcttgtaatatccccttgctcctaacatctacattcccttcgtgtctttgataaattgtattttaagtgatgtcatagacaggattgtttaaatttagttaactccatactcttcagactgtgatattgtgtaaatgtctatctgccctggtttgtgtgaactgggatgttgggggtgtttgtggttatcttacctggggaagttcttatgtttatcttgcttttcatgtgtctttctgtagacatatctgaagagatggattaagaatgctttggattaaggattgtggagcacatttcaatcattttaggattgtcaaaaggaggattgaggaggatcagatcaataatggaggcaatggtatgactccaagtgctattgtcacagatgaaattggcagtattgaccttatactaaaaggcaggggttaaaaatgattatatacattttccttaaaacacttgcaaacattttattcagttgtctttagctacaattgctttgctttttaaaccttggcaattgtggcaaaattatattgcccattttgtagcaacttattttgctcccttccccccatttttgttttaatagggactaatgtgggaagaactggctaatttgtcacagtgcttagttacaactgttaatgtgtgacctgctgttggtgtacatgtgggtacagggtgtttttaaatccaacaagatagagtataatatcaatactgctaaatctgcatgtcctctgtgtgactgatagagcgttgctatttcatttttttaagacaaaatgaaagcaaaatatagagttccaatgtattggtgtagataatctagttgggaatacttttaagtctcaccttcccctttaaactaatattcataattggttcatatgtttaaaagactttaatttacaaattaaattgcaaatgggagcattagatttagttttagacttaggtgggtagcaatgccagtaaacttaaattacgtaacttcttgcaaccacgaaacctgtaatacgctgtacagtaacaagtgttggcattatcagttgaactgtaaatacaaaatgcttcttccaattagtctctatgatgattaagtttctaaaatttatctgaacaccattcagaaacttgttttggggaatttgatagttattgatgtgcatctgttaaactgatgacagacataactcatcattccccagaaaccttttttgattacagtatctaacattttgcctcctcttttttggttttgctggttataaaggtttggattggagagggctcactggatcccaatccttggagctggatcattggattcaaatcataatgtggataggatagggaggatgaattaccaggattcatggagcgggatcagattaccaggaacataggagtggattcctgccccaaccaaaccgcattcgtgtggatttttttattcaacttaattggctattccaaagattttttttttcctatttttgacgattggagcccttaagatgcacgatggaattgtgttttgcgttttttggtaaaaggagcaaagcgaggacctggagataaacgctggagcaatctccttggaaggattcagcacgagtagatggtaaacatttaaaggggaaagggggggtttgtttaaaatagtaaatcagtaagtcacttctaaatttaaagaaaacaaaattggagttgaagaataagtaggtttccaattggctattgccgttttctttgaaaaaataaacattttttaaaaaactatgcatggttgtcctttttcctcttcatgtaagattctaactgggtctatcagttaatctttaaattgttaagtaagataagattttgactcttgtgttaatgtgttagcaaattaaaagttcttaaaaggcaatctaatggtattagccatcttttattgttaattgtaaaagtcttcaggggaaagcaaaaggggagaataaggcatttgtgtatgtaacttggtaaatgacggtgggggatggatctagcatctgaaagataagcttctctactttgttataaagtggttaaaaaactatagatgctgcttattttctggtggtcatagacaacataggcttttgtgcaaaattggttgatggctactaatgttcacttggagatagcttttgatattctcaatgaaactcatctcaaaaaaaggtaagtattaaatgttaacatcagcacagatgtattagaactgttttttgtttttgagacagagtctcgctctgttctccagactggagggcagtggtgtgatctaggctcactgcaacctccacccctggatttgagtgattctcgtgcctcagtctcccaagtagctgagactacaagtgtgtgccacccttgcccggctaattttgtatttttagtagagatgtggtttctctgtgttacccaggctggtcccaaaactcctggcctcaagtgatctgcctgccttggcctcccaaagtgttaggattacaggtgtgagccaccatgctcagcctgtagaacttttaacccaagtctcatttcttttttgaaagggaagagtgcacaagattaactgcttctttggatgaatcattgttaataaaaagctgggcatttagaattttgccttataagcccttctccaaccataagattattttgtaccaaaaactttggtgttctctaccaaagcagttaaaaacttttagcctgctacttcttgtatttgtctactgacagccccttggtactatttaggttgggggaggggacctaaaataaatagactttaacatttcccttgggtgctaatcatagttggaagttgaatttaaggtgattatttgggtgacaattaaaaacctaaggaaaaccagaaatcttggtagtggaagaaatgtgtaaggtcaccccaatcggtagattttaatgaacgttgtggaatgttgggaagaggggatgttaagttgaatgcagaatttcactaagtacttagtgtaagtttaaggatgtagctctttttatctaagaattcaatgtaatggccaaaaggcagatttactgtttaaaaatttgaataattttacatgacattcttgaaattctaagaagttttatgtgtagaacattttaaaaattcatcagattattaaagggaaaataaatgattaatgataattttggaaggttaatgtgagctagacttaagtaaactttggttcatttgtgttcattgaatgttttggaaatgaccaaaaaatgtaaatggccttcactcaagtttgagtgtttaaagttgaaagatgtgctctactaaaagttatagtaattctaacctcacattgaaatgagacagtattccttgttatacaggctgaatttgaagattagagaggatctaatgtttacttaggtaaaggggcataggttttgtagttaagatgaccagacagctaaaagctgtgatgggaagtatggactgctcctatttatagtctcagaaaatggacctttaggtctctatccgtattggcaattattagaagaaagttacacccttttgaaactacaaaagctgtcttggaatttccccctcttctccctatttatgtccccttagaatattttagggagcctataattattttctaaccaaggaaaaacttaagtctctttaagaagcaattacttttcataacatcagattgaataacccaccttgctgttcagcccacatcctactggaaacaaaaggtaagaaacccattttctggttcttgattgtttgggtctgaattttgtttttaaaactaagctaagtttaatgttttttaaaatgctgtttggaatatgaatagattccccgtaaaatgatttttcctaagttttatgctttagtaaatattcagtgctcacgtctgtgcatcatagtgcttgcgtttaatatgatttattgtagaatctcaacttttcttggtgtttgttgtctttgaaacattgtcttggtcattagggctggtgttttcacatttctgtggtcaaggtggatttcttatgtgtgcctttttgcttactttgtatatgaattttgtaatttaaattgcaagtaagttatatatatgtatttaccataaatagtattaaaagatgagaaactgttagactgaagttctgttgtaacataaccattatttccatcacagtatgaagactgcaaacgcagaaaacagattacagtctcttatccattttttgaaatccaaaaactacgaaaacaaaagattttctgttgttgagctaattaaatgtgaaccctgaccagaattgctgccttcattttgcacttagtgtgactaaactgtttcctgttgaacttcattattcattgcacagttgccacagactttgctgagggttttatgtaatacagggtatatatgtacctcataaagtgcatacagctctgaatcccagatatgtctgtctccaaagagttcatataagggattgtaggaactgtactagcatacacaggcctaatgcttttgtctgtaactggggtgtcttgactgaaaaacctgttattgtgaatcctttgttgattgaattttaagttcccccatctttttaggctgaagcagccacaagaaaaaaaggtatggcccacatttctttacattctgttgtaatagtggactcaacaattatatcccattgaagcaaatactcaggcatcctagagtgtacaatacaacattcttttgagttattgtttctgtatcagtacttaaaggaacattgaccaattagatcctataggaaaagctgggattggcatgaagtaaagagattatcaggaaacatctgttcattatgtctatcgtgattgtctattgaatgaatagtaatgctgccaaaagtaacttgctttaaacaaaccccaagagattatagtatacttaaaccagtacttattcctgttattgagaccttcacggtgcttcttggtagctttgaaagctaatgcctaacaaccctgagggttcttgtgagcttgtagtgattaaaggaaggattttttaattattat

SEQ ID NO: 109761 - DNA, 6115 bp, Homo sapiens
ttccttcagcttctcttcctctgtctcccccccatatccgtgcgccgagctgataaaggcgccattttggaggggccgcgggagacgtggtgccgctgcgggctcgctctgccgtgcgctaggcttggtgggaaggcctgttctcgagtccgcgcttttcgtcaccgccatgtcgggaggtggtgtgattcgtggccccgcagggaacaacgattgccgcatctacgtgggtaacttacctccagacatccgaaccaaggacattgaggacgtgttctacaaatacggcgctatccgcgacatcgacctcaagaatcgccgcgggggaccgcccttcgccttcgttgagttcgaggacccgcgagacgcggaagacgcggtgtatggtcgcgacggctatgattacgatgggtaccgtctgcgggtggagtttcctcgaagcggccgtggaacaggccgaggcggcggcgggggtggaggtggcggagctccccgaggtcgctatggccccccatccaggcggtctgaaaacagagtggttgtctctggactgcctccaagtggaagttggcaggatttaaaggatcacatgcgtgaagcaggtgatgtatgttatgctgatgtttaccgagatggcactggtgtcgtggagtttgtacggaaagaagatatgacctatgcagttcgaaaactggataacactaagtttagatctcatgagggagaaactgcctacatccgggttaaagttgatgggcccagaagtccaagttatggaagatctcgatctcgaagccgtagtcgtagcagaagccgtagcagaagcaacagcaggagtcgcagttactccccaaggagaagcagaggatcaccacgctattctccccgtcatagcagatctcgctctcgtacataagatgattggtgacactttttgtagaacccatgttgtatacagttttcctttattcagtacaatcttttcattttttaattcaaactgttttgttcagaatgggctaaagtgttgaattgcattcttgtaatatccccttgctcctaacatctacattcccttcgtgtctttgataaattgtattttaagtgatgtcatagacaggattgtttaaatttagttaactccatactcttcagactgtgatattgtgtaaatgtctatctgccctggtttgtgtgaactgggatgttgggggtgtttgtggttatcttacctggggaagttcttatgtttatcttgcttttcatgtgtctttctgtagacatatctgaagagatggattaagaatgctttggattaaggattgtggagcacatttcaatcattttaggattgtcaaaaggaggattgaggaggatcagatcaataatggaggcaatggtatgactccaagtgctattgtcacagatgaaattggcagtattgaccttatactaaaaggcaggggttaaaaatgattatatacattttccttaaaacacttgcaaacattttattcagttgtctttagctacaattgctttgctttttaaaccttggcaattgtggcaaaattatattgcccattttgtagcaacttattttgctcccttccccccatttttgttttaatagggactaatgtgggaagaactggctaatttgtcacagtgcttagttacaactgttaatgtgtgacctgctgttggtgtacatgtgggtacagggtgtttttaaatccaacaagatagagtataatatcaatactgctaaatctgcatgtcctctgtgtgactgatagagcgttgctatttcatttttttaagacaaaatgaaagcaaaatatagagttccaatgtattggtgtagataatctagttgggaatacttttaagtctcaccttcccctttaaactaatattcataattggttcatatgtttaaaagactttaatttacaaattaaattgcaaatgggagcattagatttagttttagacttaggtgggtagcaatgccagtaaacttaaattacgtaacttcttgcaaccacgaaacctgtaatacgctgtacagtaacaagtgttggcattatcagttgaactgtaaatacaaaatgcttcttccaattagtctctatgatgattaagtttctaaaatttatctgaacaccattcagaaacttgttttggggaatttgatagttattgatgtgcatctgttaaactgatgacagacataactcatcattccccagaaaccttttttgattacagtatctaacattttgcctcctcttttttggttttgctggttataaaggtttggattggagagggctcactggatcccaatccttggagctggatcattggattcaaatcataatgtggataggatagggaggatgaattaccaggattcatggagcgggatcagattaccaggaacataggagtggattcctgccccaaccaaaccgcattcgtgtggatttttttattcaacttaattggctattccaaagattttttttttcctatttttgacgattggagcccttaagatgcacgatggaattgtgttttgcgttttttggtaaaaggagcaaagcgaggacctggagataaacgctggagcaatctccttggaaggattcagcacgagtagatggtaaacatttaaaggggaaagggggggtttgtttaaaatagtaaatcagtaagtcacttctaaatttaaagaaaacaaaattggagttgaagaataagtaggtttccaattggctattgccgttttctttgaaaaaataaacattttttaaaaaactatgcatggttgtcctttttcctcttcatgtaagattctaactgggtctatcagttaatctttaaattgttaagtaagataagattttgactcttgtgttaatgtgttagcaaattaaaagttcttaaaaggcaatctaatggtattagccatcttttattgttaattgtaaaagtcttcaggggaaagcaaaaggggagaataaggcatttgtgtatgtaacttggtaaatgacggtgggggatggatctagcatctgaaagataagcttctctactttgttataaagtggttaaaaaactatagatgctgcttattttctggtggtcatagacaacataggcttttgtgcaaaattggttgatggctactaatgttcacttggagatagcttttgatattctcaatgaaactcatctcaaaaaaaggtaagtattaaatgttaacatcagcacagatgtattagaactgttttttgtttttgagacagagtctcgctctgttctccagactggagggcagtggtgtgatctaggctcactgcaacctccacccctggatttgagtgattctcgtgcctcagtctcccaagtagctgagactacaagtgtgtgccacccttgcccggctaattttgtatttttagtagagatgtggtttctctgtgttacccaggctggtcccaaaactcctggcctcaagtgatctgcctgccttggcctcccaaagtgttaggattacaggtgtgagccaccatgctcagcctgtagaacttttaacccaagtctcatttcttttttgaaagggaagagtgcacaagattaactgcttctttggatgaatcattgttaataaaaagctgggcatttagaattttgccttataagcccttctccaaccataagattattttgtaccaaaaactttggtgttctctaccaaagcagttaaaaacttttagcctgctacttcttgtatttgtctactgacagccccttggtactatttaggttgggggaggggacctaaaataaatagactttaacatttcccttgggtgctaatcatagttggaagttgaatttaaggtgattatttgggtgacaattaaaaacctaaggattttaatgaacgttgtggaatgttgggaagaggggatgttaagttgaatgcagaatttcactaagtacttagtgtaagtttaaggatgtagctctttttatctaagaattcaatgtaatggccaaaaggcagatttactgtttaaaaatttgaataattttacatgacattcttgaaattctaagaagttttatgtgtagaacattttaaaaattcatcagattattaaagggaaaataaatgattaatgataattttggaaggttaatgtgagctagacttaagtaaactttggttcatttgtgttcattgaatgttttggaaatgaccaaaaaatgtaaatggccttcactcaagtttgagtgtttaaagttgaaagatgtgctctactaaaagttatagtaattctaacctcacattgaaatgagacagtattccttgttatacaggctgaatttgaagattagagaggatctaatgtttacttaggtaaaggggcataggttttgtagttaagatgaccagacagctaaaagctgtgatgggaagtatggactgctcctatttatagtctcagaaaatggacctttaggtctctatccgtattggcaattattagaagaaagttacacccttttgaaactacaaaagctgtcttggaatttccccctcttctccctatttatgtccccttagaatattttagggagcctataattattttctaaccaaggaaaaacttaagtctctttaagaagcaattacttttcataacatcagattgaataacccaccttgctgttcagcccacatcctactggaaacaaaaggtaagaaacccattttctggttcttgattgtttgggtctgaattttgtttttaaaactaagctaagtttaatgttttttaaaatgctgtttggaatatgaatagattccccgtaaaatgatttttcctaagttttatgctttagtaaatattcagtgctcacgtctgtgcatcatagtgcttgcgtttaatatgatttattgtagaatctcaacttttcttggtgtttgttgtctttgaaacattgtcttggtcattagggctggtgttttcacatttctgtggtcaaggtggatttcttatgtgtgcctttttgcttactttgtatatgaattttgtaatttaaattgcaagtaagttatatatatgtatttaccataaatagtattaaaagatgagaaactgttagactgaagttctgttgtaacataaccattatttccatcacagtatgaagactgcaaacgcagaaaacagattacagtctcttatccattttttgaaatccaaaaactacgaaaacaaaagattttctgttgttgagctaattaaatgtgaaccctgaccagaattgctgccttcattttgcacttagtgtgactaaactgtttcctgttgaacttcattattcattgcacagttgccacagactttgctgagggttttatgtaatacagggtatatatgtacctcataaagtgcatacagctctgaatcccagatatgtctgtctccaaagagttcatataagggattgtaggaactgtactagcatacacaggcctaatgcttttgtctgtaactggggtgtcttgactgaaaaacctgttattgtgaatcctttgttgattgaattttaagttcccccatctttttaggctgaagcagccacaagaaaaaaaggtatggcccacatttctttacattctgttgtaatagtggactcaacaattatatcccattgaagcaaatactcaggcatcctagagtgtacaatacaacattcttttgagttattgtttctgtatcagtacttaaaggaacattgaccaattagatcctataggaaaagctgggattggcatgaagtaaagagattatcaggaaacatctgttcattatgtctatcgtgattgtctattgaatgaatagtaatgctgccaaaagtaacttgctttaaacaaaccccaagagattatagtatacttaaaccagtacttattcctgttattgagaccttcacggtgcttcttggtagctttgaaagctaatgcctaacaaccctgagggttcttgtgagcttgtagtgattaaaggaaggattttttaattattat

SEQ ID NO: 109762 - DNA, 2961 bp, Homo sapiens
ttccttcagcttctcttcctctgtctcccccccatatccgtgcgccgagctgataaaggcgccattttggaggggccgcgggagacgtggtgccgctgcgggctcgctctgccgtgcgctaggcttggtgggaaggcctgttctcgagtccgcgcttttcgtcaccgccatgtcgggaggtggtgtgattcgtggccccgcagggaacaacgattgccgcatctacgtgggtaacttacctccagacatccgaaccaaggacattgaggacgtgttctacaaatacggcgctatccgcgacatcgacctcaagaatcgccgcgggggaccgcccttcgccttcgttgagttcgaggacccgcgagacgcggaagacgcggtgtatggtcgcgacggctatgattacgatgggtaccgtctgcgggtggagtttcctcgaagcggccgtggaacaggccgaggcggcggcgggggtggaggtggcggagctccccgaggtcgctatggccccccatccaggcggtctgaaaacagagtggttgtctctggactgcctccaagtggaagttggcaggatttaaaggatcacatgcgtgaagcaggtgatgtatgttatgctgatgtttaccgagatggcactggtgtcgtggagtttgtacggaaagaagatatgacctatgcagttcgaaaactggataacactaagtttagatctcatgagggagaaactgcctacatccgggttaaagttgatgggcccagaagtccaagttatggaagatctcgatctcgaagccgtagtcgtagcagaagccgtagcagaagcaacagcaggagtcgcagttactccccaaggagaagcagaggatcaccacgctattctccccgtcatagcagatctcgctctcgtacataagatgattggtgacactttttgtagaacccatgttgtatacagttttcctttattcagtacaatcttttcattttttaattcaaactgttttgttcagaatgggctaaagtgttgaattgcattcttgtaatatccccttgctcctaacatctacattcccttcgtgtctttgataaattgtattttaagtgatgtcatagacaggattgtttaaatttagttaactccatactcttcagactgtgatattgtgtaaatgtctatctgccctggtttgtgtgaactgggatgttgggggtgtttgtggttatcttacctggggaagttcttatgtttatcttgcttttcatgtgtctttctgtagacatatctgaagagatggattaagaatgctttggattaaggattgtggagcacatttcaatcattttaggattgtcaaaaggaggattgaggaggatcagatcaataatggaggcaatggtatgactccaagtgctattgtcacagatgaaattggcagtattgaccttatactaaaaggcaggggttaaaaatgattatatacattttccttaaaacacttgcaaacattttattcagttgtctttagctacaattgctttgctttttaaaccttggcaattgtggcaaaattatattgcccattttgtagcaacttattttgctcccttccccccatttttgttttaatagggactaatgtgggaagaactggctaatttgtcacagtgcttagttacaactgttaatgtgtgacctgctgttggtgtacatgtgggtacagggtgtttttaaatccaacaagatagagtataatatcaatactgctaaatctgcatgtcctctgtgtgactgatagagcgttgctatttcatttttttaagacaaaatgaaagcaaaatatagagttccaatgtattggtgtagataatctagttgggaatacttttaagtctcaccttcccctttaaactaatattcataattggttcatatgtttaaaagactttaatttacaaattaaattgcaaatgggagcattagatttagttttagacttaggtgggtagcaatgccagtaaacttaaattacgtaacttcttgcaaccacgaaacctgtaatacgctgtacagtaacaagtgttggcattatcagttgaactgtaaatacaaaatgcttcttccaattagtctctatgatgattaagtttctaaaatttatctgaacaccattcagaaacttgttttggggaatttgatagttattgatgtgcatctgttaaactgatgacagacataactcatcattccccagaaaccttttttgattacagtatctaacattttgcctcctcttttttggttttgctggttataaaggtttggattggagagggctcactggatcccaatccttggagctggatcattggattcaaatcataatgtggataggatagggaggatgaattaccaggattcatggagcgggatcagattaccaggaacataggagtggattcctgccccaaccaaaccgcattcgtgtggatttttttattcaacttaattggctattccaaagattttttttttcctatttttgacgattggagcccttaagatgcacgatggaattgtgttttgcgttttttggtaaaaggagcaaagcgaggacctggagataaacgctggagcaatctccttggaaggattcagcacgagtagatggtaaacatttaaaggggaaagggggggtttgtttaaaatagtaaatcagtaagtcacttctaaatttaaagaaaacaaaattggagttgaagaataagtaggtttccaattggctattgccgttttctttgaaaaaataaacattttttaaaaaactatgcatggttgtcctttttcctcttcatgtaagattctaactgggtctatcagttaatctttaaattgttaagtaagataagattttgactcttgtgttaatgtgttagcaaattaaaagttcttaaaaggca

SEQ ID NO: 109763 - DNA, 6369 bp, Homo sapiens
ttccttcagcttctcttcctctgtctcccccccatatccgtgcgccgagctgataaaggcgccattttggaggggccgcgggagacgtggtgccgctgcgggctcgctctgccgtgcgctaggcttggtgggaaggcctgttctcgagtccgcgcttttcgtcaccgccatgtcgggaggtggtgtgattcgtggccccgcagggaacaacgattgccgcatctacgtgggtaacttacctccagacatccgaaccaaggacattgaggacgtgttctacaaatacggcgctatccgcgacatcgacctcaagaatcgccgcgggggaccgcccttcgccttcgttgagttcgaggacccgcgagacgcggaagacgcggtgtatggtcgcgacggctatgattacgatgggtaccgtctgcgggtggagtttcctcgaagcggccgtggaacaggccgaggcggcggcgggggtggaggtggcggagctccccgaggtcgctatggccccccatccaggcggtctgaaaacagagtggttgtctctggactgcctccaagtggaagttggcaggatttaaaggatcacatgcgtgaagcaggtgatgtatgttatgctgatgtttaccgagatggcactggtgtcgtggagtttgtacggaaagaagatatgacctatgcagttcgaaaactggataacactaagtttagatctcatgaggtaggttatacacgtattcttttctttgaccagaattggatacagtggtcttaacagtggaatttcaaggtaaggattcaggcaaggttgtccaagtaaattgccagatttctggttttagttacattgtattcattcagcatgtctgaagatagatgaaagcttagatctttcaatggaaagttctgtctatccaatagggagaaactgcctacatccgggttaaagttgatgggcccagaagtccaagttatggaagatctcgatctcgaagccgtagtcgtagcagaagccgtagcagaagcaacagcaggagtcgcagttactccccaaggagaagcagaggatcaccacgctattctccccgtcatagcagatctcgctctcgtacataagatgattggtgacactttttgtagaacccatgttgtatacagttttcctttattcagtacaatcttttcattttttaattcaaactgttttgttcagaatgggctaaagtgttgaattgcattcttgtaatatccccttgctcctaacatctacattcccttcgtgtctttgataaattgtattttaagtgatgtcatagacaggattgtttaaatttagttaactccatactcttcagactgtgatattgtgtaaatgtctatctgccctggtttgtgtgaactgggatgttgggggtgtttgtggttatcttacctggggaagttcttatgtttatcttgcttttcatgtgtctttctgtagacatatctgaagagatggattaagaatgctttggattaaggattgtggagcacatttcaatcattttaggattgtcaaaaggaggattgaggaggatcagatcaataatggaggcaatggtatgactccaagtgctattgtcacagatgaaattggcagtattgaccttatactaaaaggcaggggttaaaaatgattatatacattttccttaaaacacttgcaaacattttattcagttgtctttagctacaattgctttgctttttaaaccttggcaattgtggcaaaattatattgcccattttgtagcaacttattttgctcccttccccccatttttgttttaatagggactaatgtgggaagaactggctaatttgtcacagtgcttagttacaactgttaatgtgtgacctgctgttggtgtacatgtgggtacagggtgtttttaaatccaacaagatagagtataatatcaatactgctaaatctgcatgtcctctgtgtgactgatagagcgttgctatttcatttttttaagacaaaatgaaagcaaaatatagagttccaatgtattggtgtagataatctagttgggaatacttttaagtctcaccttcccctttaaactaatattcataattggttcatatgtttaaaagactttaatttacaaattaaattgcaaatgggagcattagatttagttttagacttaggtgggtagcaatgccagtaaacttaaattacgtaacttcttgcaaccacgaaacctgtaatacgctgtacagtaacaagtgttggcattatcagttgaactgtaaatacaaaatgcttcttccaattagtctctatgatgattaagtttctaaaatttatctgaacaccattcagaaacttgttttggggaatttgatagttattgatgtgcatctgttaaactgatgacagacataactcatcattccccagaaaccttttttgattacagtatctaacattttgcctcctcttttttggttttgctggttataaaggtttggattggagagggctcactggatcccaatccttggagctggatcattggattcaaatcataatgtggataggatagggaggatgaattaccaggattcatggagcgggatcagattaccaggaacataggagtggattcctgccccaaccaaaccgcattcgtgtggatttttttattcaacttaattggctattccaaagattttttttttcctatttttgacgattggagcccttaagatgcacgatggaattgtgttttgcgttttttggtaaaaggagcaaagcgaggacctggagataaacgctggagcaatctccttggaaggattcagcacgagtagatggtaaacatttaaaggggaaagggggggtttgtttaaaatagtaaatcagtaagtcacttctaaatttaaagaaaacaaaattggagttgaagaataagtaggtttccaattggctattgccgttttctttgaaaaaataaacattttttaaaaaactatgcatggttgtcctttttcctcttcatgtaagattctaactgggtctatcagttaatctttaaattgttaagtaagataagattttgactcttgtgttaatgtgttagcaaattaaaagttcttaaaaggcaatctaatggtattagccatcttttattgttaattgtaaaagtcttcaggggaaagcaaaaggggagaataaggcatttgtgtatgtaacttggtaaatgacggtgggggatggatctagcatctgaaagataagcttctctactttgttataaagtggttaaaaaactatagatgctgcttattttctggtggtcatagacaacataggcttttgtgcaaaattggttgatggctactaatgttcacttggagatagcttttgatattctcaatgaaactcatctcaaaaaaaggtaagtattaaatgttaacatcagcacagatgtattagaactgttttttgtttttgagacagagtctcgctctgttctccagactggagggcagtggtgtgatctaggctcactgcaacctccacccctggatttgagtgattctcgtgcctcagtctcccaagtagctgagactacaagtgtgtgccacccttgcccggctaattttgtatttttagtagagatgtggtttctctgtgttacccaggctggtcccaaaactcctggcctcaagtgatctgcctgccttggcctcccaaagtgttaggattacaggtgtgagccaccatgctcagcctgtagaacttttaacccaagtctcatttcttttttgaaagggaagagtgcacaagattaactgcttctttggatgaatcattgttaataaaaagctgggcatttagaattttgccttataagcccttctccaaccataagattattttgtaccaaaaactttggtgttctctaccaaagcagttaaaaacttttagcctgctacttcttgtatttgtctactgacagccccttggtactatttaggttgggggaggggacctaaaataaatagactttaacatttcccttgggtgctaatcatagttggaagttgaatttaaggtgattatttgggtgacaattaaaaacctaaggaaaaccagaaatcttggtagtggaagaaatgtgtaaggtcaccccaatcggtagattttaatgaacgttgtggaatgttgggaagaggggatgttaagttgaatgcagaatttcactaagtacttagtgtaagtttaaggatgtagctctttttatctaagaattcaatgtaatggccaaaaggcagatttactgtttaaaaatttgaataattttacatgacattcttgaaattctaagaagttttatgtgtagaacattttaaaaattcatcagattattaaagggaaaataaatgattaatgataattttggaaggttaatgtgagctagacttaagtaaactttggttcatttgtgttcattgaatgttttggaaatgaccaaaaaatgtaaatggccttcactcaagtttgagtgtttaaagttgaaagatgtgctctactaaaagttatagtaattctaacctcacattgaaatgagacagtattccttgttatacaggctgaatttgaagattagagaggatctaatgtttacttaggtaaaggggcataggttttgtagttaagatgaccagacagctaaaagctgtgatgggaagtatggactgctcctatttatagtctcagaaaatggacctttaggtctctatccgtattggcaattattagaagaaagttacacccttttgaaactacaaaagctgtcttggaatttccccctcttctccctatttatgtccccttagaatattttagggagcctataattattttctaaccaaggaaaaacttaagtctctttaagaagcaattacttttcataacatcagattgaataacccaccttgctgttcagcccacatcctactggaaacaaaaggtaagaaacccattttctggttcttgattgtttgggtctgaattttgtttttaaaactaagctaagtttaatgttttttaaaatgctgtttggaatatgaatagattccccgtaaaatgatttttcctaagttttatgctttagtaaatattcagtgctcacgtctgtgcatcatagtgcttgcgtttaatatgatttattgtagaatctcaacttttcttggtgtttgttgtctttgaaacattgtcttggtcattagggctggtgttttcacatttctgtggtcaaggtggatttcttatgtgtgcctttttgcttactttgtatatgaattttgtaatttaaattgcaagtaagttatatatatgtatttaccataaatagtattaaaagatgagaaactgttagactgaagttctgttgtaacataaccattatttccatcacagtatgaagactgcaaacgcagaaaacagattacagtctcttatccattttttgaaatccaaaaactacgaaaacaaaagattttctgttgttgagctaattaaatgtgaaccctgaccagaattgctgccttcattttgcacttagtgtgactaaactgtttcctgttgaacttcattattcattgcacagttgccacagactttgctgagggttttatgtaatacagggtatatatgtacctcataaagtgcatacagctctgaatcccagatatgtctgtctccaaagagttcatataagggattgtaggaactgtactagcatacacaggcctaatgcttttgtctgtaactggggtgtcttgactgaaaaacctgttattgtgaatcctttgttgattgaattttaagttcccccatctttttaggctgaagcagccacaagaaaaaaaggtatggcccacatttctttacattctgttgtaatagtggactcaacaattatatcccattgaagcaaatactcaggcatcctagagtgtacaatacaacattcttttgagttattgtttctgtatcagtacttaaaggaacattgaccaattagatcctataggaaaagctgggattggcatgaagtaaagagattatcaggaaacatctgttcattatgtctatcgtgattgtctattgaatgaatagtaatgctgccaaaagtaacttgctttaaacaaaccccaagagattatagtatacttaaaccagtacttattcctgttattgagaccttcacggtgcttcttggtagctttgaaagctaatgcctaacaaccctgagggttcttgtgagcttgtagtgattaaaggaaggattttttaattattat

SEQ ID NO: 109764 - DNA, 6092 bp, Homo sapiens
ttccttcagcttctcttcctctgtctcccccccatatccgtgcgccgagctgataaaggcgccattttggaggggccgcgggagacgtggtgccgctgcgggctcgctctgccgtgcgctaggcttggtgggaaggcctgttctcgagtccgcgcttttcgtcaccgccatgtcgggaggtggtgtgattcgtggccccgcagggaacaacgattgccgcatctacgtgggtaacttacctccagacatccgaaccaaggacattgaggacgtgttctacaaatacggcgctatccgcgacatcgacctcaagaatcgccgcgggggaccgcccttcgccttcgttgagttcgaggacccgcgagacgcggaagacgcggtgtatggtcgcgacggctatgattacgatgggtaccgtctgcgggtggagtttcctcgaagcggccgtggaacaggccgaggcggcggcgggggtggaggtggcggagctccccgaggtcgctatggccccccatccaggcggtctgaaaacagagtggttgtctctggactgcctccaagtggaagttggcaggatttaaaggatcacatgcgtgaagcaggtgatgtatgttatgctgatgtttaccgagatggcactggtgtcgtggagtttgtacggaaagaagatatgacctatgcagttcgaaaactggataacactaagtttagatctcatgagggagaaactgcctacatccgggttaaagttgatgggcccagaagtccaagttatggaagatctcgatctcgaagccgtagtcgtagcagaagccgtagcagaagcaacagcaggagtcgcagttactccccaaggagaagcagaggatcaccacgctattctccccgtcatagcagatctcgctctcgtacataagatgattggtgacactttttgtagaacccatgttgtatacagttttcctttattcagtacaatcttttcattttttaattcaaactgttttgttcagaatgggctaaagtgttgaattgcattcttgtaatatccccttgctcctaacatctacattcccttcgtgtctttgataaattgtattttaagtgatgtcatagacaggattgtttaaatttagttaactccatactcttcagactgtgatattgtgtaaatgtctatctgccctggtttgtgtgaactgggatgttgggggtgtttgtggttatcttacctggggaagttcttatgtttatcttgcttttcatgtgtctttctgtagacatatctgaagagatggattaagaatgctttggattaaggattgtggagcacatttcaatcattttaggattgtcaaaaggaggattgaggaggatcagatcaataatggaggcaatggtatgactccaagtgctattgtcacagatgaaattggcagtattgaccttatactaaaaggcaggggttaaaaatgattatatacattttccttaaaacacttgcaaacattttattcagttgtctttagctacaattgctttgctttttaaaccttggcaattgtggcaaaattatattgcccattttgtagcaacttattttgctcccttccccccatttttgttttaatagggactaatgtgggaagaactggctaatttgtcacagtgcttagttacaactgttaatgtgtgacctgctgttggtgtacatgtgggtacagggtgtttttaaatccaacaagatagagtataatatcaatactgctaaatctgcatgtcctctgtgtgactgatagagcgttgctatttcatttttttaagacaaaatgaaagcaaaatatagagttccaatgtattggtgtagataatctagttgggaatacttttaagtctcaccttcccctttaaactaatattcataattggttcatatgtttaaaagactttaatttacaaattaaattgcaaatgggagcattagatttagttttagacttaggtgggtagcaatgccagtaaacttaaattacgtaacttcttgcaaccacgaaacctgtaatacgctgtacagtaacaagtgttggcattatcagttgaactgtaaatacaaaatgcttcttccaattagtctctatgatgattaagtttctaaaatttatctgaacaccattcagaaaaccttttttgattacagtatctaacattttgcctcctcttttttggttttgctggttataaaggtttggattggagagggctcactggatcccaatccttggagctggatcattggattcaaatcataatgtggataggatagggaggatgaattaccaggattcatggagcgggatcagattaccaggaacataggagtggattcctgccccaaccaaaccgcattcgtgtggatttttttattcaacttaattggctattccaaagattttttttttcctatttttgacgattggagcccttaagatgcacgatggaattgtgttttgcgttttttggtaaaaggagcaaagcgaggacctggagataaacgctggagcaatctccttggaaggattcagcacgagtagatggtaaacatttaaaggggaaagggggggtttgtttaaaatagtaaatcagtaagtcacttctaaatttaaagaaaacaaaattggagttgaagaataagtaggtttccaattggctattgccgttttctttgaaaaaataaacattttttaaaaaactatgcatggttgtcctttttcctcttcatgtaagattctaactgggtctatcagttaatctttaaattgttaagtaagataagattttgactcttgtgttaatgtgttagcaaattaaaagttcttaaaaggcaatctaatggtattagccatcttttattgttaattgtaaaagtcttcaggggaaagcaaaaggggagaataaggcatttgtgtatgtaacttggtaaatgacggtgggggatggatctagcatctgaaagataagcttctctactttgttataaagtggttaaaaaactatagatgctgcttattttctggtggtcatagacaacataggcttttgtgcaaaattggttgatggctactaatgttcacttggagatagcttttgatattctcaatgaaactcatctcaaaaaaaggtaagtattaaatgttaacatcagcacagatgtattagaactgttttttgtttttgagacagagtctcgctctgttctccagactggagggcagtggtgtgatctaggctcactgcaacctccacccctggatttgagtgattctcgtgcctcagtctcccaagtagctgagactacaagtgtgtgccacccttgcccggctaattttgtatttttagtagagatgtggtttctctgtgttacccaggctggtcccaaaactcctggcctcaagtgatctgcctgccttggcctcccaaagtgttaggattacaggtgtgagccaccatgctcagcctgtagaacttttaacccaagtctcatttcttttttgaaagggaagagtgcacaagattaactgcttctttggatgaatcattgttaataaaaagctgggcatttagaattttgccttataagcccttctccaaccataagattattttgtaccaaaaactttggtgttctctaccaaagcagttaaaaacttttagcctgctacttcttgtatttgtctactgacagccccttggtactatttaggttgggggaggggacctaaaataaatagactttaacatttcccttgggtgctaatcatagttggaagttgaatttaaggtgattatttgggtgacaattaaaaacctaaggaaaaccagaaatcttggtagtggaagaaatgtgtaaggtcaccccaatcggtagattttaatgaacgttgtggaatgttgggaagaggggatgttaagttgaatgcagaatttcactaagtacttagtgtaagtttaaggatgtagctctttttatctaagaattcaatgtaatggccaaaaggcagatttactgtttaaaaatttgaataattttacatgacattcttgaaattctaagaagttttatgtgtagaacattttaaaaattcatcagattattaaagggaaaataaatgattaatgataattttggaaggttaatgtgagctagacttaagtaaactttggttcatttgtgttcattgaatgttttggaaatgaccaaaaaatgtaaatggccttcactcaagtttgagtgtttaaagttgaaagatgtgctctactaaaagttatagtaattctaacctcacattgaaatgagacagtattccttgttatacaggctgaatttgaagattagagaggatctaatgtttacttaggtaaaggggcataggttttgtagttaagatgaccagacagctaaaagctgtgatgggaagtatggactgctcctatttatagtctcagaaaatggacctttaggtctctatccgtattggcaattattagaagaaagttacacccttttgaaactacaaaagctgtcttggaatttccccctcttctccctatttatgtccccttagaatattttagggagcctataattattttctaaccaaggaaaaacttaagtctctttaagaagcaattacttttcataacatcagattgaataacccaccttgctgttcagcccacatcctactggaaacaaaaggtaagaaacccattttctggttcttgattgtttgggtctgaattttgtttttaaaactaagctaagtttaatgttttttaaaatgctgtttggaatatgaatagattccccgtaaaatgatttttcctaagttttatgctttagtaaatattcagtgctcacgtctgtgcatcatagtgcttgcgtttaatatgatttattgtagaatctcaacttttcttggtgtttgttgtctttgaaacattgtcttggtcattagggctggtgttttcacatttctgtggtcaaggtggatttcttatgtgtgcctttttgcttactttgtatatgaattttgtaatttaaattgcaagtaagttatatatatgtatttaccataaatagtattaaaagatgagaaactgttagactgaagttctgttgtaacataaccattatttccatcacagtatgaagactgcaaacgcagaaaacagattacagtctcttatccattttttgaaatccaaaaactacgaaaacaaaagattttctgttgttgagctaattaaatgtgaaccctgaccagaattgctgccttcattttgcacttagtgtgactaaactgtttcctgttgaacttcattattcattgcacagttgccacagactttgctgagggttttatgtaatacagggtatatatgtacctcataaagtgcatacagctctgaatcccagatatgtctgtctccaaagagttcatataagggattgtaggaactgtactagcatacacaggcctaatgcttttgtctgtaactggggtgtcttgactgaaaaacctgttattgtgaatcctttgttgattgaattttaagttcccccatctttttaggctgaagcagccacaagaaaaaaaggtatggcccacatttctttacattctgttgtaatagtggactcaacaattatatcccattgaagcaaatactcaggcatcctagagtgtacaatacaacattcttttgagttattgtttctgtatcagtacttaaaggaacattgaccaattagatcctataggaaaagctgggattggcatgaagtaaagagattatcaggaaacatctgttcattatgtctatcgtgattgtctattgaatgaatagtaatgctgccaaaagtaacttgctttaaacaaaccccaagagattatagtatacttaaaccagtacttattcctgttattgagaccttcacggtgcttcttggtagctttgaaagctaatgcctaacaaccctgagggttcttgtgagcttgtagtgattaaaggaaggattttttaattattat

SEQ ID NO: 109765 - DNA, 6091 bp, Homo sapiens
ttccttcagcttctcttcctctgtctcccccccatatccgtgcgccgagctgataaaggcgccattttggaggggccgcgggagacgtggtgccgctgcgggctcgctctgccgtgcgctaggcttggtgggaaggcctgttctcgagtccgcgcttttcgtcaccgccatgtcgggaggtggtgtgattcgtggccccgcagggaacaacgattgccgcatctacgtgggtaacttacctccagacatccgaaccaaggacattgaggacgtgttctacaaatacggcgctatccgcgacatcgacctcaagaatcgccgcgggggaccgcccttcgccttcgttgagttcgaggacccgcgagacgcggaagacgcggtgtatggtcgcgacggctatgattacgatgggtaccgtctgcgggtggagtttcctcgaagcggccgtggaacaggccgaggcggcggcgggggtggaggtggcggagctccccgaggtcgctatggccccccatccaggcggtctgaaaacagagtggttgtctctggactgcctccaagtggaagttggcaggatttaaggaaagaagatatgacctatgcagttcgaaaactggataacactaagtttagatctcatgagggagaaactgcctacatccgggttaaagttgatgggcccagaagtccaagttatggaagatctcgatctcgaagccgtagtcgtagcagaagccgtagcagaagcaacagcaggagtcgcagttactccccaaggagaagcagaggatcaccacgctattctccccgtcatagcagatctcgctctcgtacataagatgattggtgacactttttgtagaacccatgttgtatacagttttcctttattcagtacaatcttttcattttttaattcaaactgttttgttcagaatgggctaaagtgttgaattgcattcttgtaatatccccttgctcctaacatctacattcccttcgtgtctttgataaattgtattttaagtgatgtcatagacaggattgtttaaatttagttaactccatactcttcagactgtgatattgtgtaaatgtctatctgccctggtttgtgtgaactgggatgttgggggtgtttgtggttatcttacctggggaagttcttatgtttatcttgcttttcatgtgtctttctgtagacatatctgaagagatggattaagaatgctttggattaaggattgtggagcacatttcaatcattttaggattgtcaaaaggaggattgaggaggatcagatcaataatggaggcaatggtatgactccaagtgctattgtcacagatgaaattggcagtattgaccttatactaaaaggcaggggttaaaaatgattatatacattttccttaaaacacttgcaaacattttattcagttgtctttagctacaattgctttgctttttaaaccttggcaattgtggcaaaattatattgcccattttgtagcaacttattttgctcccttccccccatttttgttttaatagggactaatgtgggaagaactggctaatttgtcacagtgcttagttacaactgttaatgtgtgacctgctgttggtgtacatgtgggtacagggtgtttttaaatccaacaagatagagtataatatcaatactgctaaatctgcatgtcctctgtgtgactgatagagcgttgctatttcatttttttaagacaaaatgaaagcaaaatatagagttccaatgtattggtgtagataatctagttgggaatacttttaagtctcaccttcccctttaaactaatattcataattggttcatatgtttaaaagactttaatttacaaattaaattgcaaatgggagcattagatttagttttagacttaggtgggtagcaatgccagtaaacttaaattacgtaacttcttgcaaccacgaaacctgtaatacgctgtacagtaacaagtgttggcattatcagttgaactgtaaatacaaaatgcttcttccaattagtctctatgatgattaagtttctaaaatttatctgaacaccattcagaaacttgttttggggaatttgatagttattgatgtgcatctgttaaactgatgacagacataactcatcattccccagaaaccttttttgattacagtatctaacattttgcctcctcttttttggttttgctggttataaaggtttggattggagagggctcactggatcccaatccttggagctggatcattggattcaaatcataatgtggataggatagggaggatgaattaccaggattcatggagcgggatcagattaccaggaacataggagtggattcctgccccaaccaaaccgcattcgtgtggatttttttattcaacttaattggctattccaaagattttttttttcctatttttgacgattggagcccttaagatgcacgatggaattgtgttttgcgttttttggtaaaaggagcaaagcgaggacctggagataaacgctggagcaatctccttggaaggattcagcacgagtagatggtaaacatttaaaggggaaagggggggtttgtttaaaatagtaaatcagtaagtcacttctaaatttaaagaaaacaaaattggagttgaagaataagtaggtttccaattggctattgccgttttctttgaaaaaataaacattttttaaaaaactatgcatggttgtcctttttcctcttcatgtaagattctaactgggtctatcagttaatctttaaattgttaagtaagataagattttgactcttgtgttaatgtgttagcaaattaaaagttcttaaaaggcaatctaatggtattagccatcttttattgttaattgtaaaagtcttcaggggaaagcaaaaggggagaataaggcatttgtgtatgtaacttggtaaatgacggtgggggatggatctagcatctgaaagataagcttctctactttgttataaagtggttaaaaaactatagatgctgcttattttctggtggtcatagacaacataggcttttgtgcaaaattggttgatggctactaatgttcacttggagatagcttttgatattctcaatgaaactcatctcaaaaaaaggtaagtattaaatgttaacatcagcacagatgtattagaactgttttttgtttttgagacagagtctcgctctgttctccagactggagggcagtggtgtgatctaggctcactgcaacctccacccctggatttgagtgattctcgtgcctcagtctcccaagtagctgagactacaagtgtgtgccacccttgcccggctaattttgtatttttagtagagatgtggtttctctgtgttacccaggctggtcccaaaactcctggcctcaagtgatctgcctgccttggcctcccaaagtgttaggattacaggtgtgagccaccatgctcagcctgtagaacttttaacccaagtctcatttcttttttgaaagggaagagtgcacaagattaactgcttctttggatgaatcattgttaataaaaagctgggcatttagaattttgccttataagcccttctccaaccataagattattttgtaccaaaaactttggtgttctctaccaaagcagttaaaaacttttagcctgctacttcttgtatttgtctactgacagccccttggtactatttaggttgggggaggggacctaaaataaatagactttaacatttcccttgggtgctaatcatagttggaagttgaatttaaggtgattatttgggtgacaattaaaaacctaaggaaaaccagaaatcttggtagtggaagaaatgtgtaaggtcaccccaatcggtagattttaatgaacgttgtggaatgttgggaagaggggatgttaagttgaatgcagaatttcactaagtacttagtgtaagtttaaggatgtagctctttttatctaagaattcaatgtaatggccaaaaggcagatttactgtttaaaaatttgaataattttacatgacattcttgaaattctaagaagttttatgtgtagaacattttaaaaattcatcagattattaaagggaaaataaatgattaatgataattttggaaggttaatgtgagctagacttaagtaaactttggttcatttgtgttcattgaatgttttggaaatgaccaaaaaatgtaaatggccttcactcaagtttgagtgtttaaagttgaaagatgtgctctactaaaagttatagtaattctaacctcacattgaaatgagacagtattccttgttatacaggctgaatttgaagattagagaggatctaatgtttacttaggtaaaggggcataggttttgtagttaagatgaccagacagctaaaagctgtgatgggaagtatggactgctcctatttatagtctcagaaaatggacctttaggtctctatccgtattggcaattattagaagaaagttacacccttttgaaactacaaaagctgtcttggaatttccccctcttctccctatttatgtccccttagaatattttagggagcctataattattttctaaccaaggaaaaacttaagtctctttaagaagcaattacttttcataacatcagattgaataacccaccttgctgttcagcccacatcctactggaaacaaaaggtaagaaacccattttctggttcttgattgtttgggtctgaattttgtttttaaaactaagctaagtttaatgttttttaaaatgctgtttggaatatgaatagattccccgtaaaatgatttttcctaagttttatgctttagtaaatattcagtgctcacgtctgtgcatcatagtgcttgcgtttaatatgatttattgtagaatctcaacttttcttggtgtttgttgtctttgaaacattgtcttggtcattagggctggtgttttcacatttctgtggtcaaggtggatttcttatgtgtgcctttttgcttactttgtatatgaattttgtaatttaaattgcaagtaagttatatatatgtatttaccataaatagtattaaaagatgagaaactgttagactgaagttctgttgtaacataaccattatttccatcacagtatgaagactgcaaacgcagaaaacagattacagtctcttatccattttttgaaatccaaaaactacgaaaacaaaagattttctgttgttgagctaattaaatgtgaaccctgaccagaattgctgccttcattttgcacttagtgtgactaaactgtttcctgttgaacttcattattcattgcacagttgccacagactttgctgagggttttatgtaatacagggtatatatgtacctcataaagtgcatacagctctgaatcccagatatgtctgtctccaaagagttcatataagggattgtaggaactgtactagcatacacaggcctaatgcttttgtctgtaactggggtgtcttgactgaaaaacctgttattgtgaatcctttgttgattgaattttaagttcccccatctttttaggctgaagcagccacaagaaaaaaaggtatggcccacatttctttacattctgttgtaatagtggactcaacaattatatcccattgaagcaaatactcaggcatcctagagtgtacaatacaacattcttttgagttattgtttctgtatcagtacttaaaggaacattgaccaattagatcctataggaaaagctgggattggcatgaagtaaagagattatcaggaaacatctgttcattatgtctatcgtgattgtctattgaatgaatagtaatgctgccaaaagtaacttgctttaaacaaaccccaagagattatagtatacttaaaccagtacttattcctgttattgagaccttcacggtgcttcttggtagctttgaaagctaatgcctaacaaccctgagggttcttgtgagcttgtagtgattaaaggaaggattttttaattattat

SEQ ID NO: 109766 - DNA, 5797 bp, Homo sapiens
ttccttcagcttctcttcctctgtctcccccccatatccgtgcgccgagctgataaaggcgccattttggaggggccgcgggagacgtggtgccgctgcgggctcgctctgccgtgcgctaggcttggtgggaaggcctgttctcgagtccgcgcttttcgtcaccgccatgtcgggaggtggtgtgattcgtggccccgcagggaacaacgattgccgcatctacgtgggtaacttacctccagacatccgaaccaaggacattgaggacgtgttctacaaatacggcgctatccgcgacatcgacctcaagaatcgccgcgggggaccgcccttcgccttcgttgagttcgaggacccgcgagacgcggaagacgcggtgtatggtcgcgacggctatgattacgatgggtaccgtctgcgggtggagtttcctcgaagcggccgtggaacaggccgaggcggcggcgggggtggaggtggcggagctccccgaggtcgctatggccccccatccaggcggtctgaaaacagagtggttgtctctggactgcctccaagtggaagttggcaggatttaaaggatcacatgcgtgaagcaggtgatgtatgttatgctgatgtttaccgagatggcactggtgtcgtggagtttgtacggaaagaagatatgacctatgcagttcgaaaactggataacactaagtttagatctcatgagggagaaactgcctacatccgggttaaagttgatgggcccagaagtccaagttatggaagatctcgatctcgaagccgtagtcgtagcagaagccgtagcagaagcaacagcaggagtcgcagttactccccaaggagaagcagaggatcaccacgctattctccccgtcatagcagatctcgctctcacatatctgaagagatggattaagaatgctttggattaaggattgtggagcacatttcaatcattttaggattgtcaaaaggaggattgaggaggatcagatcaataatggaggcaatggtatgactccaagtgctattgtcacagatgaaattggcagtattgaccttatactaaaaggcaggggttaaaaatgattatatacattttccttaaaacacttgcaaacattttattcagttgtctttagctacaattgctttgctttttaaaccttggcaattgtggcaaaattatattgcccattttgtagcaacttattttgctcccttccccccatttttgttttaatagggactaatgtgggaagaactggctaatttgtcacagtgcttagttacaactgttaatgtgtgacctgctgttggtgtacatgtgggtacagggtgtttttaaatccaacaagatagagtataatatcaatactgctaaatctgcatgtcctctgtgtgactgatagagcgttgctatttcatttttttaagacaaaatgaaagcaaaatatagagttccaatgtattggtgtagataatctagttgggaatacttttaagtctcaccttcccctttaaactaatattcataattggttcatatgtttaaaagactttaatttacaaattaaattgcaaatgggagcattagatttagttttagacttaggtgggtagcaatgccagtaaacttaaattacgtaacttcttgcaaccacgaaacctgtaatacgctgtacagtaacaagtgttggcattatcagttgaactgtaaatacaaaatgcttcttccaattagtctctatgatgattaagtttctaaaatttatctgaacaccattcagaaacttgttttggggaatttgatagttattgatgtgcatctgttaaactgatgacagacataactcatcattccccagaaaccttttttgattacagtatctaacattttgcctcctcttttttggttttgctggttataaaggtttggattggagagggctcactggatcccaatccttggagctggatcattggattcaaatcataatgtggataggatagggaggatgaattaccaggattcatggagcgggatcagattaccaggaacataggagtggattcctgccccaaccaaaccgcattcgtgtggatttttttattcaacttaattggctattccaaagattttttttttcctatttttgacgattggagcccttaagatgcacgatggaattgtgttttgcgttttttggtaaaaggagcaaagcgaggacctggagataaacgctggagcaatctccttggaaggattcagcacgagtagatggtaaacatttaaaggggaaagggggggtttgtttaaaatagtaaatcagtaagtcacttctaaatttaaagaaaacaaaattggagttgaagaataagtaggtttccaattggctattgccgttttctttgaaaaaataaacattttttaaaaaactatgcatggttgtcctttttcctcttcatgtaagattctaactgggtctatcagttaatctttaaattgttaagtaagataagattttgactcttgtgttaatgtgttagcaaattaaaagttcttaaaaggcaatctaatggtattagccatcttttattgttaattgtaaaagtcttcaggggaaagcaaaaggggagaataaggcatttgtgtatgtaacttggtaaatgacggtgggggatggatctagcatctgaaagataagcttctctactttgttataaagtggttaaaaaactatagatgctgcttattttctggtggtcatagacaacataggcttttgtgcaaaattggttgatggctactaatgttcacttggagatagcttttgatattctcaatgaaactcatctcaaaaaaaggtaagtattaaatgttaacatcagcacagatgtattagaactgttttttgtttttgagacagagtctcgctctgttctccagactggagggcagtggtgtgatctaggctcactgcaacctccacccctggatttgagtgattctcgtgcctcagtctcccaagtagctgagactacaagtgtgtgccacccttgcccggctaattttgtatttttagtagagatgtggtttctctgtgttacccaggctggtcccaaaactcctggcctcaagtgatctgcctgccttggcctcccaaagtgttaggattacaggtgtgagccaccatgctcagcctgtagaacttttaacccaagtctcatttcttttttgaaagggaagagtgcacaagattaactgcttctttggatgaatcattgttaataaaaagctgggcatttagaattttgccttataagcccttctccaaccataagattattttgtaccaaaaactttggtgttctctaccaaagcagttaaaaacttttagcctgctacttcttgtatttgtctactgacagccccttggtactatttaggttgggggaggggacctaaaataaatagactttaacatttcccttgggtgctaatcatagttggaagttgaatttaaggtgattatttgggtgacaattaaaaacctaaggaaaaccagaaatcttggtagtggaagaaatgtgtaaggtcaccccaatcggtagattttaatgaacgttgtggaatgttgggaagaggggatgttaagttgaatgcagaatttcactaagtacttagtgtaagtttaaggatgtagctctttttatctaagaattcaatgtaatggccaaaaggcagatttactgtttaaaaatttgaataattttacatgacattcttgaaattctaagaagttttatgtgtagaacattttaaaaattcatcagattattaaagggaaaataaatgattaatgataattttggaaggttaatgtgagctagacttaagtaaactttggttcatttgtgttcattgaatgttttggaaatgaccaaaaaatgtaaatggccttcactcaagtttgagtgtttaaagttgaaagatgtgctctactaaaagttatagtaattctaacctcacattgaaatgagacagtattccttgttatacaggctgaatttgaagattagagaggatctaatgtttacttaggtaaaggggcataggttttgtagttaagatgaccagacagctaaaagctgtgatgggaagtatggactgctcctatttatagtctcagaaaatggacctttaggtctctatccgtattggcaattattagaagaaagttacacccttttgaaactacaaaagctgtcttggaatttccccctcttctccctatttatgtccccttagaatattttagggagcctataattattttctaaccaaggaaaaacttaagtctctttaagaagcaattacttttcataacatcagattgaataacccaccttgctgttcagcccacatcctactggaaacaaaaggtaagaaacccattttctggttcttgattgtttgggtctgaattttgtttttaaaactaagctaagtttaatgttttttaaaatgctgtttggaatatgaatagattccccgtaaaatgatttttcctaagttttatgctttagtaaatattcagtgctcacgtctgtgcatcatagtgcttgcgtttaatatgatttattgtagaatctcaacttttcttggtgtttgttgtctttgaaacattgtcttggtcattagggctggtgttttcacatttctgtggtcaaggtggatttcttatgtgtgcctttttgcttactttgtatatgaattttgtaatttaaattgcaagtaagttatatatatgtatttaccataaatagtattaaaagatgagaaactgttagactgaagttctgttgtaacataaccattatttccatcacagtatgaagactgcaaacgcagaaaacagattacagtctcttatccattttttgaaatccaaaaactacgaaaacaaaagattttctgttgttgagctaattaaatgtgaaccctgaccagaattgctgccttcattttgcacttagtgtgactaaactgtttcctgttgaacttcattattcattgcacagttgccacagactttgctgagggttttatgtaatacagggtatatatgtacctcataaagtgcatacagctctgaatcccagatatgtctgtctccaaagagttcatataagggattgtaggaactgtactagcatacacaggcctaatgcttttgtctgtaactggggtgtcttgactgaaaaacctgttattgtgaatcctttgttgattgaattttaagttcccccatctttttaggctgaagcagccacaagaaaaaaaggtatggcccacatttctttacattctgttgtaatagtggactcaacaattatatcccattgaagcaaatactcaggcatcctagagtgtacaatacaacattcttttgagttattgtttctgtatcagtacttaaaggaacattgaccaattagatcctataggaaaagctgggattggcatgaagtaaagagattatcaggaaacatctgttcattatgtctatcgtgattgtctattgaatgaatagtaatgctgccaaaagtaacttgctttaaacaaaccccaagagattatagtatacttaaaccagtacttattcctgttattgagaccttcacggtgcttcttggtagctttgaaagctaatgcctaacaaccctgagggttcttgtgagcttgtagtgattaaaggaaggattttttaattattat

SEQ ID NO: 109767 - DNA, 6406 bp, Homo sapiens
ttccttcagcttctcttcctctgtctcccccccatatccgtgcgccgagctgataaaggcgccattttggaggggccgcgggagacgtggtgccgctgcgggctcgctctgccgtgcgctaggcttggtgggaaggcctgttctcgagtccgcgcttttcgtcaccgccatgtcgggaggtggtgtgattcgtggccccgcagggaacaacgattgccgcatctacgtgggtaacttacctccagacatccgaaccaaggacattgaggacgtgttctacaaatacggcgctatccgcgacatcgacctcaagaatcgccgcgggggaccgcccttcgccttcgttgagttcgaggacccgcggtgaggcggcatggggcttgcagccttgaggaaatagagacgcggaagacgcggtgtatggtcgcgacggctatgattacgatgggtaccgtctgcgggtggagtttcctcgaagcggccgtggaacaggccgaggcggcggcgggggtggaggtggcggagctccccgaggtcgctatggccccccatccaggcggtctgaaaacagagtggttgtctctggactgcctccaagtggaagttggcaggatttaaaggatcacatgcgtgaagcaggtgatgtatgttatgctgatgtttaccgagatggcactggtgtcgtggagtttgtacggaaagaagatatgacctatgcagttcgaaaactggataacactaagtttagatctcatgaggtaggttatacacgtattcttttctttgaccagaattggatacagtggtcttaacagtggaatttcaaggtaaggattcaggcaaggttgtccaagtaaattgccagatttctggttttagttacattgtattcattcagcatgtctgaagatagatgaaagcttagatctttcaatggaaagttctgtctatccaatagggagaaactgcctacatccgggttaaagttgatgggcccagaagtccaagttatggaagatctcgatctcgaagccgtagtcgtagcagaagccgtagcagaagcaacagcaggagtcgcagttactccccaaggagaagcagaggatcaccacgctattctccccgtcatagcagatctcgctctcgtacataagatgattggtgacactttttgtagaacccatgttgtatacagttttcctttattcagtacaatcttttcattttttaattcaaactgttttgttcagaatgggctaaagtgttgaattgcattcttgtaatatccccttgctcctaacatctacattcccttcgtgtctttgataaattgtattttaagtgatgtcatagacaggattgtttaaatttagttaactccatactcttcagactgtgatattgtgtaaatgtctatctgccctggtttgtgtgaactgggatgttgggggtgtttgtggttatcttacctggggaagttcttatgtttatcttgcttttcatgtgtctttctgtagacatatctgaagagatggattaagaatgctttggattaaggattgtggagcacatttcaatcattttaggattgtcaaaaggaggattgaggaggatcagatcaataatggaggcaatggtatgactccaagtgctattgtcacagatgaaattggcagtattgaccttatactaaaaggcaggggttaaaaatgattatatacattttccttaaaacacttgcaaacattttattcagttgtctttagctacaattgctttgctttttaaaccttggcaattgtggcaaaattatattgcccattttgtagcaacttattttgctcccttccccccatttttgttttaatagggactaatgtgggaagaactggctaatttgtcacagtgcttagttacaactgttaatgtgtgacctgctgttggtgtacatgtgggtacagggtgtttttaaatccaacaagatagagtataatatcaatactgctaaatctgcatgtcctctgtgtgactgatagagcgttgctatttcatttttttaagacaaaatgaaagcaaaatatagagttccaatgtattggtgtagataatctagttgggaatacttttaagtctcaccttcccctttaaactaatattcataattggttcatatgtttaaaagactttaatttacaaattaaattgcaaatgggagcattagatttagttttagacttaggtgggtagcaatgccagtaaacttaaattacgtaacttcttgcaaccacgaaacctgtaatacgctgtacagtaacaagtgttggcattatcagttgaactgtaaatacaaaatgcttcttccaattagtctctatgatgattaagtttctaaaatttatctgaacaccattcagaaacttgttttggggaatttgatagttattgatgtgcatctgttaaactgatgacagacataactcatcattccccagaaaccttttttgattacagtatctaacattttgcctcctcttttttggttttgctggttataaaggtttggattggagagggctcactggatcccaatccttggagctggatcattggattcaaatcataatgtggataggatagggaggatgaattaccaggattcatggagcgggatcagattaccaggaacataggagtggattcctgccccaaccaaaccgcattcgtgtggatttttttattcaacttaattggctattccaaagattttttttttcctatttttgacgattggagcccttaagatgcacgatggaattgtgttttgcgttttttggtaaaaggagcaaagcgaggacctggagataaacgctggagcaatctccttggaaggattcagcacgagtagatggtaaacatttaaaggggaaagggggggtttgtttaaaatagtaaatcagtaagtcacttctaaatttaaagaaaacaaaattggagttgaagaataagtaggtttccaattggctattgccgttttctttgaaaaaataaacattttttaaaaaactatgcatggttgtcctttttcctcttcatgtaagattctaactgggtctatcagttaatctttaaattgttaagtaagataagattttgactcttgtgttaatgtgttagcaaattaaaagttcttaaaaggcaatctaatggtattagccatcttttattgttaattgtaaaagtcttcaggggaaagcaaaaggggagaataaggcatttgtgtatgtaacttggtaaatgacggtgggggatggatctagcatctgaaagataagcttctctactttgttataaagtggttaaaaaactatagatgctgcttattttctggtggtcatagacaacataggcttttgtgcaaaattggttgatggctactaatgttcacttggagatagcttttgatattctcaatgaaactcatctcaaaaaaaggtaagtattaaatgttaacatcagcacagatgtattagaactgttttttgtttttgagacagagtctcgctctgttctccagactggagggcagtggtgtgatctaggctcactgcaacctccacccctggatttgagtgattctcgtgcctcagtctcccaagtagctgagactacaagtgtgtgccacccttgcccggctaattttgtatttttagtagagatgtggtttctctgtgttacccaggctggtcccaaaactcctggcctcaagtgatctgcctgccttggcctcccaaagtgttaggattacaggtgtgagccaccatgctcagcctgtagaacttttaacccaagtctcatttcttttttgaaagggaagagtgcacaagattaactgcttctttggatgaatcattgttaataaaaagctgggcatttagaattttgccttataagcccttctccaaccataagattattttgtaccaaaaactttggtgttctctaccaaagcagttaaaaacttttagcctgctacttcttgtatttgtctactgacagccccttggtactatttaggttgggggaggggacctaaaataaatagactttaacatttcccttgggtgctaatcatagttggaagttgaatttaaggtgattatttgggtgacaattaaaaacctaaggaaaaccagaaatcttggtagtggaagaaatgtgtaaggtcaccccaatcggtagattttaatgaacgttgtggaatgttgggaagaggggatgttaagttgaatgcagaatttcactaagtacttagtgtaagtttaaggatgtagctctttttatctaagaattcaatgtaatggccaaaaggcagatttactgtttaaaaatttgaataattttacatgacattcttgaaattctaagaagttttatgtgtagaacattttaaaaattcatcagattattaaagggaaaataaatgattaatgataattttggaaggttaatgtgagctagacttaagtaaactttggttcatttgtgttcattgaatgttttggaaatgaccaaaaaatgtaaatggccttcactcaagtttgagtgtttaaagttgaaagatgtgctctactaaaagttatagtaattctaacctcacattgaaatgagacagtattccttgttatacaggctgaatttgaagattagagaggatctaatgtttacttaggtaaaggggcataggttttgtagttaagatgaccagacagctaaaagctgtgatgggaagtatggactgctcctatttatagtctcagaaaatggacctttaggtctctatccgtattggcaattattagaagaaagttacacccttttgaaactacaaaagctgtcttggaatttccccctcttctccctatttatgtccccttagaatattttagggagcctataattattttctaaccaaggaaaaacttaagtctctttaagaagcaattacttttcataacatcagattgaataacccaccttgctgttcagcccacatcctactggaaacaaaaggtaagaaacccattttctggttcttgattgtttgggtctgaattttgtttttaaaactaagctaagtttaatgttttttaaaatgctgtttggaatatgaatagattccccgtaaaatgatttttcctaagttttatgctttagtaaatattcagtgctcacgtctgtgcatcatagtgcttgcgtttaatatgatttattgtagaatctcaacttttcttggtgtttgttgtctttgaaacattgtcttggtcattagggctggtgttttcacatttctgtggtcaaggtggatttcttatgtgtgcctttttgcttactttgtatatgaattttgtaatttaaattgcaagtaagttatatatatgtatttaccataaatagtattaaaagatgagaaactgttagactgaagttctgttgtaacataaccattatttccatcacagtatgaagactgcaaacgcagaaaacagattacagtctcttatccattttttgaaatccaaaaactacgaaaacaaaagattttctgttgttgagctaattaaatgtgaaccctgaccagaattgctgccttcattttgcacttagtgtgactaaactgtttcctgttgaacttcattattcattgcacagttgccacagactttgctgagggttttatgtaatacagggtatatatgtacctcataaagtgcatacagctctgaatcccagatatgtctgtctccaaagagttcatataagggattgtaggaactgtactagcatacacaggcctaatgcttttgtctgtaactggggtgtcttgactgaaaaacctgttattgtgaatcctttgttgattgaattttaagttcccccatctttttaggctgaagcagccacaagaaaaaaaggtatggcccacatttctttacattctgttgtaatagtggactcaacaattatatcccattgaagcaaatactcaggcatcctagagtgtacaatacaacattcttttgagttattgtttctgtatcagtacttaaaggaacattgaccaattagatcctataggaaaagctgggattggcatgaagtaaagagattatcaggaaacatctgttcattatgtctatcgtgattgtctattgaatgaatagtaatgctgccaaaagtaacttgctttaaacaaaccccaagagattatagtatacttaaaccagtacttattcctgttattgagaccttcacggtgcttcttggtagctttgaaagctaatgcctaacaaccctgagggttcttgtgagcttgtagtgattaaaggaaggattttttaattattat

SEQ ID NO: 109768 - DNA, 6115 bp, Homo sapiens
ttccttcagcttctcttcctctgtctcccccccatatccgtgcgccgagctgataaaggcgccattttggaggggccgcgggagacgtggtgccgctgcgggctcgctctgccgtgcgctaggcttggtgggaaggcctgttctcgagtccgcgcttttcgtcaccgccatgtcgggaggtggtgtgattcgtggccccgcagggaacaacgattgccgcatctacgtgggtaacttacctccagacatccgaaccaagaatcgccgcgggggaccgcccttcgccttcgttgagttcgaggacccgcgagacgcggaagacgcggtgtatggtcgcgacggctatgattacgatgggtaccgtctgcgggtggagtttcctcgaagcggccgtggaacaggccgaggcggcggcgggggtggaggtggcggagctccccgaggtcgctatggccccccatccaggcggtctgaaaacagagtggttgtctctggactgcctccaagtggaagttggcaggatttaaaggatcacatgcgtgaagcaggtgatgtatgttatgctgatgtttaccgagatggcactggtgtcgtggagtttgtacggaaagaagatatgacctatgcagttcgaaaactggataacactaagtttagatctcatgagggagaaactgcctacatccgggttaaagttgatgggcccagaagtccaagttatggaagatctcgatctcgaagccgtagtcgtagcagaagccgtagcagaagcaacagcaggagtcgcagttactccccaaggagaagcagaggatcaccacgctattctccccgtcatagcagatctcgctctcgtacataagatgattggtgacactttttgtagaacccatgttgtatacagttttcctttattcagtacaatcttttcattttttaattcaaactgttttgttcagaatgggctaaagtgttgaattgcattcttgtaatatccccttgctcctaacatctacattcccttcgtgtctttgataaattgtattttaagtgatgtcatagacaggattgtttaaatttagttaactccatactcttcagactgtgatattgtgtaaatgtctatctgccctggtttgtgtgaactgggatgttgggggtgtttgtggttatcttacctggggaagttcttatgtttatcttgcttttcatgtgtctttctgtagacatatctgaagagatggattaagaatgctttggattaaggattgtggagcacatttcaatcattttaggattgtcaaaaggaggattgaggaggatcagatcaataatggaggcaatggtatgactccaagtgctattgtcacagatgaaattggcagtattgaccttatactaaaaggcaggggttaaaaatgattatatacattttccttaaaacacttgcaaacattttattcagttgtctttagctacaattgctttgctttttaaaccttggcaattgtggcaaaattatattgcccattttgtagcaacttattttgctcccttccccccatttttgttttaatagggactaatgtgggaagaactggctaatttgtcacagtgcttagttacaactgttaatgtgtgacctgctgttggtgtacatgtgggtacagggtgtttttaaatccaacaagatagagtataatatcaatactgctaaatctgcatgtcctctgtgtgactgatagagcgttgctatttcatttttttaagacaaaatgaaagcaaaatatagagttccaatgtattggtgtagataatctagttgggaatacttttaagtctcaccttcccctttaaactaatattcataattggttcatatgtttaaaagactttaatttacaaattaaattgcaaatgggagcattagatttagttttagacttaggtgggtagcaatgccagtaaacttaaattacgtaacttcttgcaaccacgaaacctgtaatacgctgtacagtaacaagtgttggcattatcagttgaactgtaaatacaaaatgcttcttccaattagtctctatgatgattaagtttctaaaatttatctgaacaccattcagaaacttgttttggggaatttgatagttattgatgtgcatctgttaaactgatgacagacataactcatcattccccagaaaccttttttgattacagtatctaacattttgcctcctcttttttggttttgctggttataaaggtttggattggagagggctcactggatcccaatccttggagctggatcattggattcaaatcataatgtggataggatagggaggatgaattaccaggattcatggagcgggatcagattaccaggaacataggagtggattcctgccccaaccaaaccgcattcgtgtggatttttttattcaacttaattggctattccaaagattttttttttcctatttttgacgattggagcccttaagatgcacgatggaattgtgttttgcgttttttggtaaaaggagcaaagcgaggacctggagataaacgctggagcaatctccttggaaggattcagcacgagtagatggtaaacatttaaaggggaaagggggggtttgtttaaaatagtaaatcagtaagtcacttctaaatttaaagaaaacaaaattggagttgaagaataagtaggtttccaattggctattgccgttttctttgaaaaaataaacattttttaaaaaactatgcatggttgtcctttttcctcttcatgtaagattctaactgggtctatcagttaatctttaaattgttaagtaagataagattttgactcttgtgttaatgtgttagcaaattaaaagttcttaaaaggcaatctaatggtattagccatcttttattgttaattgtaaaagtcttcaggggaaagcaaaaggggagaataaggcatttgtgtatgtaacttggtaaatgacggtgggggatggatctagcatctgaaagataagcttctctactttgttataaagtggttaaaaaactatagatgctgcttattttctggtggtcatagacaacataggcttttgtgcaaaattggttgatggctactaatgttcacttggagatagcttttgatattctcaatgaaactcatctcaaaaaaaggtaagtattaaatgttaacatcagcacagatgtattagaactgttttttgtttttgagacagagtctcgctctgttctccagactggagggcagtggtgtgatctaggctcactgcaacctccacccctggatttgagtgattctcgtgcctcagtctcccaagtagctgagactacaagtgtgtgccacccttgcccggctaattttgtatttttagtagagatgtggtttctctgtgttacccaggctggtcccaaaactcctggcctcaagtgatctgcctgccttggcctcccaaagtgttaggattacaggtgtgagccaccatgctcagcctgtagaacttttaacccaagtctcatttcttttttgaaagggaagagtgcacaagattaactgcttctttggatgaatcattgttaataaaaagctgggcatttagaattttgccttataagcccttctccaaccataagattattttgtaccaaaaactttggtgttctctaccaaagcagttaaaaacttttagcctgctacttcttgtatttgtctactgacagccccttggtactatttaggttgggggaggggacctaaaataaatagactttaacatttcccttgggtgctaatcatagttggaagttgaatttaaggtgattatttgggtgacaattaaaaacctaaggaaaaccagaaatcttggtagtggaagaaatgtgtaaggtcaccccaatcggtagattttaatgaacgttgtggaatgttgggaagaggggatgttaagttgaatgcagaatttcactaagtacttagtgtaagtttaaggatgtagctctttttatctaagaattcaatgtaatggccaaaaggcagatttactgtttaaaaatttgaataattttacatgacattcttgaaattctaagaagttttatgtgtagaacattttaaaaattcatcagattattaaagggaaaataaatgattaatgataattttggaaggttaatgtgagctagacttaagtaaactttggttcatttgtgttcattgaatgttttggaaatgaccaaaaaatgtaaatggccttcactcaagtttgagtgtttaaagttgaaagatgtgctctactaaaagttatagtaattctaacctcacattgaaatgagacagtattccttgttatacaggctgaatttgaagattagagaggatctaatgtttacttaggtaaaggggcataggttttgtagttaagatgaccagacagctaaaagctgtgatgggaagtatggactgctcctatttatagtctcagaaaatggacctttaggtctctatccgtattggcaattattagaagaaagttacacccttttgaaactacaaaagctgtcttggaatttccccctcttctccctatttatgtccccttagaatattttagggagcctataattattttctaaccaaggaaaaacttaagtctctttaagaagcaattacttttcataacatcagattgaataacccaccttgctgttcagcccacatcctactggaaacaaaaggtaagaaacccattttctggttcttgattgtttgggtctgaattttgtttttaaaactaagctaagtttaatgttttttaaaatgctgtttggaatatgaatagattccccgtaaaatgatttttcctaagttttatgctttagtaaatattcagtgctcacgtctgtgcatcatagtgcttgcgtttaatatgatttattgtagaatctcaacttttcttggtgtttgttgtctttgaaacattgtcttggtcattagggctggtgttttcacatttctgtggtcaaggtggatttcttatgtgtgcctttttgcttactttgtatatgaattttgtaatttaaattgcaagtaagttatatatatgtatttaccataaatagtattaaaagatgagaaactgttagactgaagttctgttgtaacataaccattatttccatcacagtatgaagactgcaaacgcagaaaacagattacagtctcttatccattttttgaaatccaaaaactacgaaaacaaaagattttctgttgttgagctaattaaatgtgaaccctgaccagaattgctgccttcattttgcacttagtgtgactaaactgtttcctgttgaacttcattattcattgcacagttgccacagactttgctgagggttttatgtaatacagggtatatatgtacctcataaagtgcatacagctctgaatcccagatatgtctgtctccaaagagttcatataagggattgtaggaactgtactagcatacacaggcctaatgcttttgtctgtaactggggtgtcttgactgaaaaacctgttattgtgaatcctttgttgattgaattttaagttcccccatctttttaggctgaagcagccacaagaaaaaaaggtatggcccacatttctttacattctgttgtaatagtggactcaacaattatatcccattgaagcaaatactcaggcatcctagagtgtacaatacaacattcttttgagttattgtttctgtatcagtacttaaaggaacattgaccaattagatcctataggaaaagctgggattggcatgaagtaaagagattatcaggaaacatctgttcattatgtctatcgtgattgtctattgaatgaatagtaatgctgccaaaagtaacttgctttaaacaaaccccaagagattatagtatacttaaaccagtacttattcctgttattgagaccttcacggtgcttcttggtagctttgaaagctaatgcctaacaaccctgagggttcttgtgagcttgtagtgattaaaggaaggattttttaattattat

SEQ ID NO: 109769 - DNA, 2675 bp, Homo sapiens
  misc_feature (2614)..(2614): n is a, c, g, or t
ttccttcagcttctcttcctctgtctcccccccatatccgtgcgccgagctgataaaggcgccattttggaggggccgcgggagacgtggtgccgctgcgggctcgctctgccgtgcgctaggcttggtgggaaggcctgttctcgagtccgcgcttttcgtcaccgccatgtcgggaggtggtgtgattcgtggccccgcagggaacaacgattgccgcatctacgtgggtaacttacctccagacatccgaaccaaggacattgaggacgtgttctacaaatacggcgctatccgcgacatcgacctcaagaatcgccgcgggggaccgcccttcgccttcgttgagttcgaggacccgcgagacgcggaagacgcggtgtatggtcgcgacggctatgattacgatgggtaccgtctgcgggtggagtttcctcgaagcggccgtggaacaggccgaggcggcggcgggggtggaggtggcggagctccccgaggtcgctatggccccccatccaggcggtctgaaaacagagtggttgtctctggactgcctccaagtggaagttggcaggatttaaaggatcacatgcgtgaagcaggtgatgtatgttatgctgatgtttaccgagatggcactggtgtcgtggagtttgtacggaaagaagatatgacctatgcagttcgaaaactggataacactaagtttagatctcatgagggagaaactgcctacatccgggttaaagttgatgggcccagaagtccaagttatggaagatctcgatctcgaagccgtagtcgtagcagaagccgtagcagaagcaacagcaggagtcgcagttactccccaaggagaagcagaggatcaccacgctattctccccgtcatagcagatctcgctctcgtacataagatgattggtgacactttttgtagaacccatgttgtatacagttttcctttattcagtacaatcttttcattttttaattcaaactgttttgttcagaatgggctaaagtgttgaattgcattcttgtaatatccccttgctcctaacatctacattcccttcgtgtctttgataaattgtattttaagtgatgtcatagacaggattgtttaaatttagttaactccatactcttcagactgtgatattgtgtaaatgtctatctgccctggtttgtgtgaactgggatgttgggggtgtttgtggttatcttacctggggaagttcttatgtttatcttgcttttcatgtgtctttctgtagacatatctgaagagatggattaagaatgctttggattaaggattgtggagcacatttcaatcattttaggattgtcaaaaggaggattgaggaggatcagatcaataatggaggcaatggtatgactccaagtgctattgtcacagatgaaattggcagtattgaccttatactaaaaggcaggggttaaaaatgattatatacattttccttaaaacacttgcaaacattttattcagttgtctttagctacaattgctttgctttttaaaccttggcaattgtggcaaaattatattgcccattttgtagcaacttattttgctcccttccccccatttttgttttaatagggactaatgtgggaagaactggctaatttgtcacagtgcttagttacaactgttaatgtgtgacctgctgttggtgtacatgtgggtacagggtgtttttaaatccaacaagatagagtataatatcaatactgctaaatctgcatgtcctctgtgtgactgatagagcgttgctatttcatttttttaagacaaaatgaaagcaaaatatagagttccaatgtattggtgtagataatctagttgggaatacttttaagtctcaccttcccctttaaactaatattcataattggttcatatgtttaaaagactttaatttacaaattaaattgcaaatgggagcattagatttagttttagacttaggtgggtagcaatgccagtaaacttaaattacgtaacttcttgcaaccacgaaacctgtaatacgctgtacagtaacaagtgttggcattatcagttgaactgtaaatacaaaatgcttcttccaattagtctctatgatgattaagtttctaaaatttatctgaacaccattcagaaacttgttttggggaatttgatagttattgatgtgcatctgttaaactgatgacagacataactcatcattccccagaaaccttttttgattacagtatctaacattttgcctcctcttttttggttttgctggttataaaggtttggattggagagggctcactggatcccaatccttggagctggatcattggattcaaatcataatgtggataggatagggaggatgaattaccaggattcatggagcgggatcagattaccaggaacataggagtggattcctgccccaaccaaaccgcattcgtgtggatttttttattcaacttaattggctattccaaagattttttttttcctatttttgacgattggagcccttaagatgcacgatggaattgtgttttgcgttttttggtaaaaggagcaaaagancccaaagagcaaagacccacagcaaagcccccaaaagggatctctctatagatctccatcc

SEQ ID NO: 109770 - DNA, 2439 bp, Homo sapiens
ttccttcagcttctcttcctctgtctcccccccatatccgtgcgccgagctgataaaggcgccattttggaggggccgcgggagacgtggtgccgctgcgggctcgctctgccgtgcgctaggcttggtgggaaggcctgttctcgagtccgcgcttttcgtcaccgccatgtcgggaggtggtgtgattcgtggccccgcagggaacaacgattgccgcatctacgtgggtaacttacctccagacatccgaaccaaggacattgaggacgtgttctacaaatacggcgctatccgcgacatcgacctcaagaatcgccgcgggggaccgcccttcgccttcgttgagttcgaggacccgcgagacgcggaagacgcggtgtatggtcgcgacggctatgattacgatgggtaccgtctgcgggtggagtttcctcgaagcggccgtggaacaggccgaggcggcggcgggggtggaggtggcggagctccccgaggtcgctatggccccccatccaggcggtctgaaaacagagtggttgtctctggactgcctccaagtggaagttggcaggatttaaaggatcacatgcgtgaagcaggtgatgtatgttatgctgatgtttaccgagatggcactggtgtcgtggagtttgtacggaaagaagatatgacctatgcagttcgaaaactggataacactaagtttagatctcatgagggagaaactgcctacatccgggttaaagttgatgggcccagaagtccaagttatggaagatctcgatctcgaagccgtagtcgtagcagaagccgtagcagaagcaacagcaggagtcgcagttactccccaaggagaagcagaggatcaccacgctattctccccgtcatagcagatctcgctctcgtacataagatgattggtgacactttttgtagaacccatgttgtatacagttttcctttattcagtacaatcttttcattttttaattcaaactgttttgttcagaatgggctaaagtgttgaattgcattcttgtaatatccccttgctcctaacatctacattcccttcgtgtctttgataaattgtattttaagtgatgtcatagacaggattgtttaaatttagttaactccatactcttcagactgtgatattgtgtaaatgtctatctgccctggtttgtgtgaactgggatgttgggggtgtttgtggttatcttacctggggaagttcttatgtttatcttgcttttcatgtgtctttctgtagacatatctgaagagatggattaagaatgctttggattaaggattgtggagcacatttcaatcattttaggattgtcaaaaggaggattgaggaggatcagatcaataatggaggcaatggtatgactccaagtgctattgtcacagatgaaattggcagtattgaccttatactaaaaggcaggggttaaaaatgattatatacattttccttaaaacacttgcaaacattttattcagttgtctttagctacaattgctttgctttttaaaccttggcaattgtggcaaaattatattgcccattttgtagcaacttattttgctcccttccccccatttttgttttaatagggactaatgtgggaagaactggctaatttgtcacagtgcttagttacaactgttaatgtgtgacctgctgttggtgtacatgtgggtacagggtgtttttaaatccaacaagatagagtataatatcaatactgctaaatctgcatgtcctctgtgtgactgatagagcgttgctatttcatttttttaagacaaaatgaaagcaaaatatagagttccaatgtattggtgtagataatctagttgggaatacttttaagtctcaccttcccctttaaactaatattcataattggttcatatgtttaaaagactttaatttacaaattaaattgcaaatgggagcattagatttagttttagacttaggtgggtagcaatgccagtaaacttaaattacgtaacttcttgcaaccacgaaacctgtaatacgctgtacagtaacaagtgttggcattatcagttgaactgtaaatacaaaatgcttcttccaattagtctctatgatgattaagtttctaaaatttatctgaacaccattcagaaacttgttttggggaatttgatagttattgatgtgcatctgttaaactgatgacagacataactcatcattccccagaaaccttttttgattacagtatctaacattttgcctcctcttttttggttttgctggttaatctgatcccgctccatgaatcctggtaattcatcctccctatcctatccacattatgatttgaatccaatgatccagctccaaggattgggatccagtgagccctctccaatccaaaccttta

SEQ ID NO: 109771 - DNA, 1784 bp, Homo sapiens
ttccttcagcttctcttcctctgtctcccccccatatccgtgcgccgagctgataaaggcgccattttggaggggccgcgggagacgtggtgccgctgcgggctcgctctgccgtgcgctaggcttggtgggaaggcctgttctcgagtccgcgcttttcgtcaccgccatgtcgggaggtggtgtgattcgtggccccgcagggaacaacgattgccgcatctacgtgggtaacttacctccagacatccgaaccaaggacattgaggacgtgttctacaaatacggcgctatccgcgacatcgacctcaagaatcgccgcgggggaccgcccttcgccttcgttgagttcgaggacccgcgagacgcggaagacgcggtgtatggtcgcgacggctatgattacgatgggtaccgtctgcgggtggagtttcctcgaagcggccgtggaacaggccgaggcggcggcgggggtggaggtggcggagctccccgaggtcgctatggccccccatccaggcggtctgaaaacagagtggttgtctctggactgcctccaagtggaagttggcaggatttaaaggatcacatgcgtgaagcaggtgatgtatgttatgctgatgtttaccgagatggcactggtgtcgtggagtttgtacggaaagaagatatgacctatgcagttcgaaaactggataacactaagtttagatctcatgagggagaaactgcctacatccgggttaaagttgatgggcccagaagtccaagttatggaagatctcgatctcgaagccgtagtcgtagcagaagccgtagcagaagcaacagcaggagtcgcagttactccccaaggagaagcagaggatcaccacgctattctccccgtcatagcagatctcgctctcgtacataagatgattggtgacactttttgtagaacccatgttgtatacagttttcctttattcagtacaatcttttcattttttaattcaaactgttttgttcagaatgggctaaagtgttgaattgcattcttgtaatatccccttgctcctaacatctacattcccttcgtgtctttgataaattgtattttaagtgatgtcatagacaggattgtttaaatttagttaactccatactcttcagactgtgatattgtgtaaatgtctatctgccctggtttgtgtgaactgggatgttgggggtgtttgtggttatcttacctggggaagttcttatgtttatcttgcttttcatgtgtctttctgtagacatatctgaagagatggattaagaatgctttggattaaggattgtggagcacatttcaatcattttaggattgtcaaaaggaggattgaggaggatcagatcaataatggaggcaatggtatgactccaagtgctattgtcacagatgaaattggcagtattgaccttatactaaaaggcaggggttaaaaatgattatatacattttccttaaaacacttgcaaacattttattcagttgtctttagctacaattgctttgctttttaaaccttggcaattgtggcaaaattatattgcccattttgtagcaacttattttgctcccttccccccatttttgttttaatagggactaatgtgggaagaactggctaatttgtcacagtgcttagttacaactgttaatgtgtgacctgctgttggtgtacatgtgggtacacattaacagttgtaactaagcactgtgacaaacccacgcgtccggactagttctagatcgc

SEQ ID NO: 109772 - DNA, 4960 bp, Homo sapiens
ttccttcagcttctcttcctctgtctcccccccatatccgtgcgccgagctgataaaggcgccattttggaggggccgcgggagacgtggtgccgctgcgggctcgctctgccgtgcgctaggcttggtgggaaggcctgttctcgagtccgcgcttttcgtcaccgccatgtcgggaggtggtgtgattcgtggccccgcagggaacaacgattgccgcatctacgtgggtaacttacctccagacatccgaaccaaggacattgaggacgtgttctacaaatacggcgctatccgcgacatcgacctcaagaatcgccgcgggggaccgcccttcgccttcgttgagttcgaggacccgcgagacgcggaagacgcggtgtatggtcgcgacggctatgattacgatgggtaccgtctgcgggtggagtttcctcgaagcggccgtggaacaggccgaggcggcggcgggggtggaggtggcggagctccccgaggtcgctatggccccccatccaggcggtctgaaaacagagtggttgtctctggactgcctccaagtggaagttggcaggatttaaaggatcacatgcgtgaagcaggtgatgtatgttatgctgatgtttaccgagatggcactggtgtcgtggagtttgtacggaaagaagatatgacctatgcagttcgaaaactggataacactaagtttagatctcatgagggagaaactgcctacatccgggttaaagttgatgggcccagaagtccaagttatggaagatctcgatctcgaagccgtagtcgtagcagaagccgtagcagaagcaacagcaggagtcgcagttactccccaaggagaagcagaggatcaccacgctattctccccgtcatagcagatctcgctctcgtacataagatgattggtgacactttttgtagaacccatgttgtatacagttttcctttattcagtacaatcttttcattttttaattcaaactgttttgttcagaatgggctaaagtgttgaattgcattcttgtaatatccccttgctcctaacatctacattcccttcgtgtctttgataaattgtattttaagtgatgtcatagacaggattgtttaaatttagttaactccatactcttcagactgtgatattgtgtaaatgtctatctgccctggtttgtgtgaactgggatgttgggggtgtttgtggttatcttacctggggaagttcttatgtttatcttgcttttcatgtgtctttctgtagacatatctgaagagatggattaagaatgctttggattaaggattgtggagcacatttcaatcattttaggattgtcaaaaggaggattgaggaggatcagatcaataatggaggcaatgaagcgaggacctggagataaacgctggagcaatctccttggaaggattcagcacgagtagatggtaaacatttaaaggggaaagggggggtttgtttaaaatagtaaatcagtaagtcacttctaaatttaaagaaaacaaaattggagttgaagaataagtaggtttccaattggctattgccgttttctttgaaaaaataaacattttttaaaaaactatgcatggttgtcctttttcctcttcatgtaagattctaactgggtctatcagttaatctttaaattgttaagtaagataagattttgactcttgtgttaatgtgttagcaaattaaaagttcttaaaaggcaatctaatggtattagccatcttttattgttaattgtaaaagtcttcaggggaaagcaaaaggggagaataaggcatttgtgtatgtaacttggtaaatgacggtgggggatggatctagcatctgaaagataagcttctctactttgttataaagtggttaaaaaactatagatgctgcttattttctggtggtcatagacaacataggcttttgtgcaaaattggttgatggctactaatgttcacttggagatagcttttgatattctcaatgaaactcatctcaaaaaaaggtaagtattaaatgttaacatcagcacagatgtattagaactgttttttgtttttgagacagagtctcgctctgttctccagactggagggcagtggtgtgatctaggctcactgcaacctccacccctggatttgagtgattctcgtgcctcagtctcccaagtagctgagactacaagtgtgtgccacccttgcccggctaattttgtatttttagtagagatgtggtttctctgtgttacccaggctggtcccaaaactcctggcctcaagtgatctgcctgccttggcctcccaaagtgttaggattacaggtgtgagccaccatgctcagcctgtagaacttttaacccaagtctcatttcttttttgaaagggaagagtgcacaagattaactgcttctttggatgaatcattgttaataaaaagctgggcatttagaattttgccttataagcccttctccaaccataagattattttgtaccaaaaactttggtgttctctaccaaagcagttaaaaacttttagcctgctacttcttgtatttgtctactgacagccccttggtactatttaggttgggggaggggacctaaaataaatagactttaacatttcccttgggtgctaatcatagttggaagttgaatttaaggtgattatttgggtgacaattaaaaacctaaggaaaaccagaaatcttggtagtggaagaaatgtgtaaggtcaccccaatcggtagattttaatgaacgttgtggaatgttgggaagaggggatgttaagttgaatgcagaatttcactaagtacttagtgtaagtttaaggatgtagctctttttatctaagaattcaatgtaatggccaaaaggcagatttactgtttaaaaatttgaataattttacatgacattcttgaaattctaagaagttttatgtgtagaacattttaaaaattcatcagattattaaagggaaaataaatgattaatgataattttggaaggttaatgtgagctagacttaagtaaactttggttcatttgtgttcattgaatgttttggaaatgaccaaaaaatgtaaatggccttcactcaagtttgagtgtttaaagttgaaagatgtgctctactaaaagttatagtaattctaacctcacattgaaatgagacagtattccttgttatacaggctgaatttgaagattagagaggatctaatgtttacttaggtaaaggggcataggttttgtagttaagatgaccagacagctaaaagctgtgatgggaagtatggactgctcctatttatagtctcagaaaatggacctttaggtctctatccgtattggcaattattagaagaaagttacacccttttgaaactacaaaagctgtcttggaatttccccctcttctccctatttatgtccccttagaatattttagggagcctataattattttctaaccaaggaaaaacttaagtctctttaagaagcaattacttttcataacatcagattgaataacccaccttgctgttcagcccacatcctactggaaacaaaaggtaagaaacccattttctggttcttgattgtttgggtctgaattttgtttttaaaactaagctaagtttaatgttttttaaaatgctgtttggaatatgaatagattccccgtaaaatgatttttcctaagttttatgctttagtaaatattcagtgctcacgtctgtgcatcatagtgcttgcgtttaatatgatttattgtagaatctcaacttttcttggtgtttgttgtctttgaaacattgtcttggtcattagggctggtgttttcacatttctgtggtcaaggtggatttcttatgtgtgcctttttgcttactttgtatatgaattttgtaatttaaattgcaagtaagttatatatatgtatttaccataaatagtattaaaagatgagaaactgttagactgaagttctgttgtaacataaccattatttccatcacagtatgaagactgcaaacgcagaaaacagattacagtctcttatccattttttgaaatccaaaaactacgaaaacaaaagattttctgttgttgagctaattaaatgtgaaccctgaccagaattgctgccttcattttgcacttagtgtgactaaactgtttcctgttgaacttcattattcattgcacagttgccacagactttgctgagggttttatgtaatacagggtatatatgtacctcataaagtgcatacagctctgaatcccagatatgtctgtctccaaagagttcatataagggattgtaggaactgtactagcatacacaggcctaatgcttttgtctgtaactggggtgtcttgactgaaaaacctgttattgtgaatcctttgttgattgaattttaagttcccccatctttttaggctgaagcagccacaagaaaaaaaggtatggcccacatttctttacattctgttgtaatagtggactcaacaattatatcccattgaagcaaatactcaggcatcctagagtgtacaatacaacattcttttgagttattgtttctgtatcagtacttaaaggaacattgaccaattagatcctataggaaaagctgggattggcatgaagtaaagagattatcaggaaacatctgttcattatgtctatcgtgattgtctattgaatgaatagtaatgctgccaaaagtaacttgctttaaacaaaccccaagagattatagtatacttaaaccagtacttattcctgttattgagaccttcacggtgcttcttggtagctttgaaagctaatgcctaacaaccctgagggttcttgtgagcttgtagtgattaaaggaaggattttttaattattat

SEQ ID NO: 109773 - DNA, 1615 bp, Homo sapiens
ttccttcagcttctcttcctctgtctcccccccatatccgtgcgccgagctgataaaggcgccattttggaggggccgcgggagacgtggtgccgctgcgggctcgctctgccgtgcgctaggcttggtgggaaggcctgttctcgagtccgcgcttttcgtcaccgccatgtcgggaggtggtgtgattcgtggccccgcagggaacaacgattgccgcatctacgtgggtaacttacctccagacatccgaaccaaggacattgaggacgtgttctacaaatacggcgctatccgcgacatcgacctcaagaatcgccgcgggggaccgcccttcgccttcgttgagttcgaggacccgcgagacgcggaagacgcggtgtatggtcgcgacggctatgattacgatgggtaccgtctgcgggtggagtttcctcgaagcggccgtggaacaggccgaggcggcggcgggggtggaggtggcggagctccccgaggtcgctatggccccccatccaggcggtctgaaaacagagtggttgtctctggactgcctccaagtggaagttggcaggatttaaaggatcacatgcgtgaagcaggtgatgtatgttatgctgatgtttaccgagatggcactggtgtcgtggagtttgtacggaaagaagatatgacctatgcagttcgaaaactggataacactaagtttagatctcatgagggagaaactgcctacatccgggttaaagttgatgggcccagaagtccaagttatggaagatctcgatctcgaagccgtagtcgtagcagaagccgtagcagaagcaacagcaggagtcgcagttactccccaaggagaagcagaggatcaccacgctattctccccgtcatagcagatctcgctctcgtacataagatgattggtgacactttttgtagaacccatgttgtatacagttttcctttattcagtacaatcttttcattttttaattcaaactgttttgttcagaatgggctaaagtgttgaattgcattcttgtaatatccccttgctcctaacatctacattcccttcgtgtctttgataaattgtattttaagtgatgtcatagacaggattgtttaaatttagttaactccatactcttcagactgtgatattgtgtaaatgtctatctgccctggtttgtgtgaactgggatgttgggggtgtttgtggttatcttacctggggaagttcttatgtttatcttgcttttcatgtgtctttctgtagacatatctgaagagatggattaagaatgctttggattaaggattgtggagcacatttcaatcattttaggattgtcaaaaggaggattgaggaggatcagatcaataatggaggcaatgaagcgaggacctggagataaacgctggagcaatctccttggaaggattcagcacgagtagatggtaaacatttaaaggggaaagggggggtttgtttaaaatagtaaatcagtaagtcacttctaaatttaaagaaaacaaaattggagttgaagaataagtaggtttccaattggctattgccgttttctttgaaaaaataaacattttttaaaa

SEQ ID NO: 109774 - DNA, 1104 bp, Homo sapiens
ttccttcagcttctcttcctctgtctcccccccatatccgtgcgccgagctgataaaggcgccattttggaggggccgcgggagacgtggtgccgctgcgggctcgctctgccgtgcgctaggcttggtgggaaggcctgttctcgagtccgcgcttttcgtcaccgccatgtcgggaggtggtgtgattcgtggccccgcagggaacaacgattgccgcatctacgtgggtaacttacctccagacatccgaaccaaggacattgaggacgtgttctacaaatacggcgctatccgcgacatcgacctcaagaatcgccgcgggggaccgcccttcgccttcgttgagttcgaggacccgcgagacgcggaagacgcggtgtatggtcgcgacggctatgattacgatgggtaccgtctgcgggtggagtttcctcgaagcggccgtggaacaggccgaggcggcggcgggggtggaggtggcggagctccccgaggtcgctatggccccccatccaggcggtctgaaaacagagtggttgtctctggactgcctccaagtggaagttggcaggatttaaaggatcacatgcgtgaagcaggtgatgtatgttatgctgatgtttaccgagatggcactggtgtcgtggagtttgtacggaaagaagatatgacctatgcagttcgaaaactggataacactaagtttagatctcatgaggctgaccggttccctgatgtgttacctgcttctgctactgatccaaactgcagaacttctcattcatccccaaggcctccaggcagtatccaatggggaatcagctctaaaaggaaccagaccaacgttttccagccccttcattctgtagcttccctctgtgtgaggaaaggatagaaatgttcaggacatcatcatacaggctcctcatctacaaagttccagtagcagtgacgcctacacggaagacttggaactgcaaacaggctggggtcacctcagtgacatctgacgctgtccaaccagaagttcgatttttgttctgggggtgaaggaggaaacagactgtactaaaggactaaaataatttcttgtctatacta

SEQ ID NO: 109775 - DNA, 992 bp, Homo sapiens
ttccttcagcttctcttcctctgtctcccccccatatccgtgcgccgagctgataaaggcgccattttggaggggccgcgggagacgtggtgccgctgcgggctcgctctgccgtgcgctaggcttggtgggaaggcctgttctcgagtccgcgcttttcgtcaccgccatgtcgggaggtggtgtgattcgtggccccgcagggaacaacgattgccgcatctacgtgggtaacttacctccagacatccgaaccaaggacattgaggacgtgttctacaaatacggcgctatccgcgacatcgacctcaagaatcgccgcgggggaccgcccttcgccttcgttgagttcgaggacccgcgagacgcggaagacgcggtgtatggtcgcgacggctatgattacgatgggtaccgtctgcgggtggagtttcctcgaagcggccgtggaacaggccgaggcggcggcgggggtggaggtggcggagctccccgaggtcgctatggccccccatccaggcggtctgaaaacagagtggttgtctctggactgcctccaagtggaagttggcaggatttaaaggatcacatgcgtgaagcaggtgatgtatgttatgctgatgtttaccgagatggcactggtgtcgtggagtttgtacggaaagaagatatgacctatgcagttcgaaaactggataacactaagtttagatctcatgaggctgaccggttccctgatgtgttacctgcttctgctactgatccaaactgcagaacttctcattcatccccaaggcctccaggcagtatccaatggggaatcagctctaaaaggaaccagaccaacgttttccagccccttcattctgtagcttccctctgtgtgaggaaaggatagaaatgttcaggacatcatcatacaggctcctcatctacaaagttccagtagcagtgacccagtgacttcctcatcccggatcctctagatcact

SEQ ID NO: 109776 - DNA, 3678 bp, Homo sapiens
tcaaggtcaagaaacatcctttaaaaagttaattcccttttctggagcctaagccagatcttatctaggccttgtgttgccatctgttagcattgatttctggaatggagcagctttctcaaagtttggtcttgctagtcatgaggtcatgtcagtgtcttaggtcactgctgctcaccttccttacccagggagtatactgcataggtttctgaacacctgttttcattattcactgttcctctcactgccaagaatggagggaccctcagttgaagatcaaattgactctgaagaaaaactggagatgtttctcttggagtttggatagagtattcacttgataacatgtttttcccctgccttgctcttcacaagaacatctggccaggcattaacaattagtaaatttttttgcatatgaacagtatttttctggtcatgtagatgggtgcacatgacactaaacagcattgtttagtgttatccctcttaactggtgggttgtatttggggtggaggctgtagccgaggagaagacattcacctctgtactcgagaaactttgtgtaggaatttagtttatttttttattttttttaattttttattttttactacttttactgttagcacaatgctataattgagctaatctttgtagtttggtgcaggaccaccaagtttgtgtgacccattacctactttttccatgctcagcccattacccctgtcctggggcatctgagggcagtaaggaacaggtgtccaaaggaggaatgttggtgcctatgagtatgttttccagttgtattgaatttcttacttggtgtatttttgacttgtcttagtttctttccttgtggtctatgctattttacttgcgatttgttggatattctccctgtcattaaagagttgtaaaatggaagttagtttctctatgcaaatgctttaatggatgaagctgataggtttagcattgatttttgctggtgtccttcaacaagcatgaaggtgataaatgtgtttccatggctttagactcatttttgaagtcttggattgtgtgaacattcttagaaacaataaaatgttttaattaaaagccctcgactaccagctgaattcagtgtctactaggaaaatgggtagatttgttacattgtccctttgctctctatgactttgttccagttgtcaaggaacttaaatgggtattcaggaaaaagaattcttgtttccctttcctcaccttgccagttaaataactcctggtgacacttcaggtggtagaattgaaacacaaacctgacttctgaccacatgggtcaaaggcaaaaggcaaatggcttcaaagcccttagtgtgcttatccagttcaggcagtgaggagataacctctgctttcctccctgaggagtttggagtatttaaggggggatggggggggtgtcactttgaaaatatgttgctttttctcctgattgtattgaggctgatatggaagggttatttctttctggccaatactttttggtatttctaaatattgcaatcttgatttttactattaaatttgttaattgtcagttctggcttttttgcataaagagttggtccattaacttgccaatttgaagcttctaactagatattccctactgaaagttttggatttgtttttagtttgtggagcagtcttagctggggacaggtaattgacaacggcagagatactttcttttcctaggattctaagtctgtaatccacatcctcaatgtattcacaggactttaaaattctctccaaatgaggaaggaaatatcctgttgctttctaatgtttactaaaagttgtgtttagaacaacagattttaataggcatcttcctttgttatgtgtcattagccctttgcccgtttaccttagggctctttgaaggagaaatggatgggagaaaacctgtcacttggcgaaagtaaaagggataattaactggctcagagcttatgtgcagagttccaagccccaaagttaatctagaaccactcgataacaccaataaaaatatttatttcacatctgttatatatctggaaaatgttctaagcatcttacacatatttctcattaaatccacaggtgaccattgtgaggtagatattttgttctaattttccagatgaggaagctgagaccctaaaaggttaggtgacaggttatacaacttggagtgtgggaggaggagagaggaacctgaacagggcaagttggggatctgacttttgtttgggtagatgtaggcacattgtatttttggcttagatgctttattcatcatggctgaaggtaataccatttactcactcaccgaaaattgtttacaataatctagatgaatttgctgtctttggacatctgtcttttgactggaccccagtatatagtctgtggaagctcacttaaggagagagctcctttttgtttggttagagaaattttctgtcctaaaagtagaaatagccccttctaggtaaggatggagcatttgatcatactggtttcattatattcctctaacagttggaaccgattgtttttgagtacttgtttcaaacttctgagtattttccttctggaaaatagctcagtgtttaaaatttacatgaacttaaaaggttaatttttttttaaagaatgtttgaggagcaatcaattctgattttgtcttatggatagaaatagaattagccattttcctcaagaaaagtgattcttctgaatcttagcttttcagtaatgagaactggactgtttccacttgacctctatttcctgttagtgggaaaccgcttcccagaggtgctgtgtgaaagattgctggggaaagggtttctagatcccagcataacaagttcaagagtccagcgatattgtcattagaataatggtcttcattaagtactagttttcataatcctgaagcttcattttcaccaatttgaaaggcagctagggaggagaagactatgcagggaaggaggaaaactctggagtgcatcacagagaccttgagtgagttaaggcagggaagaagcagatttgctatccactgaatgaaaataagaagaattccattgtccaaggtcagagcaagaacacaaaggttttagtttacttagttaattccttaggtttggacattacaggagacatgggggtgaccatagcaatttagctgataaatgtatcagaaactctttcatcattttctgtcccctcctatcttaggctgaccggttccctgatgtgttacctgcttctgctactgatccaaactgcagaacttctcattcatccccaaggcctccaggcagtatccaatggggaatcagctctaaaaggaaccagaccaacgttttccagccccttcattctgtagcttccctctgtgtgaggaaaggatagaaatgttcaggacatcatcatacaggctcctcatctacaaagttccagtagcagtgacgcctacacggaagacttggaactgcaaacaggctggggtcacctcagtgacatctgacgctgtccaaccagaagttcgatttttgttctgggggtgaaggaggaaacagactgtactaaaggactaaaataatttcttgtctatacta

SEQ ID NO: 109777 - DNA, 2593 bp, Homo sapiens
tcaaggtcaagaaacatcctttaaaaagttaattcccttttctggagcctaagccagatcttatctaggccttgtgttgccatctgttagcattgatttctggaatggagcagctttctcaaagtttggtcttgctagtcatgaggtcatgtcagtgtcttaggtcactgctgctcaccttccttacccagggagtatactgcataggtttctgaacacctgttttcattattcactgttcctctcactgccaagaatggagggaccctcagttgaagatcaaattgactctgaagaaaaactggagatgtttctcttggagtttggatagagtattcacttgataacatgtttttcccctgccttgctcttcacaagaacatctggccaggcattaacaattagtaaatttttttgcatatgaacagtatttttctggtcatgtagatgggtgcacatgacactaaacagcattgtttagtgttatccctcttaactggtgggttgtatttggggtggaggctgtagccgaggagaagacattcacctctgtactcgagaaactttgtgtaggaatttagtttatttttttattttttttaattttttattttttactacttttactgttagcacaatgctataattgagctaatctttgtagtttggtgcaggaccaccaagtttgtgtgacccattacctactttttccatgctcagcccattacccctgtcctggggcatctgagggcagtaaggaacaggtgtccaaaggaggaatgttggtgcctatgagtatgttttccagttgtattgaatttcttacttggtgtatttttgacttgtcttagtttctttccttgtggtctatgctattttacttgcgatttgttggatattctccctgtcattaaagagttgtaaaatggaagttagtttctctatgcaaatgctttaatggatgaagctgataggtttagcattgatttttgctggtgtccttcaacaagcatgaaggtgataaatgtgtttccatggctttagactcatttttgaagtcttggattgtgtgaacattcttagaaacaataaaatgttttaattaaaagccctcgactaccagctgaattcagtgtctactaggaaaatgggtagatttgttacattgtccctttgctctctatgactttgttccagttgtcaaggaacttaaatgggtattcaggaaaaagaattcttgtttccctttcctcaccttgccagttaaataactcctggtgacacttcaggtggtagaattgaaacacaaacctgacttctgaccacatgggtcaaaggcaaaaggcaaatggcttcaaagcccttagtgtgcttatccagttcaggcagtgaggagataacctctgctttcctccctgaggagtttggagtatttaaggggggatggggggggtgtcactttgaaaatatgttgctttttctcctgattgtattgaggctgatatggaagggttatttctttctggccaatactttttggtatttctaaatattgcaatcttgatttttactattaaatttgttaattgtcagttctggcttttttgcataaagagttggtccattaacttgccaatttgaagcttctaactagatattccctactgaaagttttggatttgtttttagtttgtggagcagtcttagctggggacaggtaattgacaacggcagagatactttcttttcctaggattctaagtctgtaatccacatcctcaatgtattcacaggactttaaaattctctccaaatgaggaaggaaatatcctgttgctttctaatgtttactaaaagttgtgtttagaacaacagattttaataggcatcttcctttgttatgtgtcattagccctttgcccgtttaccttagggctctttgaaggagaaatggatgggagaaaacctgtcacttggcgaaagtaaaagggataattaactggctcagagcttatgtgcagagttccaagccccaaagttaatctagaaccactcgataacaccaataaaaatatttatttcacatctgttatatatctggaaaatgttctaagcatcttacacatatttctcattaaatccacaggtgaccattgtgaggtagatattttgttctaattttccagatgaggaagctgagaccctaaaaggctgaccggttccctgatgtgttacctgcttctgctactgatccaaactgcagaacttctcattcatccccaaggcctccaggcagtatccaatggggaatcagctctaaaaggaaccagaccaacgttttccagccccttcattctgtagcttccctctgtgtgaggaaaggatagaaatgttcaggacatcatcatacaggctcctcatctacaaagttccagtagcagtgacgcctacacggaagacttggaactgcaaacaggctggggtcacctcagtgacatctgacgctgtccaaccagaagttcgatttttgttctgggggtgaaggaggaaacagactgtactaaaggactaaaataatttcttgtctatacta

SEQ ID NO: 109778 - DNA, 4057 bp, Homo sapiens
tcaaggtcaagaaacatcctttaaaaagttaattcccttttctggagcctaagccagatcttatctaggccttgtgttgccatctgttagcattgatttctggaatggagcagctttctcaaagtttggtcttgctagtcatgaggtcatgtcagtgtcttaggtcactgctgctcaccttccttacccagggagtatactgcataggtttctgaacacctgttttcattattcactgttcctctcactgccaagaatggagggaccctcagttgaagatcaaattgactctgaagaaaaactggagatgtttctcttggagtttggatagagtattcacttgataacatgtttttcccctgccttgctcttcacaagaacatctggccaggcattaacaattagtaaatttttttgcatatgaacagtatttttctggtcatgtagatgggtgcacatgacactaaacagcattgtttagtgttatccctcttaactggtgggttgtatttggggtggaggctgtagccgaggagaagacattcacctctgtactcgagaaactttgtgtaggaatttagtttatttttttattttttttaattttttattttttactacttttactgttagcacaatgctataattgagctaatctttgtagtttggtgcaggaccaccaagtttgtgtgacccattacctactttttccatgctcagcccattacccctgtcctggggcatctgagggcagtaaggaacaggtgtccaaaggaggaatgttggtgcctatgagtatgttttccagttgtattgaatttcttacttggtgtatttttgacttgtcttagtttctttccttgtggtctatgctattttacttgcgatttgttggatattctccctgtcattaaagagttgtaaaatggaagttagtttctctatgcaaatgctttaatggatgaagctgataggtttagcattgatttttgctggtgtccttcaacaagcatgaaggtgataaatgtgtttccatggctttagactcatttttgaagtcttggattgtgtgaacattcttagaaacaataaaatgttttaattaaaagccctcgactaccagctgaattcagtgtctactaggaaaatgggtagatttgttacattgtccctttgctctctatgactttgttccagttgtcaaggaacttaaatgggtattcaggaaaaagaattcttgtttccctttcctcaccttgccagttaaataactcctggtgacacttcaggtggtagaattgaaacacaaacctgacttctgaccacatgggtcaaaggcaaaaggcaaatggcttcaaagcccttagtgtgcttatccagttcaggcagtgaggagataacctctgctttcctccctgaggagtttggagtatttaaggggggatggggggggtgtcactttgaaaatatgttgctttttctcctgattgtattgaggctgatatggaagggttatttctttctggccaatactttttggtatttctaaatattgcaatcttgatttttactattaaatttgttaattgtcagttctggcttttttgcataaagagttggtccattaacttgccaatttgaagcttctaactagatattccctactgaaagttttggatttgtttttagtttgtggagcagtcttagctggggacaggtaattgacaacggcagagatactttcttttcctaggattctaagtctgtaatccacatcctcaatgtattcacaggactttaaaattctctccaaatgaggaaggaaatatcctgttgctttctaatgtttactaaaagttgtgtttagaacaacagattttaataggcatcttcctttgttatgtgtcattagccctttgcccgtttaccttagggctctttgaaggagaaatggatgggagaaaacctgtcacttggcgaaagtaaaagggataattaactggctcagagcttatgtgcagagttccaagccccaaagttaatctagaaccactcgataacaccaataaaaatatttatttcacatctgttatatatctggaaaatgttctaagcatcttacacatatttctcattaaatccacaggtgaccattgtgaggtagatattttgttctaattttccagatgaggaagctgagaccctaaaaggttaggtgacaggttatacaacttggagtgtgggaggaggagagaggaacctgaacagggcaagttggggatctgacttttgtttgggtagatgtaggcacattgtatttttggcttagatgctttattcatcatggctgaaggtaataccatttactcactcaccgaaaattgtttacaataatctagatgaatttgctgtctttggacatctgtcttttgactggaccccagtatatagtctgtggaagctcacttaaggagagagctcctttttgtttggttagagaaattttctgtcctaaaagtagaaatagccccttctaggtaaggatggagcatttgatcatactggtttcattatattcctctaacagttggaaccgattgtttttgagtacttgtttcaaacttctgagtattttccttctggaaaatagctcagtgtttaaaatttacatgaacttaaaaggttaatttttttttaaagaatgtttgaggagcaatcaattctgattttgtcttatggatagaaatagaattagccattttcctcaagaaaagtgattcttctgaatcttagcttttcagtaatgagaactggactgtttccacttgacctctatttcctgttagtgggaaaccgcttcccagaggtgctgtgtgaaagattgctggggaaagggtttctagatcccagcataacaagttcaagagtccagcgatattgtcattagaataatggtcttcattaagtactagttttcataatcctgaagcttcattttcaccaatttgaaaggcagctagggaggagaagactatgcagggaaggaggaaaactctggagtgcatcacagagaccttgagtgagttaaggcagggaagaagcagatttgctatccactgaatgaaaataagaagaattccattgtccaaggtcagagcaagaacacaaaggttttagtttacttagttaattccttaggtttggacattacaggagacatgggggtgaccatagcaatttagctgataaatgtatcagaaactctttcatcattttctgtcccctcctatcttaggctgaccggttccctgatgtgttacctgcttctgctactgatccaaactgcagaacttctcattcatccccaaggcctccaggcagtatccaatggggaatcagctctaaaaggaaccagaccaacgttttccagccccttcattctggtgactgaggggaggaaagaatgggagggggtattcttgtctagtggatggaaaggaaacacactgtcaaattactatatctccttggttttctattacagtagaattctccagccatatttttattgtctatgggggaagttggagatggtgaccttgattagaagtgtctggagggggataaatggaggggataagattcagttggttttggaaaatgttaaagtcttaaaataatgcgtccatctgaagaattttttctaaaaccagagtttataaaaatatcactgatacagcctgccccctcatttccctgccacaggagatgtcttggactagagacacttgtttaataatagcttgtctctgatattcccagtagcttccctctgtgtgaggaaaggatagaaatgttcaggacatcatcatacaggctcctcatctacaaagttccagtagcagtgacgcctacacggaagacttggaactgcaaacaggctggggtcacctcagtgacatctgacgctgtccaaccagaagttcgatttttgttctgggggtgaaggaggaaacagactgtactaaaggactaaaataatttcttgtctatacta

SEQ ID NO: 109779 - DNA, 3413 bp, Homo sapiens
tcaaggtcaagaaacatcctttaaaaagttaattcccttttctggagcctaagccagatcttatctaggccttgtgttgccatctgttagcattgatttctggaatggagcagctttctcaaagtttggtcttgctagtcatgaggtcatgtcagtgtcttaggtcactgctgctcaccttccttacccagggagtatactgcataggtttctgaacacctgttttcattattcactgttcctctcactgccaagaatggagggaccctcagttgaagatcaaattgactctgaagaaaaactggagatgtttctcttggagtttggatagagtattcacttgataacatgtttttcccctgccttgctcttcacaagaacatctggccaggcattaacaattagtaaatttttttgcatatgaacagtatttttctggtcatgtagatgggtgcacatgacactaaacagcattgtttagtgttatccctcttaactggtgggttgtatttggggtggaggctgtagccgaggagaagacattcacctctgtactcgagaaactttgtgtaggaatttagtttatttttttattttttttaattttttattttttactacttttactgttagcacaatgctataattgagctaatctttgtagtttggtgcaggaccaccaagtttgtgtgacccattacctactttttccatgctcagcccattacccctgtcctggggcatctgagggcagtaaggaacaggtgtccaaaggaggaatgttggtgcctatgagtatgttttccagttgtattgaatttcttacttggtgtatttttgacttgtcttagtttctttccttgtggtctatgctattttacttgcgatttgttggatattctccctgtcattaaagagttgtaaaatggaagttagtttctctatgcaaatgctttaatggatgaagctgataggtttagcattgatttttgctggtgtccttcaacaagcatgaaggtgataaatgtgtttccatggctttagactcatttttgaagtcttggattgtgtgaacattcttagaaacaataaaatgttttaattaaaagccctcgactaccagctgaattcagtgtctactaggaaaatgggtagatttgttacattgtccctttgctctctatgactttgttccagttgtcaaggaacttaaatgggtattcaggaaaaagaattcttgtttccctttcctcaccttgccagttaaataactcctggtgacacttcaggtggtagaattgaaacacaaacctgacttctgaccacatgggtcaaaggcaaaaggcaaatggcttcaaagcccttagtgtgcttatccagttcaggcagtgaggagataacctctgctttcctccctgaggagtttggagtatttaaggggggatggggggggtgtcactttgaaaatatgttgctttttctcctgattgtattgaggctgatatggaagggttatttctttctggccaatactttttggtatttctaaatattgcaatcttgatttttactattaaatttgttaattgtcagttctggcttttttgcataaagagttggtccattaacttgccaatttgaagcttctaactagatattccctactgaaagttttggatttgtttttagtttgtggagcagtcttagctggggacaggtaattgacaacggcagagatactttcttttcctaggattctaagtctgtaatccacatcctcaatgtattcacaggactttaaaattctctccaaatgaggaaggaaatatcctgttgctttctaatgtttactaaaagttgtgtttagaacaacagattttaataggcatcttcctttgttatgtgtcattagccctttgcccgtttaccttagggctctttgaaggagaaatggatgggagaaaacctgtcacttggcgaaagtaaaagggataattaactggctcagagcttatgtgcagagttccaagccccaaagttaatctagaaccactcgataacaccaataaaaatatttatttcacatctgttatatatctggaaaatgttctaagcatcttacacatatttctcattaaatccacaggtgaccattgtgaggtagatattttgttctaattttccagatgaggaagctgagaccctaaaaggttaggtgacaggttatacaacttggagtgtgggaggaggagagaggaacctgaacagggcaagttggggatctgacttttgtttgggtagatgtaggcacattgtatttttggcttagatgctttattcatcatggctgaaggtaataccatttactcactcaccgaaaattgtttacaataatctagatgaatttgctgtctttggacatctgtcttttgactggaccccagtatatagtctgtggaagctcacttaaggagagagctcctttttgtttggttagagaaattttctgtcctaaaagtagaaatagccccttctaggtaaggatggagcatttgatcatactggtttcattatattcctctaacagttggaaccgattgtttttgagtacttgtttcaaacttctgagtattttccttctggaaaatagctcagtgtttaaaatttacatgaacttaaaaggttaatttttttttaaagaatgtttgaggagcaatcaattctgattttgtcttatggatagaaatagaattagccattttcctcaagaaaagtgattcttctgaatcttagcttttcagtaatgagaactggactgtttccacttgacctctatttcctgttagtgggaaaccgcttcccagaggtgctgtgtgaaagattgctggggaaagggtttctagatcccagcataacaagttcaagagtccagcgatattgtcattagaataatggtcttcattaagtactagttttcataatcctgaagcttcattttcaccaatttgaaaggcagctagggaggagaagactatgcagggaaggaggaaaactctggagtgcatcacagagaccttgagtgagttaaggcagggaagaagcagatttgctatccactgaatgaaaataagaagaattccattgtccaaggtcagagcaagaacacaaaggttttagtttacttagttaattccttaggtttggacattacaggagacatgggggtgaccatagcaatttagctgataaatgtatcagaaactctttcatcattttctgtcccctcctatcttaggctgaccggttccctgatgtgttaccttgttttggttccggacccactgcggaaacattttttttttcccaagggcttacgggggtttcaaggggaaaaaaacttttaaaggacacca

SEQ ID NO: 109780 - DNA, 1561 bp, Homo sapiens
ggactcttcatgtgcttttcttaactgattagagttaacacctcagctaaagtgtatagaacatacatggggcttcatcaggcttcagaatcagtttcactagatgtgctatgtaggaggccacggaaaaattactgtagtagtaaaagttatcagttctgatgtaaacaatcattttgtcccatattataaataaattggcctgaaaatatcttttcatatgtgaggaataagtatatgatgcctttctcctttaaagtatgaactgctaaaagacagggataacgtgtattctgtattccagcagccacagtgtgtttctggtctttgtaccaggtgctcaggaagtgttttcactggcttgggttgactacttgccatctgctctctgagcattcatttctgaatgaaaggggagaaagtgaaaggagaggtgggaagaaagaggaagctgcagaaatacgaggaaacagctggaggagggaggtgaagttgaggaggtaaggtcagtaaaacaaaaagctagcagagggcagggtcaggcccttggggtagagggctaattaacttctgtcagctagttgaatagagccttgtgtgctttgttagagaccaaaggtacttcaaaggaaaaaaatctagattcttccctgtgtaccttaataattgttcatcaggtcaaaatctatcctgtcctctaggaattctggtcttccctcaggcctagcagagagctttctgccactactcaggcaaccaagggtgaagtgcttcaagtagtatttgtggacagcagcaggctgaccggttccctgatgtgttacctgcttctgctactgatccaaactgcagaacttctcattcatccccaaggcctccaggcagtatccaatggggaatcagctctaaaaggaaccagaccaacgttttccagccccttcattctggtgactgaggggaggaaagaatgggagggggtattcttgtctagtggatggaaaggaaacacactgtcaaattactatatctccttggttttctattacagtagaattctccagccatatttttattgtctatgggggaagttggagatggtgaccttgattagaagtgtctggagggggataaatggaggggataagattcagttggttttggaaaatgttaaagtcttaaaataatgcgtccatctgaagaattttttctaaaaccagagtttataaaaatatcactgatacagcctgccccctcatttccctgccacaggagatgtcttggactagagacacttgtttaataatagcttgtctctgatattcccagtagcttccctctgtgtgaggaaaggatagaaatgttcaggacatcatcatacaggctcctcatctacaaagttccagtagcagtgacgcctacacggaagacttggaactgcaaacaggctggggtcacctcagtgacatctgacgctgtccaaccagaagttcgatttttgttctgggggtgaaggaggaaacagactgtactaaaggactaaaataatttcttgtctatacta

SEQ ID NO: 109781 - DNA, 2481 bp, Homo sapiens
tcaaggtcaagaaacatcctttaaaaagttaattcccttttctggagcctaagccagatcttatctaggccttgtgttgccatctgttagcattgatttctggaatggagcagctttctcaaagtttggtcttgctagtcatgaggtcatgtcagtgtcttaggtcactgctgctcaccttccttacccagggagtatactgcataggtttctgaacacctgttttcattattcactgttcctctcactgccaagaatggagggaccctcagttgaagatcaaattgactctgaagaaaaactggagatgtttctcttggagtttggatagagtattcacttgataacatgtttttcccctgccttgctcttcacaagaacatctggccaggcattaacaattagtaaatttttttgcatatgaacagtatttttctggtcatgtagatgggtgcacatgacactaaacagcattgtttagtgttatccctcttaactggtgggttgtatttggggtggaggctgtagccgaggagaagacattcacctctgtactcgagaaactttgtgtaggaatttagtttatttttttattttttttaattttttattttttactacttttactgttagcacaatgctataattgagctaatctttgtagtttggtgcaggaccaccaagtttgtgtgacccattacctactttttccatgctcagcccattacccctgtcctggggcatctgagggcagtaaggaacaggtgtccaaaggaggaatgttggtgcctatgagtatgttttccagttgtattgaatttcttacttggtgtatttttgacttgtcttagtttctttccttgtggtctatgctattttacttgcgatttgttggatattctccctgtcattaaagagttgtaaaatggaagttagtttctctatgcaaatgctttaatggatgaagctgataggtttagcattgatttttgctggtgtccttcaacaagcatgaaggtgataaatgtgtttccatggctttagactcatttttgaagtcttggattgtgtgaacattcttagaaacaataaaatgttttaattaaaagccctcgactaccagctgaattcagtgtctactaggaaaatgggtagatttgttacattgtccctttgctctctatgactttgttccagttgtcaaggaacttaaatgggtattcaggaaaaagaattcttgtttccctttcctcaccttgccagttaaataactcctggtgacacttcaggtggtagaattgaaacacaaacctgacttctgaccacatgggtcaaaggcaaaaggcaaatggcttcaaagcccttagtgtgcttatccagttcaggcagtgaggagataacctctgctttcctccctgaggagtttggagtatttaaggggggatggggggggtgtcactttgaaaatatgttgctttttctcctgattgtattgaggctgatatggaagggttatttctttctggccaatactttttggtatttctaaatattgcaatcttgatttttactattaaatttgttaattgtcagttctggcttttttgcataaagagttggtccattaacttgccaatttgaagcttctaactagatattccctactgaaagttttggatttgtttttagtttgtggagcagtcttagctggggacaggtaattgacaacggcagagatactttcttttcctaggattctaagtctgtaatccacatcctcaatgtattcacaggactttaaaattctctccaaatgaggaaggaaatatcctgttgctttctaatgtttactaaaagttgtgtttagaacaacagattttaataggcatcttcctttgttatgtgtcattagccctttgcccgtttaccttagggctctttgaaggagaaatggatgggagaaaacctgtcacttggcgaaagtaaaagggataattaactggctcagagcttatgtgcagagttccaagccccaaagttaatctagaaccactcgataacaccaataaaaatatttatttcacatctgttatatatctggaaaatgttctaagcatcttacacatatttctcattaaatccacaggtgaccattgtgaggtagatattttgttctaattttccagatgaggaagctgagaccctaaaaggctgaccggttccctgatgtgttacctgcttctgctactgatccaaactgcagaacttctcattcatccccaaggcctccaggcagtatccaatggggaatcagctctaaaaggaaccagaccaacgttttccagccccttcattctgtagcttccctctgtgtgaggaaaggatagaaatgttcaggacatcatcatacaggctcctcatctacaaagttccagtagcagtgacccagtgacttcctcatcccggatcctctagatcact

SEQ ID NO: 109782 - DNA, 4041 bp, Homo sapiens
agtttccgggcccgggctgctctcggagccatgagctgcggccgcccccctcccgacgtggacggcatgatcaccctcaaggtggacaacctgacctaccgcacctctcccgacagcttgaggcgcgtgttcgagaagtacgggcgcgtgggcgacgtgtacatcccgcgggagccccacaccaaggcgccccggggcttcgctttcgtccgctttcacgaccggcgcgacgcccaagacgccgaggccgccatggacggggcggagctggacggacgcgagctgcgggtgcaggtggcgcgctatggccgccgggacctgccccgcagccgccagggagagccacgcggcaggtccagaggcggcggctacggacggcggagccgcagctacgggcggcggagccgcagccccaggcggcgacaccgcagccgatcccggggtcccagctgctccaggtcccgcagccgatctcgctataggggttctcgctatagccggtctccctacagccgatctccttacagccggtcgcgctacagccgctctccctacagcagatctcgctacagggaatctcgctacggcggatctcactacagctcatctggttacagtaactctcgctacagccgatatcacagcagccggtctcactcgaagtctgggtcctccactagctctcgctctgcatcaacctccaaatcgagctctgcgcgacgatccaagtcctcctcggtctccaggtctcgctcgcggtccaggtcttcatctatgaccaggagtcctccccgggtatccaagaggaaatccaagtcaaggtcgcgatccaagaggccccccaagtctcctgaagaggaaggacagatgtcctcttaagaaaatgatgcatcaggaagcaacgtgatggaggacttgggggaaaaggatcacatactcagtctatggaagcaacgtccctggaagaagaggctgcctattgaaaaggttgtgtcacacttttctacctttttgccagtttgaagctttgcatcaggtggcaaaattcattctatgtgccgttttgttgttattcacattttattgtaacttaggaggtgaacgacctaagattacgttattgggtttggatatttgaggcaaaaatttatttttatttctatagtgatgactgttttggtttgaaatgaacagattggtaacctaatttgtggcctcctgacttttaaggaaacgtgtgcagccattacacacagcctaacgctgtcaagacattgcttcaacattgccttcattccttaaaaacctacaaaaggtggtgtaaattaatatggataattttatttacctccaggtctaaaaggtagtgtgacccaaatttgtataaagatttttcatgtgaaaggactggggttttagcaaacacaggtctaatctcttttgtgtttttgtgcaccaggcccggctgcgtagcagttgagtgatgctggttagctattaaggtggcctgttgcagtgcagagtgctgagctgcttcctgttttcttctgattgctcctggggaaaacacgccttgtcctgaagaacaaatggctgtccagtttattaaaatgcctgtcaactgcacttccagtcacccaggccttgcagataaataatggagcatgcagtgagcacatctagctgacgataatcacaccttttcccccgtcttttctgaaaaattgtaaatctgatcatatcaacatgtatgaacttaaaatatggagaatgttatggaagaaatagtttataagtttgttaagtacttataacatggtttatctttttgattattaattttttacgctaaccattgtttctgtagttaaaattgttttcttggtgttatcttttctcagaataaaattagaaacttttgatggaaagtaggttgttttattttctgtatgacttttgaatatttgtacttttgagaaaattattagcaccaagtgtttctcaaaatataatttttaaaaaatccttaaaaaaaaaaaaaaaaaactcgagactagttctctctccccaaggagaagcagaggatcaccacgctattctccccgtcatagcagatctcgctctcgtacataagatgattggtgacactttttgtagaacccatgttgtatacagttttcctttattcagtacaatcttttcattttttaattcaaactgttttgttcagaatgggctaaagtgttgaattgcattcttgtaatatccccttgctcctaacatctacattcccttcgtgtctttgataaattgtattttaagtgatgtcatagacaggattgtttaaatttagttaactccatactcttcagactgtgatattgtgtaaatgtctatctgccctggtttgtgtgaactgggatgttgggggtgtttgtggttatcttacctggggaagttcttatgtttatcttgcttttcatgtgtctttctgtagacatatctgaagagatggattaagaatgctttggattaaggattgtggagcacatttcaatcattttaggattgtcaaaaggaggattgaggaggatcagatcaataatggaggcaatggtatgactccaagtgctattgtcacagatgaaattggcagtattgaccttatactaaaaggcaggggttaaaaatgattatatacattttccttaaaacacttgcaaacattttattcagttgtctttagctacaattgctttgctttttaaaccttggcaattgtggcaaaattatattgcccattttgtagcaacttattttgctcccttccccccatttttgttttaatagggactaatgtgggaagaactggctaatttgtcacagtgcttagttacaactgttaatgtgtgacctgctgttggtgtacatgtgggtacagggtgtttttaaatccaacaagatagagtataatatcaatactgctaaatctgcatgtcctctgtgtgactgatagagcgttgctatttcatttttttaagacaaaatgaaagcaaaatatagagttccaatgtattggtgtagataatctagttgggaatacttttaagtctcaccttcccctttaaactaatattcataattggttcatatgtttaaaagactttaatttacaaattaaattgcaaatgggagcattagatttagttttagacttaggtgggtagcaatgccagtaaacttaaattacgtaacttcttgcaaccacgaaacctgtaatacgctgtacagtaacaagtgttggcattatcagttgaactgtaaatacaaaatgcttcttccaattagtctctatgatgattaagtttctaaaatttatctgaacaccattcagaaacttgttttggggaatttgatagttattgatgtgcatctgttaaactgatgacagacataactcatcattccccagaaaccttttttgattacagtatctaacattttgcctcctcttttttggttttgctggttataaaggtttggattggagagggctcactggatcccaatccttggagctggatcattggattcaaatcataatgtggataggatagggaggatgaattaccaggattcatggagcgggatcagattaccaggaacataggagtggattcctgccccaaccaaaccgcattcgtgtggatttttttattcaacttaattggctattccaaagattttttttttcctatttttgacgattggagcccttaagatgcacgatggaattgtgttttgcgttttttggtaaaaggagcaaagcgaggacctggagataaacgctggagcaatctccttggaaggattcagcacgagtagatggtaaacatttaaaggggaaagggggggtttgtttaaaatagtaaatcagtaagtcacttctaaatttaaagaaaacaaaattggagttgaagaataagtaggtttccaattggctattgccgttttctttgaaaaaataaacattttttaaaa

SEQ ID NO: 109783 - DNA, 555 bp, Homo sapiens
cccttttactttctgcgatcccgcagagacgcggaagacgcggtgtatggtcgcgacggctatgattacgatgggtaccgtctgcgggtggagtttcctcgaagcggccgtggaacaggccgaggcggcggcgggggtggaggtggcggagctccccgaggtcgctatggccccccatccaggcggtctgaaaacagagtggttgtctctggtgagtgtactggttgtgtggattgatgtgaagggacgaaaactacctaaaatttttctcttgcgtgacaggtttaataattgcaaatttttcatgctaggtcttaaattgctttagtttttgggtgaatttaataaacgaggattgctgctgtggtgatttaccaaattaggttgcggtactagatacgaagatcgttacaaataattttggactctggattccagaatcttaccagctctctttacctggtatcacttaagtacacctattaagtactttaaagtactctttgtcctaatgtaccttaccagcttaacgtgaaatttaagataattggtact

SEQ ID NO: 109784 - DNA, 2824 bp, Homo sapiens
ttccttcagcttctcttcctctgtctcccccccatatccgtgcgccgagctgataaaggcgccattttggaggggccgcgggagacgtggtgccgctgcgggctcgctctgccgtgcgctaggcttggtgggaaggcctgttctcgagtccgcgcttttcgtcaccgccatgtcgggaggtggtgtgattcgtggccccgcagggaacaacgattgccgcatctacgtgggtaacttacctccagacatccgaaccaaggacattgaggacgtgttctacaaatacggcgctatccgcgacatcgacctcaagaatcgccgcgggggaccgcccttcgccttcgttgagttcgaggacccgcgagacgcggaagacgcggtgtatggtcgcgacggctatgattacgatgggtaccgtctgcgggtggagtttcctcgaagcggccgtggaacaggccgaggcggcggcgggggtggaggtggcggagctccccgaggtcgctatggccccccatccaggcggtctgaaaacagagtggttgtctctggactgcctccaagtggaagttggcaggatttaaaggatcacatgcgtgaagcaggtgatgtatgttatgctgatgtttaccgagatggcactggtgtcgtggagtttgtacggaaagaagatatgacctatgcagttcgaaaactggataacactaagtttagatctcatgagggagaaactgcctacatccgggttaaagttgatgggcccagaagtccaagttatggaagatctcgatctcgaagccgtagtcgtagcagaagccgtagcagaagcaacagcaggagtcgcagttactccccaaggagaagcagaggatcaccacgctattctccccgtcatagcagatctcgctctcgtacataagatgattggtgacactttttgtagaacccatgttgtatacagttttcctttattcagtacaatcttttcattttttaattcaaactgttttgttcagaatgggctaaagtgttgaattgcattcttgtaatatccccttgctcctaacatctacattcccttcgtgtctttgataaattgtattttaagtgatgtcatagacaggattgtttaaatttagttaactccatactcttcagactgtgatattgtgtaaatgtctatctgccctggtttgtgtgaactgggatgttgggggtgtttgtggttatcttacctggggaagttcttatgtttatcttgcttttcatgtgtctttctgtagacatatctgaagagatggattaagaatgctttggattaaggattgtggagcacatttcaatcattttaggattgtcaaaaggaggattgaggaggatcagatcaataatggaggcaatggtatgactccaagtgctattgtcacagatgaaattggcagtattgaccttatactaaaaggcaggggttaaaaatgattatatacattttccttaaaacacttgcaaacattttattcagttgtctttagctacaattgctttgctttttaaaccttggcaattgtggcaaaattatattgcccattttgtagcaacttattttgctcccttccccccatttttgttttaatagggactaatgtgggaagaactggctaatttgtcacagtgcttagttacaactgttaatgtgtgacctgctgttggtgtacatgtgggtacagggtgtttttaaatccaacaagatagagtataatatcaatactgctaaatctgcatgtcctctgtgtgactgatagagcgttgctatttcatttttttaagacaaaatgaaagcaaaatatagagttccaatgtattggtgtagataatctagttgggaatacttttaagtctcaccttcccctttaaactaatattcataattggttcatatgtttaaaagactttaatttacaaattaaattgcaaatgggagcattagatttagttttagacttaggtgggtagcaatgccagtaaacttaaattacgtaacttcttgcaaccacgaaacctgtaatacgctgtacagtaacaagtgttggcattatcagttgaactgtaaatacaaaatgcttcttccaattagtctctatgatgattaagtttctaaaatttatctgaacaccattcagaaacttgttttggggaatttgatagttattgatgtgcatctgttaaactgatgacagacataactcatcattccccagaaaccttttttgattacagtatctaacattttgcctcctcttttttggttttgctggttataaaggtttggattggagagggctcactggatcccaatccttggagctggatcattggattcaaatcataatgtggataggatagggaggatgaattaccaggattcatggagcgggatcagattaccaggaacataggagtggattcctgccccaaccaaaccgcattcgtgtggatttttttattcaacttaattggctattccaaagattttttttttcctatttttgacgattggagcccttaagatgcacgatggaattgtgttttgcgttttttggtaaaaggagcaaagcgaggacctggagataaacgctggagcaatctccttggaaggattcagcacgagtagatggtaaacatttaaaggggaaagggggggtttgtttaaaatagtaaatcagtaagtcacttctaaatttaaagaaaacaaaattggagttgaagaataagtaggtttccaattggctattgccgttttctttgaaaaaataaacattttttaaaa

SEQ ID NO: 109785 - DNA, 2905 bp, Homo sapiens
  misc_feature (2862)..(2862): n is a, c, g, or t
  misc_feature (2871)..(2871): n is a, c, g, or t
  misc_feature (2891)..(2891): n is a, c, g, or t
  misc_feature (2899)..(2900): n is a, c, g, or t
ttccttcagcttctcttcctctgtctcccccccatatccgtgcgccgagctgataaaggcgccattttggaggggccgcgggagacgtggtgccgctgcgggctcgctctgccgtgcgctaggcttggtgggaaggcctgttctcgagtccgcgcttttcgtcaccgccatgtcgggaggtggtgtgattcgtggccccgcagggaacaacgattgccgcatctacgtgggtaacttacctccagacatccgaaccaaggacattgaggacgtgttctacaaatacggcgctatccgcgacatcgacctcaagaatcgccgcgggggaccgcccttcgccttcgttgagttcgaggacccgcgagacgcggaagacgcggtgtatggtcgcgacggctatgattacgatgggtaccgtctgcgggtggagtttcctcgaagcggccgtggaacaggccgaggcggcggcgggggtggaggtggcggagctccccgaggtcgctatggccccccatccaggcggtctgaaaacagagtggttgtctctggactgcctccaagtggaagttggcaggatttaaaggatcacatgcgtgaagcaggtgatgtatgttatgctgatgtttaccgagatggcactggtgtcgtggagtttgtacggaaagaagatatgacctatgcagttcgaaaactggataacactaagtttagatctcatgagggagaaactgcctacatccgggttaaagttgatgggcccagaagtccaagttatggaagatctcgatctcgaagccgtagtcgtagcagaagccgtagcagaagcaacagcaggagtcgcagttactccccaaggagaagcagaggatcaccacgctattctccccgtcatagcagatctcgctctcgtacataagatgattggtgacactttttgtagaacccatgttgtatacagttttcctttattcagtacaatcttttcattttttaattcaaactgttttgttcagaatgggctaaagtgttgaattgcattcttgtaatatccccttgctcctaacatctacattcccttcgtgtctttgataaattgtattttaagtgatgtcatagacaggattgtttaaatttagttaactccatactcttcagactgtgatattgtgtaaatgtctatctgccctggtttgtgtgaactgggatgttgggggtgtttgtggttatcttacctggggaagttcttatgtttatcttgcttttcatgtgtctttctgtagacatatctgaagagatggattaagaatgctttggattaaggattgtggagcacatttcaatcattttaggattgtcaaaaggaggattgaggaggatcagatcaataatggaggcaatggtatgactccaagtgctattgtcacagatgaaattggcagtattgaccttatactaaaaggcaggggttaaaaatgattatatacattttccttaaaacacttgcaaacattttattcagttgtctttagctacaattgctttgctttttaaaccttggcaattgtggcaaaattatattgcccattttgtagcaacttattttgctcccttccccccatttttgttttaatagggactaatgtgggaagaactggctaatttgtcacagtgcttagttacaactgttaatgtgtgacctgctgttggtgtacatgtgggtacagggtgtttttaaatccaacaagatagagtataatatcaatactgctaaatctgcatgtcctctgtgtgactgatagagcgttgctatttcatttttttaagacaaaatgaaagcaaaatatagagttccaatgtattggtgtagataatctagttgggaatacttttaagtctcaccttcccctttaaactaatattcataattggttcatatgtttaaaagactttaatttacaaattaaattgcaaatgggagcattagatttagttttagacttaggtgggtagcaatgccagtaaacttaaattacgtaacttcttgcaaccacgaaacctgtaatacgctgtacagtaacaagtgttggcattatcagttgaactgtaaatacaaaatgcttcttccaattagtctctatgatgattaagtttctaaaatttatctgaacaccattcagaaacttgttttggggaatttgatagttattgatgtgcatctgttaaactgatgacagacataactcatcattccccagaaaccttttttgattacagtatctaacattttgcctcctcttttttggttttgctggttataaaggtttggattggagagggctcactggatcccaatccttggagctggatcattggattcaaatcataatgtggataggatagggaggatgaattaccaggattcatggagcgggatcagattaccaggaacataggagtggattcctgccccaaccaaaccgcattcgtgtggatttttttattcaacttaattggctattccaaagattttttttttcctatttttgacgattggagcccttaagatgcacgatggaattgtgttttgcgttttttggtaaaaggagcaaagcgaggacctggagataaacgctggagcaatctccttggaaggattcagcacgagtagatggtaaacatttaaaggggaaagggggggtttgtttaaaatagtaaatcagtaagtcacttctaaatttaaagaaaacaaaattggagttgaagaataagtaggtttccaattggctattgccgttttctttgaaaaaataaacattttttaaaactaaaaaaaaaaaaaaaaaaaaaaaaaaaaaaaaaaanaaaaaaaanaaaaaaaaaaaaaaaaaaanagaaaaannaaaaa

SEQ ID NO: 109786 - DNA, 2632 bp, Homo sapiens
ttccttcagcttctcttcctctgtctcccccccatatccgtgcgccgagctgataaaggcgccattttggaggggccgcgggagacgtggtgccgctgcgggctcgctctgccgtgcgctaggcttggtgggaaggcctgttctcgagtccgcgcttttcgtcaccgccatgtcgggaggtggtgtgattcgtggccccgcagggaacaacgattgccgcatctacgtgggtaacttacctccagacatccgaaccaaggacattgaggacgtgttctacaaatacggcgctatccgcgacatcgacctcaagaatcgccgcgggggaccgcccttcgccttcgttgagttcgaggacccgcgagacgcggaagacgcggtgtatggtcgcgacggctatgattacgatgggtaccgtctgcgggtggagtttcctcgaagcggccgtggaacaggccgaggcggcggcgggggtggaggtggcggagctccccgaggtcgctatggccccccatccaggcggtctgaaaacagagtggttgtctctggactgcctccaagtggaagttggcaggatttaaaggatcacatgcgtgaagcaggtgatgtatgttatgctgatgtttaccgagatggcactggtgtcgtggagtttgtacggaaagaagatatgacctatgcagttcgaaaactggataacactaagtttagatctcatgagggagaaactgcctacatccgggttaaagttgatgggcccagaagtccaagttatggaagatctcgatctcgaagccgtagtcgtagcagaagccgtagcagaagcaacagcaggagtcgcagttactccccaaggagaagcagaggatcaccacgctattctccccgtcatagcagatctcgctctcgtacataagatgattggtgacactttttgtagaacccatgttgtatacagttttcctttattcagtacaatcttttcattttttaattcaaactgttttgttcagaatgggctaaagtgttgaattgcattcttgtaatatccccttgctcctaacatctacattcccttcgtgtctttgataaattgtattttaagtgatgtcatagacaggattgtttaaatttagttaactccatactcttcagactgtgatattgtgtaaatgtctatctgccctggtttgtgtgaactgggatgttgggggtgtttgtggttatcttacctggggaagttcttatgtttatcttgcttttcatgtgtctttctgtagacatatctgaagagatggattaagaatgctttggattaaggattgtggagcacatttcaatcattttaggattgtcaaaaggaggattgaggaggatcagatcaataatggaggcaatggtatgactccaagtgctattgtcacagatgaaattggcagtattgaccttatactaaaaggcaggggttaaaaatgattatatacattttccttaaaacacttgcaaacattttattcagttgtctttagctacaattgctttgctttttaaaccttggcaattgtggcaaaattatattgcccattttgtagcaacttattttgctcccttccccccatttttgttttaatagggactaatgtgggaagaactggctaatttgtcacagtgcttagttacaactgttaatgtgtgacctgctgttggtgtacatgtgggtacagggtgtttttaaatccaacaagatagagtataatatcaatactgctaaatctgcatgtcctctgtgtgactgatagagcgttgctatttcatttttttaagacaaaatgaaagcaaaatatagagttccaatgtattggtgtagataatctagttgggaatacttttaagtctcaccttcccctttaaactaatattcataattggttcatatgtttaaaagactttaatttacaaattaaattgcaaatgggagcattagatttagttttagacttaggtgggtagcaatgccagtaaacttaaattacgtaacttcttgcaaccacgaaacctgtaatacgctgtacagtaacaagtgttggcattatcagttgaactgtaaatacaaaatgcttcttccaattagtctctatgatgattaagtttctaaaatttatctgaacaccattcagaaacttgttttggggaatttgatagttattgatgtgcatctgttaaactgatgacagacataactcatcattccccagaaaccttttttgattacagtatctaacattttgcctcctcttttttggttttgctggttataaaggtttggattggagagggctcactggatcccaatccttggagctggatcattggattcaaatcataatgtggataggatagggaggatgaattaccaggattcatggagcgggatcagattaccaggaacataggagtggattcctgccccaaccaaaccgcattcgtgtggatttttttattcaacttaattggctattccaaagattttttttttcctatttttgacgattggagcccttaagatgcacgatggaattgtgttttgcgttttttggtaaaaggagcaaccccaaaaggggtaccgagctcg

SEQ ID NO: 109787 - DNA, 2345 bp, Homo sapiens
ttccttcagcttctcttcctctgtctcccccccatatccgtgcgccgagctgataaaggcgccattttggaggggccgcgggagacgtggtgccgctgcgggctcgctctgccgtgcgctaggcttggtgggaaggcctgttctcgagtccgcgcttttcgtcaccgccatgtcgggaggtggtgtgattcgtggccccgcagggaacaacgattgccgcatctacgtgggtaacttacctccagacatccgaaccaaggacattgaggacgtgttctacaaatacggcgctatccgcgacatcgacctcaagaatcgccgcgggggaccgcccttcgccttcgttgagttcgaggacccgcgagacgcggaagacgcggtgtatggtcgcgacggctatgattacgatgggtaccgtctgcgggtggagtttcctcgaagcggccgtggaacaggccgaggcggcggcgggggtggaggtggcggagctccccgaggtcgctatggccccccatccaggcggtctgaaaacagagtggttgtctctggactgcctccaagtggaagttggcaggatttaaaggatcacatgcgtgaagcaggtgatgtatgttatgctgatgtttaccgagatggcactggtgtcgtggagtttgtacggaaagaagatatgacctatgcagttcgaaaactggataacactaagtttagatctcatgagggagaaactgcctacatccgggttaaagttgatgggcccagaagtccaagttatggaagatctcgatctcgaagccgtagtcgtagcagaagccgtagcagaagcaacagcaggagtcgcagttactccccaaggagaagcagaggatcaccacgctattctccccgtcatagcagatctcgctctcgtacataagatgattggtgacactttttgtagaacccatgttgtatacagttttcctttattcagtacaatcttttcattttttaattcaaactgttttgttcagaatgggctaaagtgttgaattgcattcttgtaatatccccttgctcctaacatctacattcccttcgtgtctttgataaattgtattttaagtgatgtcatagacaggattgtttaaatttagttaactccatactcttcagactgtgatattgtgtaaatgtctatctgccctggtttgtgtgaactgggatgttgggggtgtttgtggttatcttacctggggaagttcttatgtttatcttgcttttcatgtgtctttctgtagacatatctgaagagatggattaagaatgctttggattaaggattgtggagcacatttcaatcattttaggattgtcaaaaggaggattgaggaggatcagatcaataatggaggcaatggtatgactccaagtgctattgtcacagatgaaattggcagtattgaccttatactaaaaggcaggggttaaaaatgattatatacattttccttaaaacacttgcaaacattttattcagttgtctttagctacaattgctttgctttttaaaccttggcaattgtggcaaaattatattgcccattttgtagcaacttattttgctcccttccccccatttttgttttaatagggactaatgtgggaagaactggctaatttgtcacagtgcttagttacaactgttaatgtgtgacctgctgttggtgtacatgtgggtacagggtgtttttaaatccaacaagatagagtataatatcaatactgctaaatctgcatgtcctctgtgtgactgatagagcgttgctatttcatttttttaagacaaaatgaaagcaaaatatagagttccaatgtattggtgtagataatctagttgggaatacttttaagtctcaccttcccctttaaactaatattcataattggttcatatgtttaaaagactttaatttacaaattaaattgcaaatgggagcattagatttagttttagacttaggtgggtagcaatgccagtaaacttaaattacgtaacttcttgcaaccacgaaacctgtaatacgctgtacagtaacaagtgttggcattatcagttgaactgtaaatacaaaatgcttcttccaattagtctctatgatgattaagtttctaaaatttatctgaacaccattcagaaacttgttttggggaatttgatagttattgatgtgcatctgttaaactgatgacagacataactcatcattccccagaaaccttttttgattacagtatctaacattttgcctcctcttttttggttttgctggttactagtatactaagctcttgcggccctctat

SEQ ID NO: 109788 - DNA, 5454 bp, Homo sapiens
ttccttcagcttctcttcctctgtctcccccccatatccgtgcgccgagctgataaaggcgccattttggaggggccgcgggagacgtggtgccgctgcgggctcgctctgccgtgcgctaggcttggtgggaaggcctgttctcgagtccgcgcttttcgtcaccgccatgtcgggaggtggtgtgattcgtggccccgcagggaacaacgattgccgcatctacgtgggtaacttacctccagacatccgaaccaaggacattgaggacgtgttctacaaatacggcgctatccgcgacatcgacctcaagaatcgccgcgggggaccgcccttcgccttcgttgagttcgaggacccgcgagacgcggaagacgcggtgtatggtcgcgacggctatgattacgatgggtaccgtctgcgggtggagtttcctcgaagcggccgtggaacaggccgaggcggcggcgggggtggaggtggcggagctccccgaggtcgctatggccccccatccaggcggtctgaaaacagagtggttgtctctggactgcctccaagtggaagttggcaggatttaaaggatcacatgcgtgaagcaggtgatgtatgttatgctgatgtttaccgagatggcactggtgtcgtggagtttgtacggaaagaagatatgacctatgcagttcgaaaactggataacactaagtttagatctcatgaggtaggttatacacgtattcttttctttgaccagaattggatacagtggtcttaacagtggaatttcaaggtaaggattcaggcaaggttgtccaagtaaattgccagatttctggttttagttacattgtattcattcagcatgtctgaagatagatgaaagcttagatctttcaatggaaagttctgtctatccaatagggagaaactgcctacatccgggttaaagttgatgggcccagaagtccaagttatggaagatctcgatctcgaagccgtagtcgtagcagaagccgtagcagaagcaacagcaggagtcgcagttactccccaaggagaagcagaggatcaccacgctattctccccgtcatagcagatctcgctctcgtacataagatgattggtgacactttttgtagaacccatgttgtatacagttttcctttattcagtacaatcttttcattttttaattcaaactgttttgttcagaatgggctaaagtgttgaattgcattcttgtaatatccccttgctcctaacatctacattcccttcgtgtctttgataaattgtattttaagtgatgtcatagacaggattgtttaaatttagttaactccatactcttcagactgtgatattgtgtaaatgtctatctgccctggtttgtgtgaactgggatgttgggggtgtttgtggttatcttacctggggaagttcttatgtttatcttgcttttcatgtgtctttctgtagacatatctgaagagatggattaagaatgctttggattaaggattgtggagcacatttcaatcattttaggattgtcaaaaggaggattgaggaggatcagatcaataatggaggcaatgataaaggtttggattggagagggctcactggatcccaatccttggagctggatcattggattcaaatcataatgtggataggatagggaggatgaattaccaggattcatggagcgggatcagattaccaggaacataggagtggattcctgccccaaccaaaccgcattcgtgtggatttttttattcaacttaattggctattccaaagattttttttttcctatttttgacgattggagcccttaagatgcacgatggaattgtgttttgcgttttttggtaaaaggagcaaagcgaggacctggagataaacgctggagcaatctccttggaaggattcagcacgagtagatggtaaacatttaaaggggaaagggggggtttgtttaaaatagtaaatcagtaagtcacttctaaatttaaagaaaacaaaattggagttgaagaataagtaggtttccaattggctattgccgttttctttgaaaaaataaacattttttaaaaaactatgcatggttgtcctttttcctcttcatgtaagattctaactgggtctatcagttaatctttaaattgttaagtaagataagattttgactcttgtgttaatgtgttagcaaattaaaagttcttaaaaggcaatctaatggtattagccatcttttattgttaattgtaaaagtcttcaggggaaagcaaaaggggagaataaggcatttgtgtatgtaacttggtaaatgacggtgggggatggatctagcatctgaaagataagcttctctactttgttataaagtggttaaaaaactatagatgctgcttattttctggtggtcatagacaacataggcttttgtgcaaaattggttgatggctactaatgttcacttggagatagcttttgatattctcaatgaaactcatctcaaaaaaaggtaagtattaaatgttaacatcagcacagatgtattagaactgttttttgtttttgagacagagtctcgctctgttctccagactggagggcagtggtgtgatctaggctcactgcaacctccacccctggatttgagtgattctcgtgcctcagtctcccaagtagctgagactacaagtgtgtgccacccttgcccggctaattttgtatttttagtagagatgtggtttctctgtgttacccaggctggtcccaaaactcctggcctcaagtgatctgcctgccttggcctcccaaagtgttaggattacaggtgtgagccaccatgctcagcctgtagaacttttaacccaagtctcatttcttttttgaaagggaagagtgcacaagattaactgcttctttggatgaatcattgttaataaaaagctgggcatttagaattttgccttataagcccttctccaaccataagattattttgtaccaaaaactttggtgttctctaccaaagcagttaaaaacttttagcctgctacttcttgtatttgtctactgacagccccttggtactatttaggttgggggaggggacctaaaataaatagactttaacatttcccttgggtgctaatcatagttggaagttgaatttaaggtgattatttgggtgacaattaaaaacctaaggaaaaccagaaatcttggtagtggaagaaatgtgtaaggtcaccccaatcggtagattttaatgaacgttgtggaatgttgggaagaggggatgttaagttgaatgcagaatttcactaagtacttagtgtaagtttaaggatgtagctctttttatctaagaattcaatgtaatggccaaaaggcagatttactgtttaaaaatttgaataattttacatgacattcttgaaattctaagaagttttatgtgtagaacattttaaaaattcatcagattattaaagggaaaataaatgattaatgataattttggaaggttaatgtgagctagacttaagtaaactttggttcatttgtgttcattgaatgttttggaaatgaccaaaaaatgtaaatggccttcactcaagtttgagtgtttaaagttgaaagatgtgctctactaaaagttatagtaattctaacctcacattgaaatgagacagtattccttgttatacaggctgaatttgaagattagagaggatctaatgtttacttaggtaaaggggcataggttttgtagttaagatgaccagacagctaaaagctgtgatgggaagtatggactgctcctatttatagtctcagaaaatggacctttaggtctctatccgtattggcaattattagaagaaagttacacccttttgaaactacaaaagctgtcttggaatttccccctcttctccctatttatgtccccttagaatattttagggagcctataattattttctaaccaaggaaaaacttaagtctctttaagaagcaattacttttcataacatcagattgaataacccaccttgctgttcagcccacatcctactggaaacaaaaggtaagaaacccattttctggttcttgattgtttgggtctgaattttgtttttaaaactaagctaagtttaatgttttttaaaatgctgtttggaatatgaatagattccccgtaaaatgatttttcctaagttttatgctttagtaaatattcagtgctcacgtctgtgcatcatagtgcttgcgtttaatatgatttattgtagaatctcaacttttcttggtgtttgttgtctttgaaacattgtcttggtcattagggctggtgttttcacatttctgtggtcaaggtggatttcttatgtgtgcctttttgcttactttgtatatgaattttgtaatttaaattgcaagtaagttatatatatgtatttaccataaatagtattaaaagatgagaaactgttagactgaagttctgttgtaacataaccattatttccatcacagtatgaagactgcaaacgcagaaaacagattacagtctcttatccattttttgaaatccaaaaactacgaaaacaaaagattttctgttgttgagctaattaaatgtgaaccctgaccagaattgctgccttcattttgcacttagtgtgactaaactgtttcctgttgaacttcattattcattgcacagttgccacagactttgctgagggttttatgtaatacagggtatatatgtacctcataaagtgcatacagctctgaatcccagatatgtctgtctccaaagagttcatataagggattgtaggaactgtactagcatacacaggcctaatgcttttgtctgtaactggggtgtcttgactgaaaaacctgttattgtgaatcctttgttgattgaattttaagttcccccatctttttaggctgaagcagccacaagaaaaaaaggtatggcccacatttctttacattctgttgtaatagtggactcaacaattatatcccattgaagcaaatactcaggcatcctagagtgtacaatacaacattcttttgagttattgtttctgtatcagtacttaaaggaacattgaccaattagatcctataggaaaagctgggattggcatgaagtaaagagattatcaggaaacatctgttcattatgtctatcgtgattgtctattgaatgaatagtaatgctgccaaaagtaacttgctttaaacaaaccccaagagattatagtatacttaaaccagtacttattcctgttattgagaccttcacggtgcttcttggtagctttgaaagctaatgcctaacaaccctgagggttcttgtgagcttgtagtgattaaaggaaggattttttaattattat

SEQ ID NO: 109789 - DNA, 2109 bp, Homo sapiens
ttccttcagcttctcttcctctgtctcccccccatatccgtgcgccgagctgataaaggcgccattttggaggggccgcgggagacgtggtgccgctgcgggctcgctctgccgtgcgctaggcttggtgggaaggcctgttctcgagtccgcgcttttcgtcaccgccatgtcgggaggtggtgtgattcgtggccccgcagggaacaacgattgccgcatctacgtgggtaacttacctccagacatccgaaccaaggacattgaggacgtgttctacaaatacggcgctatccgcgacatcgacctcaagaatcgccgcgggggaccgcccttcgccttcgttgagttcgaggacccgcgagacgcggaagacgcggtgtatggtcgcgacggctatgattacgatgggtaccgtctgcgggtggagtttcctcgaagcggccgtggaacaggccgaggcggcggcgggggtggaggtggcggagctccccgaggtcgctatggccccccatccaggcggtctgaaaacagagtggttgtctctggactgcctccaagtggaagttggcaggatttaaaggatcacatgcgtgaagcaggtgatgtatgttatgctgatgtttaccgagatggcactggtgtcgtggagtttgtacggaaagaagatatgacctatgcagttcgaaaactggataacactaagtttagatctcatgaggtaggttatacacgtattcttttctttgaccagaattggatacagtggtcttaacagtggaatttcaaggtaaggattcaggcaaggttgtccaagtaaattgccagatttctggttttagttacattgtattcattcagcatgtctgaagatagatgaaagcttagatctttcaatggaaagttctgtctatccaatagggagaaactgcctacatccgggttaaagttgatgggcccagaagtccaagttatggaagatctcgatctcgaagccgtagtcgtagcagaagccgtagcagaagcaacagcaggagtcgcagttactccccaaggagaagcagaggatcaccacgctattctccccgtcatagcagatctcgctctcgtacataagatgattggtgacactttttgtagaacccatgttgtatacagttttcctttattcagtacaatcttttcattttttaattcaaactgttttgttcagaatgggctaaagtgttgaattgcattcttgtaatatccccttgctcctaacatctacattcccttcgtgtctttgataaattgtattttaagtgatgtcatagacaggattgtttaaatttagttaactccatactcttcagactgtgatattgtgtaaatgtctatctgccctggtttgtgtgaactgggatgttgggggtgtttgtggttatcttacctggggaagttcttatgtttatcttgcttttcatgtgtctttctgtagacatatctgaagagatggattaagaatgctttggattaaggattgtggagcacatttcaatcattttaggattgtcaaaaggaggattgaggaggatcagatcaataatggaggcaatgataaaggtttggattggagagggctcactggatcccaatccttggagctggatcattggattcaaatcataatgtggataggatagggaggatgaattaccaggattcatggagcgggatcagattaccaggaacataggagtggattcctgccccaaccaaaccgcattcgtgtggatttttttattcaacttaattggctattccaaagattttttttttcctatttttgacgattggagcccttaagatgcacgatggaattgtgttttgcgttttttggtaaaaggagcaaagcgaggacctggagataaacgctggagcaatctccttggaaggattcagcacgagtagatggtaaacatttaaaggggaaagggggggtttgtttaaaatagtaaatcagtaagtcacttctaaatttaaagaaaacaaaattggagttgaagaataagtaggtttccaattggctattgccgttttctttgaaaaaataaacattttttaaaa

SEQ ID NO: 109790 - DNA, 1483 bp, Homo sapiens
ttccttcagcttctcttcctctgtctcccccccatatccgtgcgccgagctgataaaggcgccattttggaggggccgcgggagacgtggtgccgctgcgggctcgctctgccgtgcgctaggcttggtgggaaggcctgttctcgagtccgcgcttttcgtcaccgccatgtcgggaggtggtgtgattcgtggccccgcagggaacaacgattgccgcatctacgtgggtaacttacctccagacatccgaaccaaggacattgaggacgtgttctacaaatacggcgctatccgcgacatcgacctcaagaatcgccgcgggggaccgcccttcgccttcgttgagttcgaggacccgcgagacgcggaagacgcggtgtatggtcgcgacggctatgattacgatgggtaccgtctgcgggtggagtttcctcgaagcggccgtggaacaggccgaggcggcggcgggggtggaggtggcggagctccccgaggtcgctatggccccccatccaggcggtctgaaaacagagtggttgtctctggactgcctccaagtggaagttggcaggatttaaaggatcacatgcgtgaagcaggtgatgtatgttatgctgatgtttaccgagatggcactggtgtcgtggagtttgtacggaaagaagatatgacctatgcagttcgaaaactggataacactaagtttagatctcatgaggctgaccggttccctgatgtgttacctgcttctgctactgatccaaactgcagaacttctcattcatccccaaggcctccaggcagtatccaatggggaatcagctctaaaaggaaccagaccaacgttttccagccccttcattctggtgactgaggggaggaaagaatgggagggggtattcttgtctagtggatggaaaggaaacacactgtcaaattactatatctccttggttttctattacagtagaattctccagccatatttttattgtctatgggggaagttggagatggtgaccttgattagaagtgtctggagggggataaatggaggggataagattcagttggttttggaaaatgttaaagtcttaaaataatgcgtccatctgaagaattttttctaaaaccagagtttataaaaatatcactgatacagcctgccccctcatttccctgccacaggagatgtcttggactagagacacttgtttaataatagcttgtctctgatattcccagtagcttccctctgtgtgaggaaaggatagaaatgttcaggacatcatcatacaggctcctcatctacaaagttccagtagcagtgacgcctacacggaagacttggaactgcaaacaggctggggtcacctcagtgacatctgacgctgtccaaccagaagttcgatttttgttctgggggtgaaggaggaaacagactgtactaaaggactaaaataatttcttgtctatacta

SEQ ID NO: 109791 - DNA, 1087 bp, Homo sapiens
ttccttcagcttctcttcctctgtctcccccccatatccgtgcgccgagctgataaaggcgccattttggaggggccgcgggagacgtggtgccgctgcgggctcgctctgccgtgcgctaggcttggtgggaaggcctgttctcgagtccgcgcttttcgtcaccgccatgtcgggaggtggtgtgattcgtggccccgcagggaacaacgattgccgcatctacgtgggtaacttacctccagacatccgaaccaaggacattgaggacgtgttctacaaatacggcgctatccgcgacatcgacctcaagaatcgccgcgggggaccgcccttcgccttcgttgagttcgaggacccgcgagacgcggaagacgcggtgtatggtcgcgacggctatgattacgatgggtaccgtctgcgggtggagtttcctcgaagcggccgtggaacaggccgaggcggcggcgggggtggaggtggcggagctccccgaggtcgctatggccccccatccaggcggtctgaaaacagagtggttgtctctggactgcctccaagtggaagttggcaggatttaaaggatcacatgcgtgaagcaggtgatgtatgttatgctgatgtttaccgagatggcactggtgtcgtggagtttgtacggaaagaagatatgacctatgcagttcgaaaactggataacactaagtttagatctcatgaggctgaccggttccctgatgtgttacctgcttctgctactgatccaaactgcagaacttctcattcatccccaaggcctccaggcagtatccaatggggaatcagctctaaaaggaaccagaccaacgttttccagccccttcattctgtagcttccctctgtgtgaggaaaggatagaaatgttcaggacatcatcatacaggctcctcatctacaaagttccagtagcagtgacgcctacacggaagacttggaactgcaaacaggctggggtcacctcagtgacatctgacgctgtccaaccagaagttcgatttttgttctggggattgaaacgcacgtggacattgaacgggtaccgatgct

SEQ ID NO: 109792 - DNA, 367 bp, Homo sapiens
ggtcccagctttcataagaggcacgaatctaagaagaagacacggtttgagtcccagcctgaccatgcctggctgacgcagcatgatccatccatttcactcatgctgggaagatcttgccaggaaaacttgaaataattgaggctgtcacctaaaaccccatcttagttagaaatggtttggttgtgtggaacatagctctactcatcaaggctcacgtgaaaaatgaaagctatttagaagcagagcgaagcttcgtggaaccagaaatttagtagatggcattctcgctctcttccttcttttctctctcactctctctcctctcctactcttatctcttcttttctataaatatcttatttat

SEQ ID NO: 109793 - DNA, 416 bp, Homo sapiens
ggtcccagctttcataagaggcacgaatctaagaagaagacacggtttgagtcccagcctgaccatgcctggctgacgcagcatgatccatccatttcactcatgctgggaagatcttgccaggaaaacttgaaataattgaggctgtcacctaaaaccccatcttagttagaaatggtttggttgtgtggaacatagctctactcatcaaggctcacgtgaaaaatgaaagctatttagaagcagagcgaagcttcgtggaaccagaaatttagtagatggcattctcgctctcttccttccctctctcacgtccttcacctggtctctggccctggttcttattttctctcaattccctactgcctgtttcttactttgaacctggaggcagcctgcagccccatcccatctcc

SEQ ID NO: 109794 - DNA, 1174 bp, Homo sapiens
ggtctgcaggtcctccggcatgtagtatttatctagcaaggcggggtggtggaggcagcaccctggcaaagcagctcacacactgcagccacactcatcagctgtggtgaggcggctggagcaaagtcaaagtcatgcagcaaaatgaaaactctgggactcttcggcaaaatcctcattaagccgagcagctttggccaagtaatttttgcctccttccctcgcgtggcctgagtttaggagcaagggtggccagagtcccttacccacagataagcctcccctcatgaaatgccactcaccccgggctaccattgacatcagggctgcatttccagccagcctggaagtaaaatttgagaggaagacaatattaatctgtgtccccacctagtgagctgtggacaggtttaagttgggtctccttcttcttcaccacaaaaacaggctctaagaaatcatgttactaaaaaatcagtgtaaagtctgtttaaaataaaaaagaatgttttctatgtctgtatatcttttgtgaatatttattaggatttcttattaaaaaagtgcaatattaataattgtacattgtcatccagaaacaaaactattggggggactttattaactaacttcctgcagttgtgttcctgtaaactcagtagtgattattatatttttcctatttttaatagaacctggtgtttaactctggatccattcactgtacaggatgtgttgtaaaaactaacatgggatgctgaggcagtaagagggaattcatttgtggcataatagttatgcatggaatgataaagacagacaaattccatactactactaatgtggttaattatttctagttcgatagtgattgaaaatcagtggtcactatttacatttcctaaagagcaagcatcctccagctccatgttgggttggagcagttggcagtgggtctcagtgagctggcagaacctaggtttgggtgggaagcagaatgctcgttgcatgaaatgaatgtacatttaatgtttgttctgtgaattgcaactcagcagcaccacaagacaatgaaggctgctggctaatgtggaaggaggcactttctcctctaaaacacaaaactgtatttgtattttttgtacagataatacagcttatttatttaaatctt

SEQ ID NO: 109795 - DNA, 249 bp, Homo sapiens
gctcaagtgttcctcctgcctcagcctcctgagtagctaggactacaggcacaggctataggactatgccaccatacttagctaatcctgtgtattttagattactggtggggattaaaaaaaactcgagagccatataggtatttaaaattacagttatttcattatttttacatcttattttatgtttactttcatcagatttctctattccaacttgataatgttgctacaatttgtgacaaatga

SEQ ID NO: 109796 - DNA, 296 bp, Homo sapiens
  misc_feature (192)..(192): n is a, c, g, or t
  misc_feature (224)..(224): n is a, c, g, or t
  misc_feature (259)..(259): n is a, c, g, or t
cttggagcccctccccactctgacttcaggactgggggcacagagggggctctggggtggtggacagaagcccccaggaccacagacaccctgggcccccagcccactcctgaagccacagcaggaaagtctctgtgtgtctgaggccccctccagcaaagccctggtgggcttcacccagatgaccatctnggccaagggcaagcaccgcagctacctgaagnagttccgggactacccgcccctgcgcatgcccatnatccccttcctgctctgagcgctcacccctgttgagg

SEQ ID NO: 109797 - DNA, 379 bp, Homo sapiens
gctccccaatgccagcctggccccagggcctcggggcctcgattccgccctgtatctggggccaccacctgcttcacagggacctgggacccactctgtccctgagcccattttagaatctgtcctgggtttatgagacatgcttttcggatttgcatcagaactgcattgagtttaacaggtgaatttaaggagaattcaaagtcctgttactttgagctgacccagtaggagcttatctccaacacgacttctgaggctcaggcacgtgtagctagatgtatttcttagatacctagtgtttttttgtttttttgttttttttaatttttttgaaacagagtcttgctctgtcacccaggctggagggggccgcgcg

SEQ ID NO: 109798 - DNA, 720 bp, Homo sapiens
tacaagagatttacttcacaagcttagaaaagatcctctcacttttagaaaagcagcaaataatttgaaagtgaagtatgcaagagatattccatgccaatagtaatcaaaagagagcggaaatggctatgctattatcagatgaagtatcctgaaaaaaaaattacaagagacaaaagcactatatattggtaatatagtcaatccataaaatctttaaaatttacaaacatatacctatctaacaacagtctcttaatagatcaaacaaaaactgcaggactgaaaggataaatacattgttttacaatagtatttgtaaactttaatactccactttcaataatggatagaaaaactcaatagcaaaaagaaaatggaagacttgaacaatgctataaacaaactagacctaacacatacacacatatataggacagtccatcaaacaacatcagaaaatgtattttcctcaggtacacatgaaacagtatccaggatagaccacattttaggccaaaaaacaagtctcaaaacaattaagaagactgaaataatacaaggtaactttttcaagttactttgaataaaatgaaactagaaataaaaaaaattttgcaaatatgtgggaaaaatatccttaaacaagtaataggtcacaaaaagaaatttttttaaggtaaattagttgagatgagtggaaacaaaaacacaatatat

SEQ ID NO: 109799 - DNA, 408 bp, Homo sapiens
aaaagatgtttaaatcaactaggaaatttttcattaggaaaagctgttgaacattgctgtgtgattaatatgcaagaaagcagagaggcctcagtaacactgcatgttgatcaaggatgctgttacccagaaatcagagcccctggatctccagaaggataattatacttaaaagcaagacaagctcaaactataccagctgtcagattttttttacaatgagtgtatgtatatttaaatcgtagctattcattgcaggatttgtgatcccaaacagaaggacagcatgaacagagcccaaaccaagtaacaacaaatggaatgggaaaatgacaggccttttcataggctccatagttcagtggtctgataacatagattttctgaaatgcaaagagtagggtcagc

SEQ ID NO: 109800 - DNA, 301 bp, Homo sapiens
atatattaaatgattatttatgataacagtagaagctcttaataggttttcatgtcattgccattaatttgttctagattttctgtttggtagaatataaatttgttttccttgagaacgtctgtaagctagcaggcaggctcagttttagttaaggactgatgagtaaaatttgtaactgctgaaagaccttgtatgatttttgatatttgaagtaattaaaacaacctgtatttattcttattggctgtgcaatataacttcacaaaatctacagcaaaataacattagatactcttta

SEQ ID NO: 109801 - DNA, 218 bp, Homo sapiens
ttgaattctagaatctacacattaaactgcttgaactgcttgggttgaacccaagctctgccacttactggctgcgcaacattgaccaagttatttaatgtcccagtgtctcagttccctcttttgtatatagccataataataatcatacctatacttcacagagtgttgtggaaattaaataagtacatatatagaaagtgcttcacagggacagg

SEQ ID NO: 109802 - DNA, 619 bp, Homo sapiens
tcacctgcggacaattcaaaaccagcctgggcaatatagtgagaccacatccctactaagaagaattaaaaatatatatataaactggggccaggtacgatggctcacgcctataatcccaacactttgggaggccaaggccggtggatcccttgagcctaggagtttgagactagcctggacaacatggcaaaactccatctctctaaaaataacaacaattttttaaaaaccgactggcttaagctgatcagaactcacaactgaggctagggtcaccttcagaaaccatactgttgctgcacaatagggaaaaagcaaaacagctgttgcagaatcaaccgctgcatggcttacagtgcactattgcatacataatcttttctgatcttacaaaagaagtattagaaaaatccaaatgatatacacatgggaaaagggattttgtcttctcattttaaaactatgttaaagctttctgcatattttggacaaagaggtcatattcagagactgttcacatgtaagctttcttagcaaaacatctacagggtgtggtcatcagatattattaaaaaggaccaataggccaggcgtggtgactcacccatgtaatccc

SEQ ID NO: 109803 - DNA, 157 bp, Homo sapiens
ttcatatatagatccatatctatatatatggataaaaaaagacaaattggaaataattacctttgtaattttaagtattatatttgatttttttaaatgaataaattactcaatacctataaaaagctcaaagtaatacttgacccatgtttattgt

SEQ ID NO: 109804 - DNA, 450 bp, Homo sapiens
ggcagaggtttccatttactggaatgtcacaggaggtgcagaacatctgccatggccttgtgctcttgaaatattatgccatataatgttcttagatggggctcagagagaacatgctgtggttgattatgatatctgcataggtgcaagactaaagaatgtgtatcatacatatgccattcatgctcttcactgttctgaaaggataattattgacagcccaaggagaaggccagtcatgtgtacattggttttctgaagtctaacaactaccagggctaataaagctattggggcatgatcaggaagtatgctaaaaccaaaccaaaatgttaccttcttatcaaaaccctgatggtgagtcttgaaatcagagtgcccagcccttggggcaactcaaggtgggtgtatgagaatagaagacggtccagggtatggtctctaagatga

SEQ ID NO: 109805 - DNA, 671 bp, Homo sapiens
tgttagtccatggcaaattagtaaagtttgtaaaaagaatgtctttctctggtattgttgacaccaacatagtaagaatgtttaagtgctttgcattaagcatctcagggaataaggaaagggagctgtataaaataattctttgtctagtaggacaaactgtgtagttaactgagtctcgtatagaggtgcctgcctcacatgattattgggagcattagatgagtttatgcattataagtcattttgacctagtgcctagcacttagtaaatgtaagctattaatagaaaatttattgctataaaattataaaaataataaactttaaactttataatcatttttgttataactcttcacttggctttcttgataccattcttcccaacattttctctgcctgatttttctgacttattctaaattcttcatcctcaggtctcctctctcttacctttttttcattattccctgtgtcagtgtcagcaccttctgctgaaactcactacagcgtatctctacaaaatctcttgcctttcttagggaggaaagtgacacgattcagccagtttttaggaagctagccaagtttgttaccactgtgaaatacagtttagaaaggcttagccaggcataaggcctgtaatactagagtcttgagaggttgag

SEQ ID NO: 109806 - DNA, 578 bp, Homo sapiens
aacaccagttctgagaaccctgagctgccatgtaagacattcagggcactatgctgtgaagaagctcaagacatacggagaagccgaagtaggtgtttcagttaatggtcccagctgagccctgtctttgaaacatcccacttcaggtggctgacacaagagtaaagaaccacggattggccaggcgcagtggctcacgcctgtaatcccagcactttgggagtgaagaattactatatcaaggtagctacaaaaactgtaaatagtgcagcttagatctgcagtgattgtgtttggaaaattaaaatggcattttcagtttagaaataacatttataaagttataacactataactgcctccccttccaccagctgttaaattctggaaatctcactaaaggcagtctttgcaatcgccataacagtgtctccaatgtaagtcctcaatgtttgtcttctgatgtatacataatatcaacacatacatacattatatattctgatgtatacataatatcaacacatatttataaatctgtaatactgatgtaattggaagcataacctgccaatttc

SEQ ID NO: 109807 - DNA, 468 bp, Homo sapiens
cctgataggcatagatgcaaataatccttaacaaaatacgaataaagcaaatccaattgcacatcaaaaagacagtacacgattaagggaatttatccctaggatgcaagggtctttcatcacatgcaaatcaataaatgtgacacatcatgtaaacagaatgaaggataaaaccatatgatcatctcaatagaagcagaaaaggcatttggtaaaattcaacattccttcatgataaaaattctcaacaaactaggcaaagaaagaaatactgcaatattaataaaggctatatatgacaaacccacagctaacataaatctgaatgggggaaaagtgaaagaaagccttccctctaagaactggaacaagataagaatgcccgctgatatgatttggctgtgtccccacccaaatctcatcttcaattgtggctcccataattcccacaggttgtgggagggactc

SEQ ID NO: 109808 - DNA, 633 bp, Homo sapiens
gtgtgtatgtgtggtaagagtatttaatatgagacctaccctctcagagaattttaagtatacaatacagaattgttagctatatgcactatgtgtatagagatctccagaatttatttatcttgcataattaaaacttcataccctttgaccatcacctctagattgttttttgatattgtcgttttgttttgttttgacaaggtcttgctctgtcacccaggctggagtgcagtggtgtcatcatggctcactgcagcctcaacctcctggactcaagccatcctcccacctcagcctcctgagtagctgggactacaggcatgcaccaccacacccggctaatttttgtactttttatagagacagggtttgccatgtggcccaggctggtcttgaccctccgggctcaagtgatccaccagcctcggcctcccaaagtgctgggattacaggtgtgagccactgtgcccaggctagatggttagttatctcacccaagcatctatcttcttgtttctctgtatggatgtaggcttaacttttatttttaaacacattccagacctcctttccagaatcctctcttgttattggttgacatattattggatctcacttcagactgactcc

SEQ ID NO: 109809 - DNA, 439 bp, Homo sapiens
aagtctttgatccatactgagttaatgttgtatataggtgtgaggtaggggtccagattcattcttttgcatgaggttagccaattgtcctggcattatttgttgaaagggctattcttttcccatgaatagccctggcacccttgccaaaaatcaactgatcataaatcacaacttttttttaatacccacatgcaagtaatctttcagccaaagtctttcattttaagatactaaatacattttaagtaatttaccaggctcaataaaaacaattccagggttttggataacaatgtcattactttctgaaaaactgaagaaatggcaattctttatgcattccacttaggaagttagtttctactgctacctctgatagatgaaaaagttgaaatcctgttacgataattaatgttgctaggatcttggcccagac

SEQ ID NO: 109810 - DNA, 1765 bp, Homo sapiens
atgtctgatttgcatggagaattatcaagagaagcaacaatgccaagcagactattccaggtcaaaatagtcaaattaataattcataaattattatatgttttgaaggtattgcaaaattaaagttgcaagaacagtacagataacttttttcctgaaccatttgagagtaggttgcagacctggtgccccatcatttctgaatattttagtgtgcattttctacaaacaaggacattttccagcataaccacaatgcacccatcaatgtcgtgaaattaatgttggtacattactaccacctagtcctcagaccctattcaaattataccagttatcataatagtttcttataatttatagcaaaatgatccaaaccaggagcatgcattgcatttttatgaatttttaaaacaattaagtctgtgtagtgagtgaagccacagtgataggaatatataaaggctttgcatctagaatttgttctgaaaaccctgagattcaagtagtacattatttcatttactattttacacagagaagccctcatttttaagagtttgcctttctgatttccaccggaaatgatactatcagtatcatactcagaatcttaattacatacaaggcactaacctctcacctgttttcagctttgtgtaaagacaagggatcaaaacatccctttctgctatttcatacttaagtgtgggagctgatccaaaggaagaatagtttcaaaagtttgtagcaaaaaaaatttaaaaggtgaagattttttccttgaatgattctcacctggcagatctatggaaagattagctgactctttggatccctgaatatagttaatagaaatttggaaggaccatgtcaaaattaactaatgtgaactgacaaagatttggtgttcaaagcaaaaattaaactttggaaaagtgagcaagtacttaatcagaaacaaaaaaaaaaaaagaaaggaaaagttaggtgaaaatggtttccaggtgttgttgctgttatagtttgaatcataaaagttgttaaaagtctgctgtaacaaaccatcatagactgggtgacttataaagaacaaaaatgtatttctcacagttccagaggctgggaagtctaagatcaaggcatcagcagattcagtgtctggtgagggcccactttctggttcatagatggcaccttctcactgtctccccacgtgatggaaggggcaagaggtctctcttggtactcttttattaagggcactaatcccatccatggggctccaccttcatgacctattcatctcccagaggccctacctgcagataccatcgtatgggggatttgatttcagcctgtgaatttgggggaagcgggacaaacattcgttttgtagcaaaaggagtagagtaatatctgccaataactggaggaaagaattgttcttttaaaactattaaattgtttaatgggatttaaatgatttcaggaatgaaatggaaatcctggtaatgggtagaaacataggtaaattctccttttccacttaccaccacctgtgtgaacaacaatcatttctcattaatagtcaagaatttgaagagatcatgagtaaaaagtcttgatcagaaattgtgtatagctgtttccagcataaaaccttatataaaatgcatattcatagaagatgctcaagtatgtcatgaaaaatatgaagtttatttaaatatttatacaaattaaagatttactgtattctcta

SEQ ID NO: 109811 - DNA, 2172 bp, Homo sapiens
atgtctgatttgcatggagaattatcaagagaagcaacaatgccaagcagactattccaggtcaaaatagtcaaattaataattcataaattattatatgttttgaaggtattgcaaaattaaagttgcaagaacagtacagataacttttttcctgaaccatttgagagtaggttgcagacctggtgccccatcatttctgaatattttagtgtgcattttctacaaacaaggacattttccagcataaccacaatgcacccatcaatgtcgtgaaattaatgttggtacattactaccacctagtcctcagaccctattcaaattataccagttatcataatagtttcttataatttatagcaaaatgatccaaaccaggagcatgcattgcatttttatgaatttttaaaacaattaagtctgtgtagtgagtgaagccacagtgataggaatatataaaggctttgcatctagaatttgttctgaaaaccctgagattcaagtagtacattatttcatttactattttacacagagaagccctcatttttaagagtttgcctttctgatttccaccggaaatgatactatcagtatcatactcagaatcttaattacatacaaggcactaacctctcacctgttttcagctttgtgtaaagacaagggatcaaaacatccctttctgctatttcatacttaagtgtgggagctgatccaaaggaagaatagtttcaaaagtttgtagcaaaaaaaatttaaaaggtgaagattttttccttgaatgattctcacctggcagatctatggaaagattagctgactctttggatccctgaatatagttaatagaaatttggaaggaccatgtcaaaattaactaatgtgaactgacaaagatttggtgttcaaagcaaaaattaaactttggaaaagtgagcaagtacttaatcagaaacaaaaaaaaaaaaagaaaggaaaagttaggtgaaaatggtttccaggtgttgttgctgttatagtttgaatcataaaagttgttaaaagtctgctgtaacaaaccatcatagactgggtgacttataaagaacaaaaatgtatttctcacagttccagaggctgggaagtctaagatcaaggcatcagcagattcagtgtctggtgagggcccactttctggttcatagatggcaccttctcactgtctccccacgtgatggaaggggcaagaggtctctcttggtactcttttattaagggcactaatcccatccatggggctccaccttcatgacctattcatctcccagaggccctacctgcagataccatcgtatgggggatttgatttcagcctgtgaatttgggggaagcgggacaaacattcgttttgtagcaaaaggagtagagtaatatctgccaataactggaggaaagaattgttcttttaaaactattaaattgtttaatgggatttaaatgatttcaggaatgaaatggaaatcctggtaatgggtagaaacataggtaaattctccttttccacttaccaccacctgtgtgaacaacaatcatttctcattaatagtcaagaatttgaagagatcatgagtaaaaagtcttgatcagaaattgtgtatagctgtttccagcataaaaccttatataaaatgcatattcatagaagatgctcaagtatgtcatgaaaaatatgaagtttatttaaatatttatacaaattaaagatttactgtattctctaacagcgcgtattttcttttttgtaataactatatgaaataaatacaaagtaacacgtttttaccaagcccccttcccatccttctcatcaccctcaaactccctccaaatagagtcagagaaacagccagagggatgtctccactgagacacagggaggtcttgcacccaggcagttcagcagttcctgggcgggtggcccttcccatctgagtacccctcaatgtgcctgctcctcctgggatcctttctgctcccttgggcctctgtttttggtctgcaatggttggttatgtagagggatcagtattggggttgtcccaagccaggctacaggttgagcaggtagccacataggccacatagcaggacgggcccagctggggactctgatgtctgcaattaggg

SEQ ID NO: 109812 - DNA, 315 bp, Homo sapiens
gttctatatcaaatatttagacctcaacctacaggttgaggttccataacctgtggttatttatgtattttcatttgaaatactttcttctttgagcatttcattgggaatacatgaaatcatttaatgaatattcattgaatttttaatctgaatatgcaaaagcaaatatactattagacacttgaaaaagaaaaaaagaatcttaaattctacaagcctacaaagagtttacaatcctatttggggagctaaagtaaataccttgcaatgggactttgcaagtttgcttctgtcagggtggaatcaagaggt

SEQ ID NO: 109813 - DNA, 538 bp, Homo sapiens
ttggaactgattctgggctaggtatagatcccaggagaacccgtgttctacaaacctcactctgggcaaaactgacccagactgggttttggggatgcttgatgtaatgaggcaagtggcgcgatcttggcttactggcaatggagcggctccttctgcctgctgccgtcagattctctgctatctggctggcaggacaattcgctatggcctggctttggcaactgattctgggctaggtataggatcccaggagaacccgtgttctacaaaccccactctgggcaaaactgacccagactgggtttggggatgcttgatgtgaatgaggcaagtgatatgtctactgaacttactgctccaagtaggacatggtaactttgagttcccctcatccctttcatatgggaggagtggtctgggcagcaggagctacggcaggccagggtggctctagtcttaagccagagctagcaggtaagtgcctcccaatgatatgcagattaaagataagtaatcctggcccatttctgctcaa

SEQ ID NO: 109814 - DNA, 292 bp, Homo sapiens
atccagttttcccagcaccattttgttgaagagactgtcctttccccattttgtagtcttggtacccttgtcaaaagtcattggccatatatgcaagggtttatttccaggctctctattctgttccatcggcctatataagtttctgtgccactaccacactgtctgattactgtcattttgtagtatgttttgaaatcagggagtatgaggcctcagctttgctctttttcaatattttttggctatttggggttccttgagattgcatttgaattttatgggttttttt

SEQ ID NO: 109815 - DNA, 252 bp, Homo sapiens
aacatggaggaaacaatctaactttcctgcaattagtgtcccacaaggagaagagggagtgattttaaataaatactggctgagaatttcctacaactagtgaaagacatcacaaacacatatccaacctcattcaaaagcactaaaaacctcaggcaagataaatataaggaaaatcacacctgggaacatcatgattttgctcctgaaaattgaagagcaatagaaaatctttttttttatttttatttt

SEQ ID NO: 109816 - DNA, 371 bp, Homo sapiens
tgcctcttctggcacaagaatctgcaactccaatctggtctctccaccaaccacagcgcccccagaccttggagaagcgcgttgtctgctccaggggcccagagccacctgctcggaatcttacctacaaccttttgcttcctacccaaatacctgatcaagagtaaagggacagtggcacagcccctcctctccagaaaccacaatctgcaatggagcactccatcaacccggacatcctcaggcctccactaaataagcccggcattggaggagggtatcagggcctagaaacaggttctgggcagagggccccctgcacgtcctgggggtgtctgaatggaaaacagaaacttgaactgatagtaggg

SEQ ID NO: 109817 - DNA, 567 bp, Homo sapiens
agtaattttgcggtgcctttccagcatttagcaatggaaatacaaataacgtcattttccgacagggcagagagtcctagtctaatttagtgtcacaactagcagttctgttatactttaatccttaaatattagaccaaagcagggacaatagaaaatgtgtttacaaaccctcctgattaaggtgactaaaaagcaaaagcgaaacaaaggaggttgaggtaaagagcagtcttacacgtaagcttccagctttgggactgatttacaaaccacaactgaaatgggtattatatatatgctgatgaaagtagctatgtaacatagtttggatctgtgtcgctgcacaaatctcctgttgaactgtaatccccagtattggaggtggggcctggtggaaggtgatgggatcatggaagcggatttctcatgaatggtttagcgccatcctcttagtgctgtcctcacgacagtgattgacttctcaggagatctgcctatttaaaagtgtggcgcctggctctttctcttttgctcctgctcccaccatgcgagacccctcctccc

SEQ ID NO: 109818 - DNA, 572 bp, Homo sapiens
atccgctttcgatgttttctctcttaaacaaaaacactatgctgaatgtgcagcaagtaggtgtggtgtagttattgctgatgcacagacatcatagacatttcaagtaaaaggcagcaacctgagaagttgcaatccacttgagaagtcatgattaataccaacatttttaaattagtagttgtctaaacaaaaattgtataaatgccatgaaaatatacttccattcttactgaaactgcctttgcaaaattataactgaggaaattatgacagtgaaaaaaaatcagacctaaccgactccatcttgcttctaacctttaagctgtgcttgttcattcttgggcataggccgagctaactttgggaaggaattcagttcatggtttgactctgaaacaaaattgataacagccctttcccaaaaagactcccttcttgcctggtgaccagtctgcctttgcaggactaacctattagctacaaggttagaaattacagtttaggggttatgcaccctctggctccaagtctgaaccgccccacattgcttctggggataacatcactat

SEQ ID NO: 109819 - DNA, 133 bp, Homo sapiens
tcttatctgggactacagtaaaaaacatggggaaagaaacataatcatggatgccattctgagcagaagactaagaagcaagaagattatcagacatcaataaatattctttaaatactctcatgaatgcata

SEQ ID NO: 109820 - DNA, 575 bp, Homo sapiens
cactgctaaaaactggtgaggccaggagttgacctcagctactgggaaccagaagaaatgggacttggaaattctgtccagcctctcttcttctagtttaaagcttaataatatctataaaaaaaagtaacgattttgaaataggaataaggttcaatttgctcatctacaattagagatcataacacttatcctccctatcaaaaagaattattttgaacatcaattaagttaatgtgaactactataaaatatattacattttgcattctctatactgtaatataactaaaagaacatcgagttgggagctcacagacattcaaatgttggccctttttattagtcttatggccttgggcaagtcattctgcattgcctttcttatctataaaataagaaaaattatatgacttttggggttacgataatcacaaatgagtttaaaatgtgaaataacccaaaaaacattgctaagcacatatagggtaggcaagaactaaatgccatctctttttatgtggagtggtttgatggtcggtgccgatgattaattaatcagtgtatgctttagt

SEQ ID NO: 109821 - DNA, 364 bp, Homo sapiens
ctgcccccagggagagctgcttgtggtcacccctccagtgaagcaggcctgtttcattgtctgggatcccacagtctccctcattgcctcagctactttcccacctggtgtccccgactgggtgctgttatccttcatagtgtagcctttgatgccaacatgaaaggtcaatgtggcagggatgaggttgtgagatgaggtctggagcatattctctttatgtagaaccttctggttacttgggggactggggggcggggagcgggaaaactaaaaatccaaaaacgggcgtcacagactggagagccccgtgttttacttccggctctgttttctgtaatagcatcttggcactctcagacga

SEQ ID NO: 109822 - DNA, 448 bp, Homo sapiens
ccaaggtggaaggactgcttgagcccaggagtttgagaccagcctgggtaacacagcaagaccccatctctggaaaatatttttgggctaggacagagtcacaagaaataagactatttcttatttgtcttaagactgtttcttagtccttaatactgaggtggcctcggtgtaaggatatggaggaaggaagctcctaactgaaggcccttggaggagaatcgtaaatattgaaacttactgaaggaaaattaaaacccaggaagtaggagagtgttgaatatggaaagtgaatgtggggattgattgatggagagctttgcatattgttctgaaaaatgtgagtttttatgttttcacaaagcatggaccacttttcccacatctgcattttatataatatcgatggtaatgtagtaaccaagacgactccttttgttgcctatca

SEQ ID NO: 109823 - DNA, 358 bp, Homo sapiens
gataatagaaaagcaagccataatacctaaaaagtattacctcctactcaaacatatacctctcccccaaagtaagccataatacctaaaaatgtcactctctccccttttccttgaagaccctcagctccagcggggtcctgccctatacccaggaagaaggaatgctgcacagagtccaagaagaatctgaacagacaggccttgctgggtccccctgccccacccagtctattaccattagataacaccctttgtctactaacatttctacaggcctctccctttcttcattcttcattgagcctaagcataaaaacagttttccctaggtctttgggtcttcatttctgaaagc

SEQ ID NO: 109824 - DNA, 189 bp, Homo sapiens
aagagttctgagataagtgaaatagagcttctgtgctattttccagccagagagaggggacaacccatgtttctgtcttcatgttaatgacaaatgctttttaaagataaggataaaagaagcagtcttttcttgagagtcaagaagtgtattagttaagagctcaactaaagggtcatgttgtttcca

SEQ ID NO: 109825 - DNA, 681 bp, Homo sapiens
taaatcctgcatagaggcagggttaatttggaattcattctggagatggcagagctctggcaatggcagtagggccagaggctgcagccagcgtctgttgtggtggcagtggctgctcccaagccagggtgggctgaggtcctgcctggtttttttgtttgtttgtttgtttgtttgtttgtttgtttgttttgagacagagtctcgctctcttgcccacgatggagtgcagcagcacaatcttggctcactgtaacctctgcttctggggttcaagcgatgctcctgcctcagcctcccgagtagttgggactacagacacccaccaccacacccagctaatttttccatttttagtagagacgaggtttcgccaccttggccaggctggtctgaaacacctgacctcgtgatccgccctcatctgcctcaaagtgctgggattacaggcgtgagccaccgcacccagccgtcctgcctatttgacgagcctggctctgcaggcttccctaaggtgcatgagcttcttgccatcctgtgagcaattgcccccgtgtctacagtaaccttagatgacgtcttctttaatcaaagtgcccttgctggtaccagggatgtgtaacaagtgattacagaaacgtgaagggaatgtgaattggaaatctggcctcattaaacttg

SEQ ID NO: 109826 - DNA, 549 bp, Homo sapiens
atcaaaagcagcaaccactgaagatatgcagagcagatctagcatacggataacaggagtcactgaagaaggaaaccaaagcaagaaagcaagccaacactaaaaattataactccaaaaaacttcactgaaatacaagaaaaatgtagaactacattttggaagaccagacagtatacctgagaatatggatctagaatgacaaatacctattgatattctagtgaaaacaatactgcactttaaagaaaaagaaaaaaggatctagcccaggtgcagtggctcacatctgtaatcccagcactttgggaatccaaggtgggtggatcgcttgatcccaggagttcgagaccagcccaggcaacatagtgagaccctgtatccatttttaaaaaaaattatccaggcatgatgtcacacacctgtagttccagctacttgggaggctgaggtggtaggacaaactgagcccaggagtctgaggttgcagtgagctgtgatcacatgactataatccagcctgggcaacacagtgagaccttgtcccaa

SEQ ID NO: 109827 - DNA, 565 bp, Homo sapiens
tggcccccccattcatatgtcaaaacctaaccctcaatgcaaggtggggcctgcaggtgaccaggtcctgaagcagagacctcatgaacgcgatgagtgcccttacacaaaagcctggagggagcccgtcttccaccatgagatgacacacagaaggcaccatctgtgaggaatgggcctcaaccagacactgattctgctggaggcttgatgctggacttcccagcctccacagctgtgaacaatacatttccgtggttttataaatgaccctgtctaaggcgttctgttacagcagcacaaaggaactaagacagtgggcacccgtatttccatttagaggcggaaactgactctgaagtgagaaccggtccactctgagagcacatcgccaggggaagaggactgtagccaggaagttgttatgtcatggggtcatgggaggacccagcaatgttgtttctgatgatttctgaaaggcggctcttttctggaagtggacagatgatgggggaggggcaggaagctgaattcaccacagtgtccgagaacactgtctaccagc

SEQ ID NO: 109828 - DNA, 851 bp, Homo sapiens
gtactagacataccaccattgcaataaaaataacaaatagtaacaaactctacaaagatgggtgtgggacaaatctgatttgcagagttgccaccttatattatttaaattttccagttttcaacaacaacaaaagatgtgaagaaacagcaattacagccgcctatatatgggggaaaaaacttagaaaacagaaaccatccctgagaaaacccagacattagatctattaaacaaaaagtttgtcaacctttaaatatgctttaaaaactaaagtaaaccgtggacaaagaacaggagaaaggaaaataatgtataaacaaagtgaaagtatcagtaaatagaaaacatgaaaaattctggagctgaaaaatttcttagaggggtttacagatttaaacaggcagaagaatcagcaaatttgaaaataggacaaatgtaattatccagtccgaggaacagaaagaaaaaagaatgaagagtgaacagagcttgagggatctgtggcattttatcaagttaccaacatacgcattaaaggagttccagaaaatgaaaagaaaaaggcagaaataatatttgaggaaataatggctgagacttcccaaattcaatgaaatacatgagctacacattcaagaagatcaacaaattataactaggataaactcagagatctattactaaacacattacaatcaagctgtcaaaagccagagacaaagacagtcgttaaagcagcaggagaaaaacaacttatcacatacaagggatcctgtgtaagattaaatgcctaccactcatcagaaactacagaggtcagaaggctgtagaatgacatattcaaagtg

SEQ ID NO: 109829 - DNA, 920 bp, Homo sapiens
gtactagacataccaccattgcaataaaaataacaaatagtaacaaactctacaaagatgggtgtgggacaaatctgatttgcagagttgccaccttatattatttaaattttccagttttcaacaacaacaaaagatgtgaagaaacagcaattacagccgcctatatatgggggaaaaaacttagaaaacagaaaccatccctgagaaaacccagacattagatctattaaacaaaaagtttgtcaacctttaaatatgctttaaaaactaaagtaaaccgtggacaaagaacaggagaaaggaaaataatgtataaacaaagtgaaagtatcagtaaatagaaaacatgaaaaattctggagctgaaaaatttcttagaggggtttacagatttaaacaggcagaagaatcagcaaatttgaaaataggacaaatgtaattatccagtccgaggaacagaaagaaaaaagaatgaagagtgaacagagcttgagggatctgtggcattttatcaagttaccaacatacgcattaaaggagttccagaaaatgaaaagaaaaaggcagaaataatatttgaggaaataatggctgagacttcccaaattcaatgaaatacatgagctacacattcaagaagatcaacaaattataactaggataaactcagagatctattactaaacacattacaatcaagctgtcaaaagccagagacaaagacagtcgttaaagcagcaggagaaaaacaacttatcacatacaagggatcctgtgtaagattaaatgcctaccactcatcagaaactacagaggtcagaaggctggtctcaaactcctgacctcaagtgatctgcctcccttggcttcccaaagtgctgggattacaggcgtgagcctctgagcctggcataaca

SEQ ID NO: 109830 - DNA, 509 bp, Homo sapiens
atttcagcggtgcctttccaagaagcactcagcagcttcttctcccccagtacttgggtcttcccagtgtcaatccagagcatatcagaattgaaataccagataaaagtgaaatgcaaagtgatatttcggtgccgttacattcggttttgtaatatcagcaacttttagataacattaatatgagcaaattaacctctcataggttttattatttttcataagtaataaaagaatgctcagcagaaagcccccagctcttgagtgttacataaaagtgacctcaaatttttaatatggcgcaaagcttgttaatcctgcttggatttcatgcttaaaccttcattagtacattagtcttccaaatataatttatttagacttaagtactccaattcttatgatgaagtggcaaaagctgtgccgtattttgcaaattgcagatggcattttctagactagaattaagggattcagtgctaaagttcaatttttcatggttttgtcaa

SEQ ID NO: 109831 - DNA, 355 bp, Homo sapiens
accacacatggcttcgctgccctgcctctaaccccacacaaattctagccaggagaccctgcacccaccccaacaggctgagcagcaacaaccacgaccacccaacaccaaatgttgctgccgggtgtgaagtggccggtccagaacacggggtccctgactggactcacagggccagggctgggaatcttccccgcacctctctcagctggcacaggagagagggcacacaagagagagcttcagggtgacagggcacagaagtcacccaaatctctgactctgttcatggccatcatggtttccagcttcccttgagggaggcagaaaaaggggagaaactgaaggcctgact

SEQ ID NO: 109832 - DNA, 556 bp, Homo sapiens
tactgatgagtgtgtatttgatttataatttttctcataacaaacagtgttgctatatcttgtacaaatatcacaatgaattaatagtttcactcctatggggtatattcccaaacgtgaggtttctgtgtaaaagcgtgcgtacttttcatttaaatagatattgccagttttctaaaaagtctcttactgcacacttcttcctgcagcatgtgagactgttttcttgtttcccatttgtagctggtgttactatttttttgtttagttggtctgataaatatagactgatgttaccttaattgaataggcagcttttcatgtccgccatttggatttgctttcataggaattgcgtattcatatcctttgtccatttttcaatttttagcagtttacactattcagaattttcccctacaaaatatcctttgcctaccagcaagtgtgacatcttttttcttgtaaaagttactgtttatataaacaaacatacataattttctgttgcatctagtcttggtcaagaccctagattatatacggattctagagg

SEQ ID NO: 109833 - DNA, 878 bp, Homo sapiens
gcactccagcctggccagtaagagtgaaactccgtctccaaaagaaaaaaaaagagcacagactccagaattaaattccttgtatttgaatcctggggctctaacaagtattagatgtgggaccaaacaagttacttacttaatctctctgtacctcagtttcctcagctgtaaaatggggataataaaaatatcaacctcacaggggtgttgagcatgaaattatgcttagaatggtgtctagccttagtaagagctgtattagctcactagtacgattacagggattcattaagatggctaaagtcaaaaagacagaaaacagcatgaggaggaggtagagaatttagaaccttcatacattgctgttgggaatgttaaatggtgtgaccatttggaaaagtctggtagctcctcaaaatgttaaatatagagttaccacatgacccagcagttccactcataggtaaacacccaagagaaataaaaacatagatccatgtacaggatccacaaaaacatgtacaggaatgttcatagcagcattaatcataacagccaaaaagtagaaacaatccaaatgtccatcaactgagaatggataagcaaaaatgtgggccgggcgtggtggcttacacctataatcccagcactttgggaggccgaggcaggaggatggcttgagctcaggagttcgagatcagcctgggcaccatagtgagacctagtctctactaaaattaaaaaaaattagctgggcatggtggcatgagcctgtagtcccagctacttgggaggctgaatcaggaggatcgtttcagcccaggaaatcaaagctacagtgaggtctgattgtgccactgtactccagcctgggt

SEQ ID NO: 109834 - DNA, 827 bp, Homo sapiens
gagaatgaacatatgagcacatttagactgctcctttcaattctccctctcacacaacaacctcgctaacaggttggcgagtggagggatcttactcttactcaactctcatttgggtaagagaatttgctacttgttccaggaagccttctcataagccctggccaggtctgtgaagaatctttctactttcctcttataccaggttataaggttatagatttatcagaatcaatcgcatcatcacccaagctgtcaaaaatgtgaacattcgtggatttttttctatttgcaagccaaaaaatgaagactgtcaacttcatggatattagaagaaggcatgagattcctaggcctgatgaaaaatatttgatggttcatcacacaaatggaagcaagagctccatatctgtatctgttccccacgtccactccaagtgacagggatgatcaaagagacccaactggatgctttctgctcagtagattttgatcacagctgaggaatctcaaggttaagaaatcccagtgctttggcagggcacggtggctcacgcctgtaatcccagcacttttggaggccgaggcgggcagatcacgaggtcaggagattgagaccatcctggctaacacggtgaaaccccgtctctactaaaaatacaaaaaaaaaaagaaaattagccaggtgtggtggcgggtacctgtaggcccagctactctggaggctgaggcaggagaatggcgtgaacccaggaggtggagcttgcagtgagccgaaattgtgccactgcactccagcctgggtgacagagtgagactccgtctca

SEQ ID NO: 109835 - DNA, 370 bp, Homo sapiens
ctcggcctaccaaagtgctgggattacaggcttgagctaccatgcttggccttcaaacactttttctgtttgtgctttcagtaaaattttattaagagtcttccctgtgtttggtgctgaggatacaatgagaaatcagatgatgttgttggccttttgggggatctctgctgtcacacttggctgattttactggaattgtttttgaaatttttttttatgcttccttccgtttgtgattagaggatatagaacatgatctcttaataaccaagtaattatgaacaacatttttcttgcacttaggaaccccgaggcaatgagtctgccccctccacccctccacgctgctgtgctatcgcaggtggtc

SEQ ID NO: 109836 - DNA, 603 bp, Homo sapiens
atgatatcaagtgaacatttgaatccaaaagaaaggagggaagagcactaagaatagtatatatgaaaagctatattttcatttctcaaatgttataaaatgtaatggactgtttagagcacaaataataacaaaatgatggtttctaacaaaggaaaagtaaaacatgtgatgattgcagaaatagaggatgagaagatgctatttacagctcttaacgtggtatatgaagtgatataatgtcaattcagtatcgatgtagacaagttaagtaaggatgcttactgttattattagagcaaccattgaaaaagaggaataaaagcaaaacagccatagaagagataagttgaataactaaacaaaaaaaccaacagcatgattatcccaagagaagacaggaaacgtggagtaaaaatactaagaactaaaagcacagataaacaacaaatagcaagctgctatatttaatccaaattacattaatacttacattaaatgttaatgaactaaacattccaatcgaaaagcaggggttgtcacactggatataaataaagaattaagtacttttttttaaaagagatatacattacctataaa

SEQ ID NO: 109837 - DNA, 381 bp, Homo sapiens
  misc_feature (330)..(330): n is a, c, g, or t
gttgttccctctcttatttatttttttctattaatttttcatttgtgtgggtacataatgaatgtatttctcttgttatttctgacacaagataaatcttaagttcgtttctactatacttttatgaggtttctgcaggcctttatgaccttgtgacaagggatttcttggccattggctaccaggcagcaagtggttcatcagtttcccatctgaagctgaagggcacaactgtttggagattccctgagtgaggggacatactcagagacctagaaggagattaggcagctctgcatagtacttgaaaataattcctcttcattcccnagattgtgccattgcactccagcctgggcaacaagggggaaacgctgtctc

SEQ ID NO: 109838 - DNA, 115 bp, Homo sapiens
tatgatataccacttaatggtccagacccacaattccttttggtgaagaagttttcatgaggctgggtgcagtagctcatgctcgtaattccagcactttggaaggccaaggcgg

SEQ ID NO: 109839 - DNA, 378 bp, Homo sapiens
aggtccaagtcacagaacctctcccagccatttttctaggatgattccttctctctctctctctctttctttcaacagagtcttgctctgttgcccaggctggaaagagaggagaggagaggagaggagaggagagaagagaagtaggggaattggcaaagcagcagtagagaggagcaccatgagaagcgagagaagtcacagtgtagcaccctaggggattctggattggaggcactgctagcttggaagtgaaggtagaggcaaatgggctaacagtcagatcctcatctaaatcctgtgcagccaggtgaatgctgcttctcgtaccctttcagaatatggaagatttactttctattaagattgcccagagat

SEQ ID NO: 109840 - DNA, 510 bp, Homo sapiens
ccaagtaacctataaaggaaaacctatcagattaacagcagatttctcagcagaaactctacaagctagaagggattggggcccgatcttcagcctccttaaacaaaacaatcatcagccaagaattttgtatctagcgaaactaagcattatatatgaaggagagatacagtctttttcagacaaacaaatggtgagagaattcgccattaccaagccaccactacaagaactgctaaaataagctctgaatcttgaaacaaatcctggaaacacatcaaaacagaacctctttaaagcataaattcacacaggatctataaaacataaatacaagttaaaaagcaaaagcaaaaaacaaataaacaagaacccaaagtacacaggcaacaaagagcacgatgaatgcaacagtacctcacatttcattactaacattggacttaaatgctccacttaaagacacagaactgcagaatggataagaactcactaaccaactatctgatg

SEQ ID NO: 109841 - DNA, 7301 bp, Homo sapiens
  misc_feature (1011)..(1011): n is a, c, g, or t
cagccgggtgacccaggccgaggccggcagaagacagcctgatgccttgaagacttcctcttgcacttttgttggagggtgctggtttgctaaaagcagagagtatttttctttttatttattttgtttttaattttttaattttagctccagctcagttgcccagactggagagcagtggccaatcatagcttactgcctcctggaactcctggctcaatcgatcctcctggataagcctcctccgggtactatagcttcatggcggctgaagagatgcattggcctgtccctatgaaggccattggtgcccagaacctgctaaccatgcctgggggcgtggccaaggctggctacctgcacaagaagggcggtacccagctgcagctgctgaaatggcccctgcgctttgtcatcatccacaaacgctgcgtctactacttcaagagtagcacctctgcctccccgcagggcgccttctccctgagtggctataaccgggtgatgcgggcggctgaggagaccacgtccaacaacgttttccccttcaagatcatccacatcagcaagaagcaccgcacgtggttcttctcggcctcctccgaggaggagcgcaagagctggatggccttgctgcgcagggagattggccacttccacgaaaagaaagacctgcccttggacaccagcgactccagctcggacacagacagcttctacggcgcagttgagcggcctgtggatatcagcctttccccgtaccccacggacaatgaagactatgagcacgacgatgaggatgactcctacctggagcctgactccccggagcccggaaggcttgaggatgccctgatgcacccaccggcttacccaccacccccagtgcccacgcccaggaagccagccttctctgacatgccccgggcccactcctttacctccaagggccccggtcccctactgccacccccgccccctaagcacggcctcccagatgttggcctggcngctgaggactccaagagggacccactgtgcccgaggcgggctgagccttgccccagggtacctgctaccccccgaaggatgagcgatccccctctgagcaccatgcccaccgcacccggcctccggaaacccccttgcttccgggagagtgccagccccagcccggagccctggacccctggccacggggcctgctccacttccagtgctgccatcatggccactgccacctccagaaactgtgacaaactcaagtccttccacctgtccccccgaggaccacccacatctgagcccccacctgtgccagccaacaagcccaagttcctgaagatagctgaagaggaccccccaagggaggcagccatgcccggactctttgtgccccccgtggctccccggcctcctgcgctgaagctgccagtgcctgaggccatggcgcggcccgcagtcctgcccaggccagagaagccgcagctcccgcacctccagcgatcaccccccgatgggcagagtttcaggagcttctcctttgaaaagccccggcaaccctcacaggctgacactggcggggacgactcggacgaggactatgagaaggtgccactgcccaactcggtcttcgtcaacaccacggagtcctgcgaagtggaaaggttgttcaaggctacaagcccccggggagagccccaggatggactctactgcatccggaactcctctaccaagtcggggaaggtcctggttgtgtgggacgaaacctctaacaaagtgaggaactatcgcatttttgagaaggactctaagttctacctggagggcgaggtcctgtttgtgagtgtgggcagcatggtggagcactaccacacccacgtgctgcccagccaccagagcctgctgctgcggcacccctacggctacactgggcctaggtgatggcagtccatgtggctgccaggccaaggcagtcacaggggccctgaccccaggccacacagacggacatgggcccacatgggagggtgagcaggagcaaggctgtgcttgcctagggcctctgtgatggacatctcgtaggacccagccagtctcatccagcaggttgggttctagggctgaaccaggcgccaggctccagaggacgaagggactctgttgccccacactaacttgccctgtcccaatcccagaaacccaggaccaagctgtgcctgggctccaaggacaggaacactggtccccccatcacactcacccctaagtgggctgggagccaggcagggccagggcagctgggtgggggccggggctggccctgggacccccaggaacgctaagacacaggctccagtaggggctgttgcctccaataaagcagcagtgagctttgccttggtggctggggcttgattgggaaggaggggattaccagcttactgggtgcccatgctgatgtctaagtggtgaccgcagcagtacccgggaaccccaacagttggttgtcttgtcttccagggtgcaggtcactgagtgacttccccagggtgcacagcgagtaacagatcaggacccaaacttgggcagtctgggctgggagcccacaccccactcaccagttctgctgcctcaggtcaggccagggcagtgctgctgcagagctagaaggccctgcagctacagctgcttcattccctgcattagtgcctggttactgggtacctcctgagtggctgtccccgttccagaacttgcatacactgagcgggctacagagctagaaggccctgcagctacagctgcttcattccctgcattagcgagcagttattgggtacctcctgcatgcctggtcccattccagacaggggcctctggcctggctgagttcacagcccagtctggggacagctgggtatgaggtgcttacggcacagtgtccagggcagctgggtgtgcagggactgggggctcccggaagattttttggaggaagtaacagctacgatgggatgggaacagtggaccctaagcaggccaagggtgcgtagggacggtggtacccagatgcccaagtcttccaggcaatacctggctcaggcccagccccaatccatccccttactttctgccatggagttccagcaggtcactctccctggcacaccttccaggctggatttttaatgaaacagactcagggaggtaggggctggcagggaccctagaatccttgtgatttttcttagcaccttatgtcagggaaacctaaactgaggtcagcacttgggcccactgacagtgactgactgggggagaaggtcctgcagcccccttcccctgggtgtgttctggggacctgtggtttgctggcggaaacaagtgatgaggctggttagcggatgtgggaggctgtgaccccagggggccatagggtgcggtggaactgcaggccctgcagatgacggcagccagctgcttccaggaaccaggtgtccaaggccacctctgcaggggtttcctcttcagcctgcctggggtgagaggtcagtgcaccacagccgaggctggagcacagggagcttctgttgttctgatctatctctggaaaaccagccattcctcctccctgcagtcagaattctttgccctgtctgacctgaacttgcttagggagtcatgccactccccactgtggccatagtttctcttcctgtaaaattttattattttagttttttgtttttgagatgtagtctcaccctgtcgcccaggctggagtgcaatgccgtgatctccgctcactgccacctccgcctctctagttcaagcgattttcctgcctcagcctcccgagtagctgggattccaggcgcccgccaccacgcctggctaattttttgtatttttagtagagacgggattttatcatgttggccaggctggtctcgaactcctgacctcaggtgatctgcccaccttggcctcccaaagtgctgggattacaggcatgagccactgtgcctggccccttcctgtaaaatttttaaatggagaattgggtgcgagatgtggtttccagcctggtgcctggggtgctgtgctagtgagtggtgcagtccaggacacctttgctttatgtcacttacacggtcacctggagccggctcaagtggctaaagcatcctggggcccagagccaggtgatagtccctctggccaactggacagttgaggcttgtggttaacccgaagcccagctggggccttggtccagcttcgcttcccagattctgcacctgctagcacagctgtccacgtctgtgtgagctgttctaggccgagggcctcagtttcaagagtgtgttggggtgggatggggcaggccgtggtcctccagcatgaagaaggagccatgaggagttcccatgacctcccgagacttgccataagtgttctagtccacatataagggtagggttgggattaccatttactgaccacatctgtgaggtgccgagctgggtgcttgacatcatttgcttggagaagcagctgttagtagacccattttacaggtgagagaaccaagtctcacagaggcctgggttcaagtcccacctctgccactaactggcatgtgaccctatctatccttcactgctctgagcctagaccctggcccctgcctggctccctgccaggctccctgccacccctcacgacctctgatggtcgttgtgggggtctcttgcctggctcccagggctagggttagggctctggaggtgctttcactcaaccaagggggccacagcactggggagtgaaactgccccgcctcaccctgcgttgccctctgggtctgtgagggtgggctggcaggaggcctaggccttgccctaggggcagtcctgcttcctcattttatagatagggaaactgaggctttgggaggactcactgacatacctaccttcaagatgagttcaggtgggctcagttctggggcttgggaaaagggccccagtggctttgggaagcacccccagcccagggtgaaacatgcttcttctcttcctgtggttccatccgaaggattgtggtgagccccgtgccttcagttaataaagatttgtattgtgaaaagattttttcttttttttttgggacacagtctcactctgtcgcccaggctagagtggattggcgtgatctcggctcaatgcaaatctccagggttcaatcgattctcctgcctcaccctcccatgtagctgggattacagctgcctgccaaatttttgtatttttagtggaaccggggtttcaccatgttggccaggctggtcttgaactcctgacctcaactgatccgcccaccttggcctcccaagtgctgggattacaggcgcgagccacggcgcccagccttgaaaagatgtttttagaaccagaagaaacctcggttcccactgatccttctgggccacgttgtgcggagctcccctgctggttggggctcagcgcagccccagggaggtgcttcctgcacctcaggatgggcgagggtgggcattgggggagagggggacctgggacctgcggcttagttccctgaggcaggcagggcttattggggccatttcatagaaaggcagattgaagctcagcagggaagaagcttttgagggtgatccaggcgctggagggatggcctaggacaccagggtcacaccaggaacatgggagggccgtgcttgtctctagacgaggggaatgggggaagggccacaacctctgtttctgtgacccagcagcatcaagcccctcgctgggcacctcgcacacaccccctgccttatctctgcctgcacgccctgttccctccacctagactgcctgctgagggggcagtgccaggaggttgcctgtccttggggaagaggggcagtgaccctgtgaagatgcttgacagacaacccccaccacctcagaagtgtgtgtgagtggtgaacccttttaagccatcttccagccattctcactggagggagatttgatgggtacagagcagacccctacctgtctaccctccttcggacccctaggaagcttcgcaggccttccaggctgccagacagctgccctggcgttgccgtctgcttcttccctggccccactctgaggggctcagagctgaggcagaatccctttttcattcatttcctgcagaataaaacaacatacagaaaagtgaataaaacataaatgcacaacctaacacactgttaggaagtaaacgatctgcaaccaccatcaggaaatagttttgccagcacccaagtgccctcccctcacagtgtcacttccggcctctctgccctggcttatgtgagtcttgtgttcttgtttttctaaaaagtcttcagcacccaattatgcaagcattgcagtattttcctgtttctgtgctttatccccttgaatcatacagatgcaaattctggcagctggcttctttggctcgttattatgtctgtgagatttattcatgttgctgtgcgtagtatagtttgtgcatgttcattgctaaaaacttccattgtttggctgtatcgtagttcacagattcatttcactgtcagtcaagcttgtccaatgcatgcagcccaggatgcctttgaatgtggcccaacacaaatttgtaaactttcttaaaacattataaagatttttgtttgcgatttttttttttagctcatcagctatagttagtggtagtgtattttatgcgtgacccgagacagttcttccggtatggtccatggaagccaaaagattggacatgcctgctgtagatggacagttggtttgtttctagtttggggtaactacacacaatgctgctagcaacagttttgtccatgtctctgatgcacgtgtgttttttgcaaatggtgcacaaatttttctagggtttgtactcaggagtctgactcctgggttctagggtatgaagatctttctaaatattgttctagtttacgtgcccaccagcagtaaaacagaattcccttgccttcccatccttggcagacatttcacttttgccagtctggtggggtgtatagttatggccttaatttgcatttagctaattaccaaggagattgagcatatttttatgtttttattaaccattttgattttgtctcctgtgaagtgtctatcatcttttgcccattttttaacttgttgtctttttctttttcttttctttttttttttttt

SEQ ID NO: 109842 - DNA, 7248 bp, Homo sapiens
  misc_feature (958)..(958): n is a, c, g, or t
ggggaggagccggcggctgccaggccagggccggcgggcatggcgggctccgggccggccgcggagctggggccggcgggaggcgggcgcccgggacgaggcggcggcggccgggggacgcggcccggggccgtgccggtgctcgcaggggaggcgggcgtggatcgccccggggaagccggccatgcccgccgcgtggacgcccttcatggcggctgaagagatgcattggcctgtccctatgaaggccattggtgcccagaacctgctaaccatgcctgggggcgtggccaaggctggctacctgcacaagaagggcggtacccagctgcagctgctgaaatggcccctgcgctttgtcatcatccacaaacgctgcgtctactacttcaagagtagcacctctgcctccccgcagggcgccttctccctgagtggctataaccgggtgatgcgggcggctgaggagaccacgtccaacaacgttttccccttcaagatcatccacatcagcaagaagcaccgcacgtggttcttctcggcctcctccgaggaggagcgcaagagctggatggccttgctgcgcagggagattggccacttccacgaaaagaaagacctgcccttggacaccagcgactccagctcggacacagacagcttctacggcgcagttgagcggcctgtggatatcagcctttccccgtaccccacggacaatgaagactatgagcacgacgatgaggatgactcctacctggagcctgactccccggagcccggaaggcttgaggatgccctgatgcacccaccggcttacccaccacccccagtgcccacgcccaggaagccagccttctctgacatgccccgggcccactcctttacctccaagggccccggtcccctactgccacccccgccccctaagcacggcctcccagatgttggcctggcngctgaggactccaagagggacccactgtgcccgaggcgggctgagccttgccccagggtacctgctaccccccgaaggatgagcgatccccctctgagcaccatgcccaccgcacccggcctccggaaacccccttgcttccgggagagtgccagccccagcccggagccctggacccctggccacggggcctgctccacttccagtgctgccatcatggccactgccacctccagaaactgtgacaaactcaagtccttccacctgtccccccgaggaccacccacatctgagcccccacctgtgccagccaacaagcccaagttcctgaagatagctgaagaggaccccccaagggaggcagccatgcccggactctttgtgccccccgtggctccccggcctcctgcgctgaagctgccagtgcctgaggccatggcgcggcccgcagtcctgcccaggccagagaagccgcagctcccgcacctccagcgatcaccccccgatgggcagagtttcaggagcttctcctttgaaaagccccggcaaccctcacaggctgacactggcggggacgactcggacgaggactatgagaaggtgccactgcccaactcggtcttcgtcaacaccacggagtcctgcgaagtggaaaggttgttcaaggctacaagcccccggggagagccccaggatggactctactgcatccggaactcctctaccaagtcggggaaggtcctggttgtgtgggacgaaacctctaacaaagtgaggaactatcgcatttttgagaaggactctaagttctacctggagggcgaggtcctgtttgtgagtgtgggcagcatggtggagcactaccacacccacgtgctgcccagccaccagagcctgctgctgcggcacccctacggctacactgggcctaggtgatggcagtccatgtggctgccaggccaaggcagtcacaggggccctgaccccaggccacacagacggacatgggcccacatgggagggtgagcaggagcaaggctgtgcttgcctagggcctctgtgatggacatctcgtaggacccagccagtctcatccagcaggttgggttctagggctgaaccaggcgccaggctccagaggacgaagggactctgttgccccacactaacttgccctgtcccaatcccagaaacccaggaccaagctgtgcctgggctccaaggacaggaacactggtccccccatcacactcacccctaagtgggctgggagccaggcagggccagggcagctgggtgggggccggggctggccctgggacccccaggaacgctaagacacaggctccagtaggggctgttgcctccaataaagcagcagtgagctttgccttggtggctggggcttgattgggaaggaggggattaccagcttactgggtgcccatgctgatgtctaagtggtgaccgcagcagtacccgggaaccccaacagttggttgtcttgtcttccagggtgcaggtcactgagtgacttccccagggtgcacagcgagtaacagatcaggacccaaacttgggcagtctgggctgggagcccacaccccactcaccagttctgctgcctcaggtcaggccagggcagtgctgctgcagagctagaaggccctgcagctacagctgcttcattccctgcattagtgcctggttactgggtacctcctgagtggctgtccccgttccagaacttgcatacactgagcgggctacagagctagaaggccctgcagctacagctgcttcattccctgcattagcgagcagttattgggtacctcctgcatgcctggtcccattccagacaggggcctctggcctggctgagttcacagcccagtctggggacagctgggtatgaggtgcttacggcacagtgtccagggcagctgggtgtgcagggactgggggctcccggaagattttttggaggaagtaacagctacgatgggatgggaacagtggaccctaagcaggccaagggtgcgtagggacggtggtacccagatgcccaagtcttccaggcaatacctggctcaggcccagccccaatccatccccttactttctgccatggagttccagcaggtcactctccctggcacaccttccaggctggatttttaatgaaacagactcagggaggtaggggctggcagggaccctagaatccttgtgatttttcttagcaccttatgtcagggaaacctaaactgaggtcagcacttgggcccactgacagtgactgactgggggagaaggtcctgcagcccccttcccctgggtgtgttctggggacctgtggtttgctggcggaaacaagtgatgaggctggttagcggatgtgggaggctgtgaccccagggggccatagggtgcggtggaactgcaggccctgcagatgacggcagccagctgcttccaggaaccaggtgtccaaggccacctctgcaggggtttcctcttcagcctgcctggggtgagaggtcagtgcaccacagccgaggctggagcacagggagcttctgttgttctgatctatctctggaaaaccagccattcctcctccctgcagtcagaattctttgccctgtctgacctgaacttgcttagggagtcatgccactccccactgtggccatagtttctcttcctgtaaaattttattattttagttttttgtttttgagatgtagtctcaccctgtcgcccaggctggagtgcaatgccgtgatctccgctcactgccacctccgcctctctagttcaagcgattttcctgcctcagcctcccgagtagctgggattccaggcgcccgccaccacgcctggctaattttttgtatttttagtagagacgggattttatcatgttggccaggctggtctcgaactcctgacctcaggtgatctgcccaccttggcctcccaaagtgctgggattacaggcatgagccactgtgcctggccccttcctgtaaaatttttaaatggagaattgggtgcgagatgtggtttccagcctggtgcctggggtgctgtgctagtgagtggtgcagtccaggacacctttgctttatgtcacttacacggtcacctggagccggctcaagtggctaaagcatcctggggcccagagccaggtgatagtccctctggccaactggacagttgaggcttgtggttaacccgaagcccagctggggccttggtccagcttcgcttcccagattctgcacctgctagcacagctgtccacgtctgtgtgagctgttctaggccgagggcctcagtttcaagagtgtgttggggtgggatggggcaggccgtggtcctccagcatgaagaaggagccatgaggagttcccatgacctcccgagacttgccataagtgttctagtccacatataagggtagggttgggattaccatttactgaccacatctgtgaggtgccgagctgggtgcttgacatcatttgcttggagaagcagctgttagtagacccattttacaggtgagagaaccaagtctcacagaggcctgggttcaagtcccacctctgccactaactggcatgtgaccctatctatccttcactgctctgagcctagaccctggcccctgcctggctccctgccaggctccctgccacccctcacgacctctgatggtcgttgtgggggtctcttgcctggctcccagggctagggttagggctctggaggtgctttcactcaaccaagggggccacagcactggggagtgaaactgccccgcctcaccctgcgttgccctctgggtctgtgagggtgggctggcaggaggcctaggccttgccctaggggcagtcctgcttcctcattttatagatagggaaactgaggctttgggaggactcactgacatacctaccttcaagatgagttcaggtgggctcagttctggggcttgggaaaagggccccagtggctttgggaagcacccccagcccagggtgaaacatgcttcttctcttcctgtggttccatccgaaggattgtggtgagccccgtgccttcagttaataaagatttgtattgtgaaaagattttttcttttttttttgggacacagtctcactctgtcgcccaggctagagtggattggcgtgatctcggctcaatgcaaatctccagggttcaatcgattctcctgcctcaccctcccatgtagctgggattacagctgcctgccaaatttttgtatttttagtggaaccggggtttcaccatgttggccaggctggtcttgaactcctgacctcaactgatccgcccaccttggcctcccaagtgctgggattacaggcgcgagccacggcgcccagccttgaaaagatgtttttagaaccagaagaaacctcggttcccactgatccttctgggccacgttgtgcggagctcccctgctggttggggctcagcgcagccccagggaggtgcttcctgcacctcaggatgggcgagggtgggcattgggggagagggggacctgggacctgcggcttagttccctgaggcaggcagggcttattggggccatttcatagaaaggcagattgaagctcagcagggaagaagcttttgagggtgatccaggcgctggagggatggcctaggacaccagggtcacaccaggaacatgggagggccgtgcttgtctctagacgaggggaatgggggaagggccacaacctctgtttctgtgacccagcagcatcaagcccctcgctgggcacctcgcacacaccccctgccttatctctgcctgcacgccctgttccctccacctagactgcctgctgagggggcagtgccaggaggttgcctgtccttggggaagaggggcagtgaccctgtgaagatgcttgacagacaacccccaccacctcagaagtgtgtgtgagtggtgaacccttttaagccatcttccagccattctcactggagggagatttgatgggtacagagcagacccctacctgtctaccctccttcggacccctaggaagcttcgcaggccttccaggctgccagacagctgccctggcgttgccgtctgcttcttccctggccccactctgaggggctcagagctgaggcagaatccctttttcattcatttcctgcagaataaaacaacatacagaaaagtgaataaaacataaatgcacaacctaacacactgttaggaagtaaacgatctgcaaccaccatcaggaaatagttttgccagcacccaagtgccctcccctcacagtgtcacttccggcctctctgccctggcttatgtgagtcttgtgttcttgtttttctaaaaagtcttcagcacccaattatgcaagcattgcagtattttcctgtttctgtgctttatccccttgaatcatacagatgcaaattctggcagctggcttctttggctcgttattatgtctgtgagatttattcatgttgctgtgcgtagtatagtttgtgcatgttcattgctaaaaacttccattgtttggctgtatcgtagttcacagattcatttcactgtcagtcaagcttgtccaatgcatgcagcccaggatgcctttgaatgtggcccaacacaaatttgtaaactttcttaaaacattataaagatttttgtttgcgatttttttttttagctcatcagctatagttagtggtagtgtattttatgcgtgacccgagacagttcttccggtatggtccatggaagccaaaagattggacatgcctgctgtagatggacagttggtttgtttctagtttggggtaactacacacaatgctgctagcaacagttttgtccatgtctctgatgcacgtgtgttttttgcaaatggtgcacaaatttttctagggtttgtactcaggagtctgactcctgggttctagggtatgaagatctttctaaatattgttctagtttacgtgcccaccagcagtaaaacagaattcccttgccttcccatccttggcagacatttcacttttgccagtctggtggggtgtatagttatggccttaatttgcatttagctaattaccaaggagattgagcatatttttatgtttttattaaccattttgattttgtctcctgtgaagtgtctatcatcttttgcccattttttaacttgttgtctttttctttttcttttctttttttttttttt

SEQ ID NO: 109843 - DNA, 3691 bp, Homo sapiens
  misc_feature (958)..(958): n is a, c, g, or t
ggggaggagccggcggctgccaggccagggccggcgggcatggcgggctccgggccggccgcggagctggggccggcgggaggcgggcgcccgggacgaggcggcggcggccgggggacgcggcccggggccgtgccggtgctcgcaggggaggcgggcgtggatcgccccggggaagccggccatgcccgccgcgtggacgcccttcatggcggctgaagagatgcattggcctgtccctatgaaggccattggtgcccagaacctgctaaccatgcctgggggcgtggccaaggctggctacctgcacaagaagggcggtacccagctgcagctgctgaaatggcccctgcgctttgtcatcatccacaaacgctgcgtctactacttcaagagtagcacctctgcctccccgcagggcgccttctccctgagtggctataaccgggtgatgcgggcggctgaggagaccacgtccaacaacgttttccccttcaagatcatccacatcagcaagaagcaccgcacgtggttcttctcggcctcctccgaggaggagcgcaagagctggatggccttgctgcgcagggagattggccacttccacgaaaagaaagacctgcccttggacaccagcgactccagctcggacacagacagcttctacggcgcagttgagcggcctgtggatatcagcctttccccgtaccccacggacaatgaagactatgagcacgacgatgaggatgactcctacctggagcctgactccccggagcccggaaggcttgaggatgccctgatgcacccaccggcttacccaccacccccagtgcccacgcccaggaagccagccttctctgacatgccccgggcccactcctttacctccaagggccccggtcccctactgccacccccgccccctaagcacggcctcccagatgttggcctggcngctgaggactccaagagggacccactgtgcccgaggcgggctgagccttgccccagggtacctgctaccccccgaaggatgagcgatccccctctgagcaccatgcccaccgcacccggcctccggaaacccccttgcttccgggagagtgccagccccagcccggagccctggacccctggccacggggcctgctccacttccagtgctgccatcatggccactgccacctccagaaactgtgacaaactcaagtccttccacctgtccccccgaggaccacccacatctgagcccccacctgtgccagccaacaagcccaagttcctgaagatagctgaagaggaccccccaagggaggcagccatgcccggactctttgtgccccccgtggctccccggcctcctgcgctgaagctgccagtgcctgaggccatggcgcggcccgcagtcctgcccaggccagagaagccgcagctcccgcacctccagcgatcaccccccgatgggcagagtttcaggagcttctcctttgaaaagccccggcaaccctcacaggctgacactggcggggacgactcggacgaggactatgagaaggtgccactgcccaactcggtcttcgtcaacaccacggagtcctgcgaagtggaaaggttgttcaaggctacaagcccccggggagagccccaggatggactctactgcatccggaactcctctaccaagtcggggaaggtcctggttgtgtgggacgaaacctctaacaaagtgaggaactatcgcatttttgagaaggactctaagttctacctggagggcgaggtcctgtttgtgagtgtgggcagcatggtggagcactaccacacccacgtgctgcccagccaccagagcctgctgctgcggcacccctacggctacactgggcctaggtgatggcagtccatgtggctgccaggccaaggcagtcacaggggccctgaccccaggccacacagacggacatgggcccacatgggagggtgagcaggagcaaggctgtgcttgcctagggcctctgtgatggacatctcgtaggacccagccagtctcatccagcaggttgggttctagggctgaaccaggcgccaggctccagaggacgaagggactctgttgccccacactaacttgccctgtcccaatcccagaaacccaggaccaagctgtgcctgggctccaaggacaggaacactggtccccccatcacactcacccctaagtgggctgggagccaggcagggccagggcagctgggtgggggccggggctggccctgggacccccaggaacgctaagacacaggctccagtaggggctgttgcctccaataaagcagcagtgagctttgccttggtggctggggcttgattgggaaggaggggattaccagcttactgggtgcccatgctgatgtctaagtggtgaccgcagcagtacccgggaaccccaacagttggttgtcttgtcttccagggtgcaggtcactgagtgacttccccagggtgcacagcgagtaacagatcaggacccaaacttgggcagtctgggctgggagcccacaccccactcaccagttctgctgcctcaggtcaggccagggcagtgctgctgcagagctagaaggccctgcagctacagctgcttcattccctgcattagtgcctggttactgggtacctcctgagtggctgtccccgttccagaacttgcatacactgagcgggctacagagctagaaggccctgcagctacagctgcttcattccctgcattagcgagcagttattgggtacctcctgcatgcctggtcccattccagacaggggcctctggcctggctgagttcacagcccagtctggggacagctgggtatgaggtgcttacggcacagtgtccagggcagctgggtgtgcagggactgggggctcccggaagattttttggaggaagtaacagctacgatgggatgggaacagtggaccctaagcaggccaagggtgcgtagggacggtggtacccagatgcccaagtcttccaggcaatacctggctcaggcccagccccaatccatccccttactttctgccatggagttccagcaggtcactctccctggcacaccttccaggctggatttttaatgaaacagactcagggaggtaggggctggcagggaccctagaatccttgtgatttttcttagcaccttatgtcagggaaacctaaactgaggtcagcacttgggcccactgacagtgactgactgggggagaaggtcctgcagcccccttcccctgggtgtgttctggggacctgtggtttgctggcggaaacaagtgatgaggctggttagcggatgtgggaggctgtgaccccagggggccatagggtgcggtggaactgcaggccctgcagatgacggcagccagctgcttccaggaaccaggtgtccaaggccacctctgcaggggtttcctcttcagcctgcctggggtgagaggtcagtgcaccacagccgaggctggagcacagggagcttctgttgttctgatctatctctggaaaaccagccattcctcctccctgcagtcagaattctttgccctgtctgacctgaacttgcttagggagtcatgccactccccactgtggttagctgtttctctgggggatcctctggagacgactat

SEQ ID NO: 109844 - DNA, 3646 bp, Homo sapiens
  misc_feature (958)..(958): n is a, c, g, or t
ggggaggagccggcggctgccaggccagggccggcgggcatggcgggctccgggccggccgcggagctggggccggcgggaggcgggcgcccgggacgaggcggcggcggccgggggacgcggcccggggccgtgccggtgctcgcaggggaggcgggcgtggatcgccccggggaagccggccatgcccgccgcgtggacgcccttcatggcggctgaagagatgcattggcctgtccctatgaaggccattggtgcccagaacctgctaaccatgcctgggggcgtggccaaggctggctacctgcacaagaagggcggtacccagctgcagctgctgaaatggcccctgcgctttgtcatcatccacaaacgctgcgtctactacttcaagagtagcacctctgcctccccgcagggcgccttctccctgagtggctataaccgggtgatgcgggcggctgaggagaccacgtccaacaacgttttccccttcaagatcatccacatcagcaagaagcaccgcacgtggttcttctcggcctcctccgaggaggagcgcaagagctggatggccttgctgcgcagggagattggccacttccacgaaaagaaagacctgcccttggacaccagcgactccagctcggacacagacagcttctacggcgcagttgagcggcctgtggatatcagcctttccccgtaccccacggacaatgaagactatgagcacgacgatgaggatgactcctacctggagcctgactccccggagcccggaaggcttgaggatgccctgatgcacccaccggcttacccaccacccccagtgcccacgcccaggaagccagccttctctgacatgccccgggcccactcctttacctccaagggccccggtcccctactgccacccccgccccctaagcacggcctcccagatgttggcctggcngctgaggactccaagagggacccactgtgcccgaggcgggctgagccttgccccagggtacctgctaccccccgaaggatgagcgatccccctctgagcaccatgcccaccgcacccggcctccggaaacccccttgcttccgggagagtgccagccccagcccggagccctggacccctggccacggggcctgctccacttccagtgctgccatcatggccactgccacctccagaaactgtgacaaactcaagtccttccacctgtccccccgaggaccacccacatctgagcccccacctgtgccagccaacaagcccaagttcctgaagatagctgaagaggaccccccaagggaggcagccatgcccggactctttgtgccccccgtggctccccggcctcctgcgctgaagctgccagtgcctgaggccatggcgcggcccgcagtcctgcccaggccagagaagccgcagctcccgcacctccagcgatcaccccccgatgggcagagtttcaggagcttctcctttgaaaagccccggcaaccctcacaggctgacactggcggggacgactcggacgaggactatgagaaggtgccactgcccaactcggtcttcgtcaacaccacggagtcctgcgaagtggaaaggttgttcaaggctacaagcccccggggagagccccaggatggactctactgcatccggaactcctctaccaagtcggggaaggtcctggttgtgtgggacgaaacctctaacaaagtgaggaactatcgcatttttgagaaggactctaagttctacctggagggcgaggtcctgtttgtgagtgtgggcagcatggtggagcactaccacacccacgtgctgcccagccaccagagcctgctgctgcggcacccctacggctacactgggcctaggtgatggcagtccatgtggctgccaggccaaggcagtcacaggggccctgaccccaggccacacagacggacatgggcccacatgggagggtgagcaggagcaaggctgtgcttgcctagggcctctgtgatggacatctcgtaggacccagccagtctcatccagcaggttgggttctagggctgaaccaggcgccaggctccagaggacgaagggactctgttgccccacactaacttgccctgtcccaatcccagaaacccaggaccaagctgtgcctgggctccaaggacaggaacactggtccccccatcacactcacccctaagtgggctgggagccaggcagggccagggcagctgggtgggggccggggctggccctgggacccccaggaacgctaagacacaggctccagtaggggctgttgcctccaataaagcagcagtgagctttgccttggtggctggggcttgattgggaaggaggggattaccagcttactgggtgcccatgctgatgtctaagtggtgaccgcagcagtacccgggaaccccaacagttggttgtcttgtcttccagggtgcaggtcactgagtgacttccccagggtgcacagcgagtaacagatcaggacccaaacttgggcagtctgggctgggagcccacaccccactcaccagttctgctgcctcaggtcaggccagggcagtgctgctgcagagctagaaggccctgcagctacagctgcttcattccctgcattagtgcctggttactgggtacctcctgagtggctgtccccgttccagaacttgcatacactgagcgggctacagagctagaaggccctgcagctacagctgcttcattccctgcattagcgagcagttattgggtacctcctgcatgcctggtcccattccagacaggggcctctggcctggctgagttcacagcccagtctggggacagctgggtatgaggtgcttacggcacagtgtccagggcagctgggtgtgcagggactgggggctcccggaagattttttggaggaagtaacagctacgatgggatgggaacagtggaccctaagcaggccaagggtgcgtagggacggtggtacccagatgcccaagtcttccaggcaatacctggctcaggcccagccccaatccatccccttactttctgccatggagttccagcaggtcactctccctggcacaccttccaggctggatttttaatgaaacagactcagggaggtaggggctggcagggaccctagaatccttgtgatttttcttagcaccttatgtcagggaaacctaaactgaggtcagcacttgggcccactgacagtgactgactgggggagaaggtcctgcagcccccttcccctgggtgtgttctggggacctgtggtttgctggcggaaacaagtgatgaggctggttagcggatgtgggaggctgtgaccccagggggccatagggtgcggtggaactgcaggccctgcagatgacggcagccagctgcttccaggaaccaggtgtccaaggccacctctgcaggggtttcctcttcagcctgcctggggtgagaggtcagttatttggaggaaaaaaatcacacagggagagcttatgacgatgtgatcgaactcgggaaagcagccactcgatactacctagcaagtcacagttcggagccccgtgatgacctgaactcagacttagggtgctcatccc

SEQ ID NO: 109845 - DNA, 7480 bp, Homo sapiens
  misc_feature (555)..(555): n is a, c, g, or t
  misc_feature (1190)..(1190): n is a, c, g, or t
cagccgggtgacccaggccgaggccggcagaagacagcctgatgccttgaagacttcctcttgcacttttgttggagggtgctggtttgctaaaagcagagagtatttttctttttatttattttgtttttaattttttaattttagctccagctcagttgcccagactggagagcagtggccaatcatagcttactgcctcctggaactcctggctcaatcgatcctcctggataagcctcctccgggtactatagcttcatggcggctgaagagatgcattggcctgtccctatgaaggccattggtgcccagaacctgctaaccatgcctgggggcgtggccaaggctggctacctgcacaagaagggcggtacccagctgcagctgctgaaatggcccctgcgctttgtcatcatccacaaacgctgcgtctactacttcaagagtagcacctctgcctccccgcagggcgccttctccctgagtggctataaccggcagcccagaccccagccagcccaggccctgtcccaaacagaggctgggccctangattccctgctccagggtcctcccaggccgggatcagtttccagcttcacgcatgtcctgggctgggctctatccagtgatgggccatgagctgccctggagggccttctgcactaacaggcagggtgatgcgggcggctgaggagaccacgtccaacaacgttttccccttcaagatcatccacatcagcaagaagcaccgcacgtggttcttctcggcctcctccgaggaggagcgcaagagctggatggccttgctgcgcagggagattggccacttccacgaaaagaaagacctgcccttggacaccagcgactccagctcggacacagacagcttctacggcgcagttgagcggcctgtggatatcagcctttccccgtaccccacggacaatgaagactatgagcacgacgatgaggatgactcctacctggagcctgactccccggagcccggaaggcttgaggatgccctgatgcacccaccggcttacccaccacccccagtgcccacgcccaggaagccagccttctctgacatgccccgggcccactcctttacctccaagggccccggtcccctactgccacccccgccccctaagcacggcctcccagatgttggcctggcngctgaggactccaagagggacccactgtgcccgaggcgggctgagccttgccccagggtacctgctaccccccgaaggatgagcgatccccctctgagcaccatgcccaccgcacccggcctccggaaacccccttgcttccgggagagtgccagccccagcccggagccctggacccctggccacggggcctgctccacttccagtgctgccatcatggccactgccacctccagaaactgtgacaaactcaagtccttccacctgtccccccgaggaccacccacatctgagcccccacctgtgccagccaacaagcccaagttcctgaagatagctgaagaggaccccccaagggaggcagccatgcccggactctttgtgccccccgtggctccccggcctcctgcgctgaagctgccagtgcctgaggccatggcgcggcccgcagtcctgcccaggccagagaagccgcagctcccgcacctccagcgatcaccccccgatgggcagagtttcaggagcttctcctttgaaaagccccggcaaccctcacaggctgacactggcggggacgactcggacgaggactatgagaaggtgccactgcccaactcggtcttcgtcaacaccacggagtcctgcgaagtggaaaggttgttcaaggctacaagcccccggggagagccccaggatggactctactgcatccggaactcctctaccaagtcggggaaggtcctggttgtgtgggacgaaacctctaacaaagtgaggaactatcgcatttttgagaaggactctaagttctacctggagggcgaggtcctgtttgtgagtgtgggcagcatggtggagcactaccacacccacgtgctgcccagccaccagagcctgctgctgcggcacccctacggctacactgggcctaggtgatggcagtccatgtggctgccaggccaaggcagtcacaggggccctgaccccaggccacacagacggacatgggcccacatgggagggtgagcaggagcaaggctgtgcttgcctagggcctctgtgatggacatctcgtaggacccagccagtctcatccagcaggttgggttctagggctgaaccaggcgccaggctccagaggacgaagggactctgttgccccacactaacttgccctgtcccaatcccagaaacccaggaccaagctgtgcctgggctccaaggacaggaacactggtccccccatcacactcacccctaagtgggctgggagccaggcagggccagggcagctgggtgggggccggggctggccctgggacccccaggaacgctaagacacaggctccagtaggggctgttgcctccaataaagcagcagtgagctttgccttggtggctggggcttgattgggaaggaggggattaccagcttactgggtgcccatgctgatgtctaagtggtgaccgcagcagtacccgggaaccccaacagttggttgtcttgtcttccagggtgcaggtcactgagtgacttccccagggtgcacagcgagtaacagatcaggacccaaacttgggcagtctgggctgggagcccacaccccactcaccagttctgctgcctcaggtcaggccagggcagtgctgctgcagagctagaaggccctgcagctacagctgcttcattccctgcattagtgcctggttactgggtacctcctgagtggctgtccccgttccagaacttgcatacactgagcgggctacagagctagaaggccctgcagctacagctgcttcattccctgcattagcgagcagttattgggtacctcctgcatgcctggtcccattccagacaggggcctctggcctggctgagttcacagcccagtctggggacagctgggtatgaggtgcttacggcacagtgtccagggcagctgggtgtgcagggactgggggctcccggaagattttttggaggaagtaacagctacgatgggatgggaacagtggaccctaagcaggccaagggtgcgtagggacggtggtacccagatgcccaagtcttccaggcaatacctggctcaggcccagccccaatccatccccttactttctgccatggagttccagcaggtcactctccctggcacaccttccaggctggatttttaatgaaacagactcagggaggtaggggctggcagggaccctagaatccttgtgatttttcttagcaccttatgtcagggaaacctaaactgaggtcagcacttgggcccactgacagtgactgactgggggagaaggtcctgcagcccccttcccctgggtgtgttctggggacctgtggtttgctggcggaaacaagtgatgaggctggttagcggatgtgggaggctgtgaccccagggggccatagggtgcggtggaactgcaggccctgcagatgacggcagccagctgcttccaggaaccaggtgtccaaggccacctctgcaggggtttcctcttcagcctgcctggggtgagaggtcagtgcaccacagccgaggctggagcacagggagcttctgttgttctgatctatctctggaaaaccagccattcctcctccctgcagtcagaattctttgccctgtctgacctgaacttgcttagggagtcatgccactccccactgtggccatagtttctcttcctgtaaaattttattattttagttttttgtttttgagatgtagtctcaccctgtcgcccaggctggagtgcaatgccgtgatctccgctcactgccacctccgcctctctagttcaagcgattttcctgcctcagcctcccgagtagctgggattccaggcgcccgccaccacgcctggctaattttttgtatttttagtagagacgggattttatcatgttggccaggctggtctcgaactcctgacctcaggtgatctgcccaccttggcctcccaaagtgctgggattacaggcatgagccactgtgcctggccccttcctgtaaaatttttaaatggagaattgggtgcgagatgtggtttccagcctggtgcctggggtgctgtgctagtgagtggtgcagtccaggacacctttgctttatgtcacttacacggtcacctggagccggctcaagtggctaaagcatcctggggcccagagccaggtgatagtccctctggccaactggacagttgaggcttgtggttaacccgaagcccagctggggccttggtccagcttcgcttcccagattctgcacctgctagcacagctgtccacgtctgtgtgagctgttctaggccgagggcctcagtttcaagagtgtgttggggtgggatggggcaggccgtggtcctccagcatgaagaaggagccatgaggagttcccatgacctcccgagacttgccataagtgttctagtccacatataagggtagggttgggattaccatttactgaccacatctgtgaggtgccgagctgggtgcttgacatcatttgcttggagaagcagctgttagtagacccattttacaggtgagagaaccaagtctcacagaggcctgggttcaagtcccacctctgccactaactggcatgtgaccctatctatccttcactgctctgagcctagaccctggcccctgcctggctccctgccaggctccctgccacccctcacgacctctgatggtcgttgtgggggtctcttgcctggctcccagggctagggttagggctctggaggtgctttcactcaaccaagggggccacagcactggggagtgaaactgccccgcctcaccctgcgttgccctctgggtctgtgagggtgggctggcaggaggcctaggccttgccctaggggcagtcctgcttcctcattttatagatagggaaactgaggctttgggaggactcactgacatacctaccttcaagatgagttcaggtgggctcagttctggggcttgggaaaagggccccagtggctttgggaagcacccccagcccagggtgaaacatgcttcttctcttcctgtggttccatccgaaggattgtggtgagccccgtgccttcagttaataaagatttgtattgtgaaaagattttttcttttttttttgggacacagtctcactctgtcgcccaggctagagtggattggcgtgatctcggctcaatgcaaatctccagggttcaatcgattctcctgcctcaccctcccatgtagctgggattacagctgcctgccaaatttttgtatttttagtggaaccggggtttcaccatgttggccaggctggtcttgaactcctgacctcaactgatccgcccaccttggcctcccaagtgctgggattacaggcgcgagccacggcgcccagccttgaaaagatgtttttagaaccagaagaaacctcggttcccactgatccttctgggccacgttgtgcggagctcccctgctggttggggctcagcgcagccccagggaggtgcttcctgcacctcaggatgggcgagggtgggcattgggggagagggggacctgggacctgcggcttagttccctgaggcaggcagggcttattggggccatttcatagaaaggcagattgaagctcagcagggaagaagcttttgagggtgatccaggcgctggagggatggcctaggacaccagggtcacaccaggaacatgggagggccgtgcttgtctctagacgaggggaatgggggaagggccacaacctctgtttctgtgacccagcagcatcaagcccctcgctgggcacctcgcacacaccccctgccttatctctgcctgcacgccctgttccctccacctagactgcctgctgagggggcagtgccaggaggttgcctgtccttggggaagaggggcagtgaccctgtgaagatgcttgacagacaacccccaccacctcagaagtgtgtgtgagtggtgaacccttttaagccatcttccagccattctcactggagggagatttgatgggtacagagcagacccctacctgtctaccctccttcggacccctaggaagcttcgcaggccttccaggctgccagacagctgccctggcgttgccgtctgcttcttccctggccccactctgaggggctcagagctgaggcagaatccctttttcattcatttcctgcagaataaaacaacatacagaaaagtgaataaaacataaatgcacaacctaacacactgttaggaagtaaacgatctgcaaccaccatcaggaaatagttttgccagcacccaagtgccctcccctcacagtgtcacttccggcctctctgccctggcttatgtgagtcttgtgttcttgtttttctaaaaagtcttcagcacccaattatgcaagcattgcagtattttcctgtttctgtgctttatccccttgaatcatacagatgcaaattctggcagctggcttctttggctcgttattatgtctgtgagatttattcatgttgctgtgcgtagtatagtttgtgcatgttcattgctaaaaacttccattgtttggctgtatcgtagttcacagattcatttcactgtcagtcaagcttgtccaatgcatgcagcccaggatgcctttgaatgtggcccaacacaaatttgtaaactttcttaaaacattataaagatttttgtttgcgatttttttttttagctcatcagctatagttagtggtagtgtattttatgcgtgacccgagacagttcttccggtatggtccatggaagccaaaagattggacatgcctgctgtagatggacagttggtttgtttctagtttggggtaactacacacaatgctgctagcaacagttttgtccatgtctctgatgcacgtgtgttttttgcaaatggtgcacaaatttttctagggtttgtactcaggagtctgactcctgggttctagggtatgaagatctttctaaatattgttctagtttacgtgcccaccagcagtaaaacagaattcccttgccttcccatccttggcagacatttcacttttgccagtctggtggggtgtatagttatggccttaatttgcatttagctaattaccaaggagattgagcatatttttatgtttttattaaccattttgattttgtctcctgtgaagtgtctatcatcttttgcccattttttaacttgttgtctttttctttttcttttctttttttttttttt

SEQ ID NO: 109846 - DNA, 7194 bp, Homo sapiens
  misc_feature (904)..(904): n is a, c, g, or t
caaggccctcagaaaaggggtttccttgcctgtcatggccctaccctccaagctgtgtcctggatcttggcagtgtccccctgagcgccctggctcagacatctcctgcctgaccgtagctgagccacgtgcctttgtcctttattgcagcttcatggcggctgaagagatgcattggcctgtccctatgaaggccattggtgcccagaacctgctaaccatgcctgggggcgtggccaaggctggctacctgcacaagaagggcggtacccagctgcagctgctgaaatggcccctgcgctttgtcatcatccacaaacgctgcgtctactacttcaagagtagcacctctgcctccccgcagggcgccttctccctgagtggctataaccgggtgatgcgggcggctgaggagaccacgtccaacaacgttttccccttcaagatcatccacatcagcaagaagcaccgcacgtggttcttctcggcctcctccgaggaggagcgcaagagctggatggccttgctgcgcagggagattggccacttccacgaaaagaaagacctgcccttggacaccagcgactccagctcggacacagacagcttctacggcgcagttgagcggcctgtggatatcagcctttccccgtaccccacggacaatgaagactatgagcacgacgatgaggatgactcctacctggagcctgactccccggagcccggaaggcttgaggatgccctgatgcacccaccggcttacccaccacccccagtgcccacgcccaggaagccagccttctctgacatgccccgggcccactcctttacctccaagggccccggtcccctactgccacccccgccccctaagcacggcctcccagatgttggcctggcngctgaggactccaagagggacccactgtgcccgaggcgggctgagccttgccccagggtacctgctaccccccgaaggatgagcgatccccctctgagcaccatgcccaccgcacccggcctccggaaacccccttgcttccgggagagtgccagccccagcccggagccctggacccctggccacggggcctgctccacttccagtgctgccatcatggccactgccacctccagaaactgtgacaaactcaagtccttccacctgtccccccgaggaccacccacatctgagcccccacctgtgccagccaacaagcccaagttcctgaagatagctgaagaggaccccccaagggaggcagccatgcccggactctttgtgccccccgtggctccccggcctcctgcgctgaagctgccagtgcctgaggccatggcgcggcccgcagtcctgcccaggccagagaagccgcagctcccgcacctccagcgatcaccccccgatgggcagagtttcaggagcttctcctttgaaaagccccggcaaccctcacaggctgacactggcggggacgactcggacgaggactatgagaaggtgccactgcccaactcggtcttcgtcaacaccacggagtcctgcgaagtggaaaggttgttcaaggctacaagcccccggggagagccccaggatggactctactgcatccggaactcctctaccaagtcggggaaggtcctggttgtgtgggacgaaacctctaacaaagtgaggaactatcgcatttttgagaaggactctaagttctacctggagggcgaggtcctgtttgtgagtgtgggcagcatggtggagcactaccacacccacgtgctgcccagccaccagagcctgctgctgcggcacccctacggctacactgggcctaggtgatggcagtccatgtggctgccaggccaaggcagtcacaggggccctgaccccaggccacacagacggacatgggcccacatgggagggtgagcaggagcaaggctgtgcttgcctagggcctctgtgatggacatctcgtaggacccagccagtctcatccagcaggttgggttctagggctgaaccaggcgccaggctccagaggacgaagggactctgttgccccacactaacttgccctgtcccaatcccagaaacccaggaccaagctgtgcctgggctccaaggacaggaacactggtccccccatcacactcacccctaagtgggctgggagccaggcagggccagggcagctgggtgggggccggggctggccctgggacccccaggaacgctaagacacaggctccagtaggggctgttgcctccaataaagcagcagtgagctttgccttggtggctggggcttgattgggaaggaggggattaccagcttactgggtgcccatgctgatgtctaagtggtgaccgcagcagtacccgggaaccccaacagttggttgtcttgtcttccagggtgcaggtcactgagtgacttccccagggtgcacagcgagtaacagatcaggacccaaacttgggcagtctgggctgggagcccacaccccactcaccagttctgctgcctcaggtcaggccagggcagtgctgctgcagagctagaaggccctgcagctacagctgcttcattccctgcattagtgcctggttactgggtacctcctgagtggctgtccccgttccagaacttgcatacactgagcgggctacagagctagaaggccctgcagctacagctgcttcattccctgcattagcgagcagttattgggtacctcctgcatgcctggtcccattccagacaggggcctctggcctggctgagttcacagcccagtctggggacagctgggtatgaggtgcttacggcacagtgtccagggcagctgggtgtgcagggactgggggctcccggaagattttttggaggaagtaacagctacgatgggatgggaacagtggaccctaagcaggccaagggtgcgtagggacggtggtacccagatgcccaagtcttccaggcaatacctggctcaggcccagccccaatccatccccttactttctgccatggagttccagcaggtcactctccctggcacaccttccaggctggatttttaatgaaacagactcagggaggtaggggctggcagggaccctagaatccttgtgatttttcttagcaccttatgtcagggaaacctaaactgaggtcagcacttgggcccactgacagtgactgactgggggagaaggtcctgcagcccccttcccctgggtgtgttctggggacctgtggtttgctggcggaaacaagtgatgaggctggttagcggatgtgggaggctgtgaccccagggggccatagggtgcggtggaactgcaggccctgcagatgacggcagccagctgcttccaggaaccaggtgtccaaggccacctctgcaggggtttcctcttcagcctgcctggggtgagaggtcagtgcaccacagccgaggctggagcacagggagcttctgttgttctgatctatctctggaaaaccagccattcctcctccctgcagtcagaattctttgccctgtctgacctgaacttgcttagggagtcatgccactccccactgtggccatagtttctcttcctgtaaaattttattattttagttttttgtttttgagatgtagtctcaccctgtcgcccaggctggagtgcaatgccgtgatctccgctcactgccacctccgcctctctagttcaagcgattttcctgcctcagcctcccgagtagctgggattccaggcgcccgccaccacgcctggctaattttttgtatttttagtagagacgggattttatcatgttggccaggctggtctcgaactcctgacctcaggtgatctgcccaccttggcctcccaaagtgctgggattacaggcatgagccactgtgcctggccccttcctgtaaaatttttaaatggagaattgggtgcgagatgtggtttccagcctggtgcctggggtgctgtgctagtgagtggtgcagtccaggacacctttgctttatgtcacttacacggtcacctggagccggctcaagtggctaaagcatcctggggcccagagccaggtgatagtccctctggccaactggacagttgaggcttgtggttaacccgaagcccagctggggccttggtccagcttcgcttcccagattctgcacctgctagcacagctgtccacgtctgtgtgagctgttctaggccgagggcctcagtttcaagagtgtgttggggtgggatggggcaggccgtggtcctccagcatgaagaaggagccatgaggagttcccatgacctcccgagacttgccataagtgttctagtccacatataagggtagggttgggattaccatttactgaccacatctgtgaggtgccgagctgggtgcttgacatcatttgcttggagaagcagctgttagtagacccattttacaggtgagagaaccaagtctcacagaggcctgggttcaagtcccacctctgccactaactggcatgtgaccctatctatccttcactgctctgagcctagaccctggcccctgcctggctccctgccaggctccctgccacccctcacgacctctgatggtcgttgtgggggtctcttgcctggctcccagggctagggttagggctctggaggtgctttcactcaaccaagggggccacagcactggggagtgaaactgccccgcctcaccctgcgttgccctctgggtctgtgagggtgggctggcaggaggcctaggccttgccctaggggcagtcctgcttcctcattttatagatagggaaactgaggctttgggaggactcactgacatacctaccttcaagatgagttcaggtgggctcagttctggggcttgggaaaagggccccagtggctttgggaagcacccccagcccagggtgaaacatgcttcttctcttcctgtggttccatccgaaggattgtggtgagccccgtgccttcagttaataaagatttgtattgtgaaaagattttttcttttttttttgggacacagtctcactctgtcgcccaggctagagtggattggcgtgatctcggctcaatgcaaatctccagggttcaatcgattctcctgcctcaccctcccatgtagctgggattacagctgcctgccaaatttttgtatttttagtggaaccggggtttcaccatgttggccaggctggtcttgaactcctgacctcaactgatccgcccaccttggcctcccaagtgctgggattacaggcgcgagccacggcgcccagccttgaaaagatgtttttagaaccagaagaaacctcggttcccactgatccttctgggccacgttgtgcggagctcccctgctggttggggctcagcgcagccccagggaggtgcttcctgcacctcaggatgggcgagggtgggcattgggggagagggggacctgggacctgcggcttagttccctgaggcaggcagggcttattggggccatttcatagaaaggcagattgaagctcagcagggaagaagcttttgagggtgatccaggcgctggagggatggcctaggacaccagggtcacaccaggaacatgggagggccgtgcttgtctctagacgaggggaatgggggaagggccacaacctctgtttctgtgacccagcagcatcaagcccctcgctgggcacctcgcacacaccccctgccttatctctgcctgcacgccctgttccctccacctagactgcctgctgagggggcagtgccaggaggttgcctgtccttggggaagaggggcagtgaccctgtgaagatgcttgacagacaacccccaccacctcagaagtgtgtgtgagtggtgaacccttttaagccatcttccagccattctcactggagggagatttgatgggtacagagcagacccctacctgtctaccctccttcggacccctaggaagcttcgcaggccttccaggctgccagacagctgccctggcgttgccgtctgcttcttccctggccccactctgaggggctcagagctgaggcagaatccctttttcattcatttcctgcagaataaaacaacatacagaaaagtgaataaaacataaatgcacaacctaacacactgttaggaagtaaacgatctgcaaccaccatcaggaaatagttttgccagcacccaagtgccctcccctcacagtgtcacttccggcctctctgccctggcttatgtgagtcttgtgttcttgtttttctaaaaagtcttcagcacccaattatgcaagcattgcagtattttcctgtttctgtgctttatccccttgaatcatacagatgcaaattctggcagctggcttctttggctcgttattatgtctgtgagatttattcatgttgctgtgcgtagtatagtttgtgcatgttcattgctaaaaacttccattgtttggctgtatcgtagttcacagattcatttcactgtcagtcaagcttgtccaatgcatgcagcccaggatgcctttgaatgtggcccaacacaaatttgtaaactttcttaaaacattataaagatttttgtttgcgatttttttttttagctcatcagctatagttagtggtagtgtattttatgcgtgacccgagacagttcttccggtatggtccatggaagccaaaagattggacatgcctgctgtagatggacagttggtttgtttctagtttggggtaactacacacaatgctgctagcaacagttttgtccatgtctctgatgcacgtgtgttttttgcaaatggtgcacaaatttttctagggtttgtactcaggagtctgactcctgggttctagggtatgaagatctttctaaatattgttctagtttacgtgcccaccagcagtaaaacagaattcccttgccttcccatccttggcagacatttcacttttgccagtctggtggggtgtatagttatggccttaatttgcatttagctaattaccaaggagattgagcatatttttatgtttttattaaccattttgattttgtctcctgtgaagtgtctatcatcttttgcccattttttaacttgttgtctttttctttttcttttctttttttttttttt

SEQ ID NO: 109847 - DNA, 7138 bp, Homo sapiens
  misc_feature (904)..(904): n is a, c, g, or t
caaggccctcagaaaaggggtttccttgcctgtcatggccctaccctccaagctgtgtcctggatcttggcagtgtccccctgagcgccctggctcagacatctcctgcctgaccgtagctgagccacgtgcctttgtcctttattgcagcttcatggcggctgaagagatgcattggcctgtccctatgaaggccattggtgcccagaacctgctaaccatgcctgggggcgtggccaaggctggctacctgcacaagaagggcggtacccagctgcagctgctgaaatggcccctgcgctttgtcatcatccacaaacgctgcgtctactacttcaagagtagcacctctgcctccccgcagggcgccttctccctgagtggctataaccgggtgatgcgggcggctgaggagaccacgtccaacaacgttttccccttcaagatcatccacatcagcaagaagcaccgcacgtggttcttctcggcctcctccgaggaggagcgcaagagctggatggccttgctgcgcagggagattggccacttccacgaaaagaaagacctgcccttggacaccagcgactccagctcggacacagacagcttctacggcgcagttgagcggcctgtggatatcagcctttccccgtaccccacggacaatgaagactatgagcacgacgatgaggatgactcctacctggagcctgactccccggagcccggaaggcttgaggatgccctgatgcacccaccggcttacccaccacccccagtgcccacgcccaggaagccagccttctctgacatgccccgggcccactcctttacctccaagggccccggtcccctactgccacccccgccccctaagcacggcctcccagatgttggcctggcngctgaggactccaagagggacccactgtgcccgaggcgggctgagccttgccccagggtacctgctaccccccgaaggatgagcgatccccctctgagcaccatgcccaccgcacccggcctccggaaacccccttgcttccgggagagtgccagccccagcccggagccctggacccctggccacggggcctgctccacttccagtgctgccatcatggccactgccacctccagaaactgtgacaaactcaagtccttccacctgtccccccgaggaccacccacatctgagcccccacctgtgccagccaacaagcccaagttcctgaagatagctgaagaggaccccccaagggaggcagccatgcccggactctttgtgccccccgtggctccccggcctcctgcgctgaagctgccagtgcctgaggccatggcgcggcccgcagtcctgcccaggccagagaagccgcagctcccgcacctccagcgatcaccccccgatgggcagagtttcaggagcttctcctttgaaaagccccggcaaccctcacaggctgacactggcggggacgactcggacgaggactatgagaaggttgttcaaggctacaagcccccggggagagccccaggatggactctactgcatccggaactcctctaccaagtcggggaaggtcctggttgtgtgggacgaaacctctaacaaagtgaggaactatcgcatttttgagaaggactctaagttctacctggagggcgaggtcctgtttgtgagtgtgggcagcatggtggagcactaccacacccacgtgctgcccagccaccagagcctgctgctgcggcacccctacggctacactgggcctaggtgatggcagtccatgtggctgccaggccaaggcagtcacaggggccctgaccccaggccacacagacggacatgggcccacatgggagggtgagcaggagcaaggctgtgcttgcctagggcctctgtgatggacatctcgtaggacccagccagtctcatccagcaggttgggttctagggctgaaccaggcgccaggctccagaggacgaagggactctgttgccccacactaacttgccctgtcccaatcccagaaacccaggaccaagctgtgcctgggctccaaggacaggaacactggtccccccatcacactcacccctaagtgggctgggagccaggcagggccagggcagctgggtgggggccggggctggccctgggacccccaggaacgctaagacacaggctccagtaggggctgttgcctccaataaagcagcagtgagctttgccttggtggctggggcttgattgggaaggaggggattaccagcttactgggtgcccatgctgatgtctaagtggtgaccgcagcagtacccgggaaccccaacagttggttgtcttgtcttccagggtgcaggtcactgagtgacttccccagggtgcacagcgagtaacagatcaggacccaaacttgggcagtctgggctgggagcccacaccccactcaccagttctgctgcctcaggtcaggccagggcagtgctgctgcagagctagaaggccctgcagctacagctgcttcattccctgcattagtgcctggttactgggtacctcctgagtggctgtccccgttccagaacttgcatacactgagcgggctacagagctagaaggccctgcagctacagctgcttcattccctgcattagcgagcagttattgggtacctcctgcatgcctggtcccattccagacaggggcctctggcctggctgagttcacagcccagtctggggacagctgggtatgaggtgcttacggcacagtgtccagggcagctgggtgtgcagggactgggggctcccggaagattttttggaggaagtaacagctacgatgggatgggaacagtggaccctaagcaggccaagggtgcgtagggacggtggtacccagatgcccaagtcttccaggcaatacctggctcaggcccagccccaatccatccccttactttctgccatggagttccagcaggtcactctccctggcacaccttccaggctggatttttaatgaaacagactcagggaggtaggggctggcagggaccctagaatccttgtgatttttcttagcaccttatgtcagggaaacctaaactgaggtcagcacttgggcccactgacagtgactgactgggggagaaggtcctgcagcccccttcccctgggtgtgttctggggacctgtggtttgctggcggaaacaagtgatgaggctggttagcggatgtgggaggctgtgaccccagggggccatagggtgcggtggaactgcaggccctgcagatgacggcagccagctgcttccaggaaccaggtgtccaaggccacctctgcaggggtttcctcttcagcctgcctggggtgagaggtcagtgcaccacagccgaggctggagcacagggagcttctgttgttctgatctatctctggaaaaccagccattcctcctccctgcagtcagaattctttgccctgtctgacctgaacttgcttagggagtcatgccactccccactgtggccatagtttctcttcctgtaaaattttattattttagttttttgtttttgagatgtagtctcaccctgtcgcccaggctggagtgcaatgccgtgatctccgctcactgccacctccgcctctctagttcaagcgattttcctgcctcagcctcccgagtagctgggattccaggcgcccgccaccacgcctggctaattttttgtatttttagtagagacgggattttatcatgttggccaggctggtctcgaactcctgacctcaggtgatctgcccaccttggcctcccaaagtgctgggattacaggcatgagccactgtgcctggccccttcctgtaaaatttttaaatggagaattgggtgcgagatgtggtttccagcctggtgcctggggtgctgtgctagtgagtggtgcagtccaggacacctttgctttatgtcacttacacggtcacctggagccggctcaagtggctaaagcatcctggggcccagagccaggtgatagtccctctggccaactggacagttgaggcttgtggttaacccgaagcccagctggggccttggtccagcttcgcttcccagattctgcacctgctagcacagctgtccacgtctgtgtgagctgttctaggccgagggcctcagtttcaagagtgtgttggggtgggatggggcaggccgtggtcctccagcatgaagaaggagccatgaggagttcccatgacctcccgagacttgccataagtgttctagtccacatataagggtagggttgggattaccatttactgaccacatctgtgaggtgccgagctgggtgcttgacatcatttgcttggagaagcagctgttagtagacccattttacaggtgagagaaccaagtctcacagaggcctgggttcaagtcccacctctgccactaactggcatgtgaccctatctatccttcactgctctgagcctagaccctggcccctgcctggctccctgccaggctccctgccacccctcacgacctctgatggtcgttgtgggggtctcttgcctggctcccagggctagggttagggctctggaggtgctttcactcaaccaagggggccacagcactggggagtgaaactgccccgcctcaccctgcgttgccctctgggtctgtgagggtgggctggcaggaggcctaggccttgccctaggggcagtcctgcttcctcattttatagatagggaaactgaggctttgggaggactcactgacatacctaccttcaagatgagttcaggtgggctcagttctggggcttgggaaaagggccccagtggctttgggaagcacccccagcccagggtgaaacatgcttcttctcttcctgtggttccatccgaaggattgtggtgagccccgtgccttcagttaataaagatttgtattgtgaaaagattttttcttttttttttgggacacagtctcactctgtcgcccaggctagagtggattggcgtgatctcggctcaatgcaaatctccagggttcaatcgattctcctgcctcaccctcccatgtagctgggattacagctgcctgccaaatttttgtatttttagtggaaccggggtttcaccatgttggccaggctggtcttgaactcctgacctcaactgatccgcccaccttggcctcccaagtgctgggattacaggcgcgagccacggcgcccagccttgaaaagatgtttttagaaccagaagaaacctcggttcccactgatccttctgggccacgttgtgcggagctcccctgctggttggggctcagcgcagccccagggaggtgcttcctgcacctcaggatgggcgagggtgggcattgggggagagggggacctgggacctgcggcttagttccctgaggcaggcagggcttattggggccatttcatagaaaggcagattgaagctcagcagggaagaagcttttgagggtgatccaggcgctggagggatggcctaggacaccagggtcacaccaggaacatgggagggccgtgcttgtctctagacgaggggaatgggggaagggccacaacctctgtttctgtgacccagcagcatcaagcccctcgctgggcacctcgcacacaccccctgccttatctctgcctgcacgccctgttccctccacctagactgcctgctgagggggcagtgccaggaggttgcctgtccttggggaagaggggcagtgaccctgtgaagatgcttgacagacaacccccaccacctcagaagtgtgtgtgagtggtgaacccttttaagccatcttccagccattctcactggagggagatttgatgggtacagagcagacccctacctgtctaccctccttcggacccctaggaagcttcgcaggccttccaggctgccagacagctgccctggcgttgccgtctgcttcttccctggccccactctgaggggctcagagctgaggcagaatccctttttcattcatttcctgcagaataaaacaacatacagaaaagtgaataaaacataaatgcacaacctaacacactgttaggaagtaaacgatctgcaaccaccatcaggaaatagttttgccagcacccaagtgccctcccctcacagtgtcacttccggcctctctgccctggcttatgtgagtcttgtgttcttgtttttctaaaaagtcttcagcacccaattatgcaagcattgcagtattttcctgtttctgtgctttatccccttgaatcatacagatgcaaattctggcagctggcttctttggctcgttattatgtctgtgagatttattcatgttgctgtgcgtagtatagtttgtgcatgttcattgctaaaaacttccattgtttggctgtatcgtagttcacagattcatttcactgtcagtcaagcttgtccaatgcatgcagcccaggatgcctttgaatgtggcccaacacaaatttgtaaactttcttaaaacattataaagatttttgtttgcgatttttttttttagctcatcagctatagttagtggtagtgtattttatgcgtgacccgagacagttcttccggtatggtccatggaagccaaaagattggacatgcctgctgtagatggacagttggtttgtttctagtttggggtaactacacacaatgctgctagcaacagttttgtccatgtctctgatgcacgtgtgttttttgcaaatggtgcacaaatttttctagggtttgtactcaggagtctgactcctgggttctagggtatgaagatctttctaaatattgttctagtttacgtgcccaccagcagtaaaacagaattcccttgccttcccatccttggcagacatttcacttttgccagtctggtggggtgtatagttatggccttaatttgcatttagctaattaccaaggagattgagcatatttttatgtttttattaaccattttgattttgtctcctgtgaagtgtctatcatcttttgcccattttttaacttgttgtctttttctttttcttttctttttttttttttt

SEQ ID NO: 109848 - DNA, 371 bp, Homo sapiens
ctctcactagcttccgtgttggggagttgctggcacaagttcatggccctgcgtgcagcagaaaccagaggagtggacctccctgctctgtcccatgcccagctggcaccctggctggccagggctctgctgggctgcttctgtcagcctcacggcagcccgacgtgctcagctcctgagacctacaacagcgagaggacagaaagccaggcttgggagcggggcgggaaggtccgtgtgaaagctgcccgaggaggactcacccgctaatatgactgtcttattttaggttgttcaaggctacaagcccccggggagagccccaggatggactctactgcatccggaactcctctaccaagtcggggaag

SEQ ID NO: 109849 - DNA, 494 bp, Homo sapiens
gctcctcatatgctattatctgtcagaatgtgaaccatagatctgatattgcaaaagaaatgtgttttatgcaactttattaatacatttatttaatgtgactccatattcaacagaaacaatccaagatactctcttatttataatagaatacttacttcttttgtgctttctttatggacatagatacatttttcatgataaaaacctagaataaaaattacctttgtttttaaaatctggcaaatcatttcaaaatgaagattttaaaggaatttaaataattggacatgttaacaaaattatctgacttactatattgacaagaaatgcttttacttggttgaatgcaaacagaattgctttgtttcttaaatcagtttaagatatgaacaatgatttcagacagtaccaagtcctagtaacttagaagaaaagtagtattattaatgactgaagccatgtgaagacataaatgattataaaatacaatt

SEQ ID NO: 109850 - DNA, 866 bp, Homo sapiens
gaatgactttggaaaatttacatgaagctcaagtgttaggattgacttatgaaaataaattttatttctatccaaatttgaatgtccaaaccattttttagttacttctttctaatcctagttattcagacaaaatttggaaacttattttatgaccacatctaatattctggctgctttggatacaatactcttgatttatgataattagttaaaatatattaaaaatattattagtaaaataaaatttcacacaataaaaaacaacatagagtacacatatttatatgtatttttaaagataaagaatatctaaaatgtgtttttttcttagctttttagttgtctagaacatttagagaaagagtatgaatatattaaatccacaaacacactatatacttcctcaccactgactattttatcaaatttgccttaaaataatgaaaaagaaaagtatagttaatggtttcaaatatgctaagaaattgactctgcggaggggatcttaaaatgcctgtttactcatgttttcgtatttttcttgtctctaatacttttgtctttgtctgccttgtgtgttcttttctgaatttcatttcagcaatttatgctgctaaatagaatcccgcatgtctgcattcatttacattcaacttattgtaaattttgagattttatttagaaatgaattgtctaattaatttatgtagagtccttttttccaaagagctcaaaacactacatccacattattgacttttggaaaccaaccaaattacttaagaaatggaaaagtagtcacagagaaatttagtaatttgcaaaagccacaacagtagtggaagaattaaaattcataaagt

SEQ ID NO: 109851 - DNA, 782 bp, Homo sapiens
tcagccatttgctatgtttatatttaacaatatgaagccacactggaagcactgtctcaagatttatttcagtaaataattacttggcaagtaattccttactcaaagacaatagttgttaaattctctcaatcccactaaagagtttataaaagtacaacacaaatatacagtataggggttttgttaaaacttctcatgtgatctaacttttatctcattaagaaaacagttaatatatagttttagaaatagctgttgtagctttccagctggtgacatgtggtgctggcattgatctgacttgaggcatcatgctgccagttcacagaatggccagaactggggcttagcactcttcaattctggccaagtgggctcctgctagatctttgtttctgtgtccagcacattttagaatttttgtaacatgaaggccttagtccctcccctgttgctggatacaattgcccaactaatcacctcagcaatgaaaacacatggaccaatagagggcacactttgcattcttttccctgtgctttgttctctgaaattttgtgggatttgtgcttcctttgctttgccctattggttcaggggcgaaacctgctctgctccccccatggacactgtggtcatcttgatgtcatcacagagagaacaaaggaacaaataaaaagaactttcagtcttactgagcatttcttgttttgatcgctaatctccttttgacaagacctcaccaagaggcaaactgaaccaacctcactgttttagta

SEQ ID NO: 109852 - DNA, 475 bp, Homo sapiens
gtctagtaagtccaatgcctgggcttcctcatagacagtttctattaatttgtctttttttcctgtgaatcaaccatattttcttgttttcctgcatgcctcataattttttgttgaatactagacatttggagcactgtaatgtggcaactgtggacataagattctcctccttctccatggtttgttgttgctgttttttataagttgttgttgttggcttatttcatgacttttctaaactatctgtaaaatctgcatttttttcttatatgttgccactgacatctgtgtcttattaccatagtggttagctagtgtttgacagagttatcttaaatgtctgaggaaaaaaaaaaaaagaaggaaagaaaggaatgaaggaagcaagaaaagaagagaagataaaagaaatatttaaaaagaaaaccatgggcgaggcatggtgactcatgcttgtaatcccagcacttcg

SEQ ID NO: 109853 - DNA, 329 bp, Homo sapiens
ttaataatcagataaaatgatatagatgaatattcaatgacacgagaagatatttataaatattttattataaaaactattttaattggttacattatatgtcgctatgccttcagagtagagagaagtgacagtttcaacacaaactgaaaaatttgtaagataatggctgctatttctaggcctgtaaaaattcatttacccaaagaaaatcatagtttttttttttttttctggagatggagtttcgctcttgttgcccaggctggagtgcagtggcgcaaccttggctcactgcaacgtccgcctcccaggttaaagcaattctc

SEQ ID NO: 109854 - DNA, 423 bp, Homo sapiens
gcttcagtggtgaaatatgaaactatagacggactgcgtttcaagaaggagaactgctgaataagtgacaggcatttcaggcagcgcccgaccagatggacagctcatgagtcttcttattttctcaaatattggcaatgggaaaccagattttgctgatctaaagcttttggagactctctgagcctgttccacctccatgctgtcccctggatgccgctattgtccggaccagttagctttgggacagaggttcagctttggcctcttggatttccagagtggaggatgcctgaatcctgaccacagcagcaggccgcccttatccttaacacatcagcatcagggaacgacatctgcagagatgttcagtgccctcagaattggctctaggaacccaaagtaaaattctccaaactgatg

SEQ ID NO: 109855 - DNA, 687 bp, Homo sapiens
aagttggcagtttatcccaacaataagccaggagccagtgatatgtctgatagtactaattatttccaaatattgggaatccagcatgaggcagagtgtagaaagagacattgagttttatttaactgaatttttccatatatttttgatcaagaacactttgggaaatgctactttaagattaccattcattttcttttcccctcacccccttccttggagaaccatcaatgctcacagttccagctgccatcttagtgctaaagtctctcttgtctcagcgcaagcccctctctaccccagctctaggacacccctgcccatagcacaccttcacctagatggctcacagtggggcagagtaggaatctacagaggttcagaggaagttctgaattcattaattcttcattcaacaaatatgaaaaaatgaaactgatggaatggaagaggctctacttctgcaatttttattaaaccaccttgagaactgaaccccaaactcagtgaatctttggttcctaaaggtgtagaatctttactgatctattgccactagaaagatagtaacaacaacaacacaaatctctagtacaccagtgaacaatgaaatcccagtacacctgggaataatgcaatctaggtttaaataatccccccatcatttattacagcatgacttggaca

SEQ ID NO: 109856 - DNA, 375 bp, Homo sapiens
ttgcacgcacatcagtctattagcttattttaccatatcaaaagcccctacacagacaatttttttttcactcctactgtatatgtatgtgtctgtctctatctgacatactgtacctaggaagacaaggatctataaaaagtttgataaacatggtactaacaagaacaacttcatgaatcggtaactttagggtcataatgtttccagcaagaggaaggtcattaatagtagtggttaaatgtttatttaaataagactattccagtaactatgttggaggatggatttgagaaagaagatcagatagggcactaatttaacaatccaaaggatagactaggaagtaataggaggcataaaacaatggggatt

SEQ ID NO: 109857 - DNA, 366 bp, Homo sapiens
agccaatgggaacactaaggtcctgccttcaaatgggatggtcttgctacaattcaagtccacagattcaggttgcaccactggaaatgatatgaactgcacccctcctaccagattgctgagacacatgactgagctcaatttgtatagtactccgttttagcctgaatctttgaattgttttcctcctgatggtgctacaattcatatagaaattaactgtatattgctcatgtttgtggctggctctgtagttccaaccacccccaccccacccccaatattgttatagctactagaaagtaagccaaatgcactttctgagattgtcccaaatatctgttggtcaggtaacagccattataa

SEQ ID NO: 109858 - DNA, 397 bp, Homo sapiens
cacagcccccatcccacacctgcctctcatggggcagctccaagtaagcagctccagagtaagaagcacagagttttaattattaagacttacaaatcgcctgagtggcacctgggagagcagttcgtttaatcatttataaaccttttaatccccccattacaaaaaggataactgttcctcataaactgagaacaatacagaaatgcagggcatggagaggggaagtcctacattatctggtccccacctgccgtggcatttccaccttgaaatgtcatgtgactgctaaatggtgtcatgactgcattcaagaaccctcccttccccaggcagataaggctcttagacatcaaggactgtgttggaaacgaaccaaagcaggggttcttgaact

SEQ ID NO: 109859 - DNA, 347 bp, Homo sapiens
aggaggaaaggcggaatagctggagcaaggggatttttaggccagtgaaactattctgtgtgatacagtaatggtggatacatgacattaggcatttgtcaaaacgtgtggaactgtgcaacatgatgagtgaactctaatgtaaactataaactttggctaataaggtatcaatataattttgtagcaaatgtacaatacccgtgcaagatgtcaataatagatgaaactgcaactgcatgtggtgaggggaggtatgtgggagctctctgcacattctgttcaaattttctgtaaacctaaaactgctctagaaataaagtcaattaattttttttaaaaaaggt

SEQ ID NO: 109860 - DNA, 276 bp, Homo sapiens
agaagccaaaaaaagagagcagagtagctatacttaatgtcaggtaaaataggtattaagataaaaattattaaaaagagacaaggtcattatataatgataaaaaggtcagacaatataaaaattatgtatgtgtgtatctatctatctatctatctgtctccacacatacctaacactggagcacccagatatataaagcaaatattatctgagctaaagagagataccatcacaaagaaggcaagaaaacaaacaaaaacggaaaagagccag

SEQ ID NO: 109861 - DNA, 130 bp, Homo sapiens
aactgaatgaagccaacaagtaacaacataaaggctaatgtgtggtttgttgtgggtttctactgcttttattccttaggaaacaaattactctctcatatggtttccctgactccattttccctaatca

SEQ ID NO: 109862 - DNA, 733 bp, Homo sapiens
tgacctagggaaaaaaaggcatgtagagtattatgtttatactttaaacttgatatttttagtgtattatttaaagataaaggttcttgggtttaaaatacattagaacttaatgcagacatataaagtaacattgagaatgacaactaaaacattccattgttatggtcctgaattttttatgcttcatttcatgtatttattctttgtataattatagcatacatgttatgtaatataacttatgaaaagtacagtgaattttgctttattgcaaagctttaaatataaatttcagagtgcttcagtaaaaagctactatatattgttgtttgttattgtgtaggtaatattttcaattatgaaagtgaaatgcaaatgtctgttatctaactacaaattgtcagatttcttaaaaggacactgtcaggcaaatttgaaaatatacacattgagaataattttttattattatatcctattttaatattaacagctattatgaacaaaatttttcctgttaaatagcgacttcagtattgtgttatgttttacagcgttaaaacaactatgaagatctgcagctattcttttacttaacatgcatatgtactacagagggatttttaaattaattgcaaaatgtgcattagctattgacttagagtgaattgccttttgtatcctgattcacaacacctattcctgttcagtattctttgtcttgaataga

SEQ ID NO: 109863 - DNA, 207 bp, Homo sapiens
ttgtgggtgactctagacgatctttggagatcaggataaggagaacatgactcagtgtcactagataaggacttggtagaggcagagaagagtggagaatgagggcgggaaggaaagtgaagctgttatgtttagggtggttgttcattagttgcttgatgtaaagttatgcttgcctccttaggtcccagaaacacaggcctgggt

SEQ ID NO: 109864 - DNA, 460 bp, Homo sapiens
tcttgctgaatcactaaacctgttctctcctagaaggctctttattgggacctgacagatcacctctccagagccttcagacgtcctagctctctaattcttctccataatgagttttgtgctgcatgataaaatattcatgttcaaataggttctaaactaattatctgtggccagcagttgccactgcagtcatttgctgttagcttggctcaagttaatggcttgtatttcagtacaaatagtcccttctggctgtttcctgtcctgattcttatcctaaatggaatttccatacatatctagagttaagtcttcttcttttgaaaggagattttttgccctaccttttttcatctcattttattaagattagcttattttagtgttcagttccttattgtttcttatccatcttaaatcctacatccctgccaaattcatgactcccacactgtcc

SEQ ID NO: 109865 - DNA, 357 bp, Homo sapiens
tccttaaccctcataagttcatagttggggacagacctttgtgacaaatgacagattaacaagcgaaaaacaagcaggtgtatattcacgtgtgcagtgcacatgatgcaggagaaacctcagtgagaagtaattcaaagcagtggcttagaacacttgcctatgtagcatcttcaacaaagagcaatgaattttccagaagtgacaagacaaagaaaagcaggttaacacttctaaaggtggggaactatgggaaggaaaagtaaatatgtggcagtaaactagtggagtaagatttgtgatccctctggtgccatatctgagttgataagttgtctccagtaaaggagaatttat

SEQ ID NO: 109866 - DNA, 573 bp, Homo sapiens
gaggaaatcaaaagggaaatttcacactgtattgtaaagagaggagacttttatgccaaaatacagtaagtcttttagtcagataaaattaataatcttaaattccattcatgttaaagaagaaagacaattaagaaatctgacactaatcagaagaaattagaaaacgaataagtaaaagaatctgaaaaggagaaataaaagcagaaattaatgaaacaaaaaattctacaagggataaacaaacccagatgctggttcttttattaataaaaagaaaacaaacagtgaacaaggtaattaataaaccgtaatgcattaagttaaaaatactagcgaaaatatacaagatgagaaatgagaaaggagaaataaaacacaaatacaggatatactacaagaataataagagaatcttatatggctatctatggcaaagagaaaagaaaaaattagagtaaattgatgttttcctagcaaaattatctcaagaagtggaaaaatttgattaattgattgtttttgaaagagactaaaaagttattaaagattcaccattgaaaagacaccaga

SEQ ID NO: 109867 - DNA, 347 bp, Homo sapiens
cagaaatgaaaaaggagacattgcaactgatgccacagaaatacaaaggatcattaagtgactattataaacaattatacgccaacatattggctaacctgaaagaaactgatagatttctagaaacataacaagactgaataatgaagaaatagaaaatctgagcagacccataagcagtaaggaaattcaattagtaagcaaaaatctcctagcaaagaaaagcccaggaccacatggcttcattggggaattctaccaaacatttaaaggagaattgataccaattcttcttaaactcttccaaaaaatggaagaggaaggaacacttccagactcatttaatg

SEQ ID NO: 109868 - DNA, 335 bp, Homo sapiens
ggaaaccgaggctctggtgccttggctaactcagggtttaggtttaaagccagatggactggtcttcaaagcccggctgccctgcccctgccagtccttcctgggccacacagcactggcttcatctctgcttcctggaattggagaggcttggctggtccttccgtcctcactcgctccctgagctgtgtgggctccccgggcctcagcagccggtgccaactcagctctcactgtcacctggtgtcatgcgctgtctggccgggtcccagcaaatgcccaggaggactctcagctgtccttgggtgggtacagccgcacggccaccaccggcc

SEQ ID NO: 109869 - DNA, 662 bp, Homo sapiens
ggaggacaggctggcagaggagggaggagggtttctagctgagagagactgcggctgtgggcctgcagcctacccctcttcaagctctccggagccgttcctgcgaaaccagcccccacaaataaggaagctgggattcagagaaattaagggacttggtgaagcagagaatgccaagggaattgattcagtagtggacggggagtccctgaagactgttgagcagtgaagagacctgatcgcatactaaaaaagtacatgcaatggcaagaagatcaactaagagattcttcttatgttgctattttaaactcctgaactcaagtgatcctcctgccttggcctcccaaagtgctgggattacaggtgtgagacactgcaccctgcccaagcacctctgctccgtgccatgctcttggctaattggagttgtgaaaggcatgaggattctggtcatggactcagctctcccatagggttctgacaccaaagcaatggtcacaacagtgaaaggaagaatccatctggccaggctcaggtggttcaaggccttcagaatctgccttgagactctcactggctttagactgaaaaccatcttggccccgtccatccgtgtaagcaatttaacgacagcttgcaaagcaccgagctttaacaga

SEQ ID NO: 109870 - DNA, 342 bp, Homo sapiens
cgatcgagccggtcggggcacctagtagaggagctgttggcattgaagggtctggggccgtctgtggactactgaacaggacagggaaccctctgttaacacacacacacacacacacacacacacacacagaacctgaagtatttgttgcaagttgcagatgtttacagttactgctaaggatatgtgtttccatttaatttacataaaatactgttcattgaattgattttatgactcacattatttcatcatgcagtttaacaaatactgagcactggtgtcacagaactttgtcgttcatgctctttagcaacagtcagcttttctgctcatgactga

SEQ ID NO: 109871 - DNA, 374 bp, Homo sapiens
gtgcaatgtatttgtcaaggaaaagctaaaggcattctaaattagcttggctctcgcaacaagactgtgatgtatcccctcctacccaaaataaaaattatggcttggacatggtggctcatgcctgtaatccgagcactttaggaggccaaggcaggaggattgcttgagcccacaagattgaaaccagcctgggcaatatggcaagatcccatctctacaaaaattgttttttaaaaattagccagacatggtagcatgtgcctgtagtcccagcacctcaggaggctgaggtgagaggattacttgagcctgagagattgaggctgcagtgaaccatgatcgtgtcactgcactccagcatgggagagagt

SEQ ID NO: 109872 - DNA, 310 bp, Homo sapiens
tatccactggaatccacccaacccagaaacccttcccaatccccgccccaacatccacctccagggtcttctgcaaccactccatcccatgccggttccctgcctgcctcgactccggtggtcctaaacgtccatgggatttcctggcacttatttgctcactgtcttgccttgctacttaacgtcagatggaggttcaagtggtttccaatggggagaggtgcatttcacaatgtctggagacatcgttggttgtcacagctggggtgatggtgctactggcgtctagtgggtagagccccgggatgct

SEQ ID NO: 109873 - DNA, 801 bp, Homo sapiens
ctgagatcggttgcttcattagttgttcaaaaaatatttattgagcacttagaatgtgcaaaacactatgctgcatgctgggataagctaaatctacaaggtcccctgccctcatagaatttaccctgtttctttaatacagaggtggcaaaggattggccacatctgactcacagccatgttttattttgcttacacagcatcagaaatgttttttgagcattcacaaatgagaatattcatctgaatacctatatttccacctgctttaatatacatctggccaccctgggcctttattttcccatggcattctactcgtaaaagcagctgcccctttttgataggactacatgtaccggtttgcttccattctctaaaaatccctgaaaccaagaccaaattcaacaggcatttattgttacaattgtactattcttttttcttataaaatagttaagatgagctgcatctttaggcatctgagtttgtgacccatgcatactgattatagtcagcctgctaattatctcatagcctctagaagaagcagaagagaaaaagccttacttacatacttcactttcaacaaaaacagtagtagatatgcacattgtaatactactcctcaaattcattctaacaaaatgatatcgaatccagatttataaatgtaatgatagttctgatgtaacatttgatatttattgttgtatgttgtcatagctgtgtgaattggcattttccagcttatttcaatattgctgtagtaaaattttgtttacaatcagctaacattta

SEQ ID NO: 109874 - DNA, 203 bp, Homo sapiens
ggcctatatcttaaaattcttcacagcctgagcataaagcaaataccctgacacaaagaatttaaaaagtctgaacaaacggatgaatagatgaacaaatggatgaatagatgaacaaatggatggttgaatagatgaataaacggatggttgaatagatgaacaaacggatggttggatagatgggaaacaatttaaatggc

SEQ ID NO: 109875 - DNA, 148 bp, Homo sapiens
agtagcacaccagacagaggaaaacattaaaataaaaataaaaatgtagtccaataaattgtggtttctggggcctgatttgatggcttcagccaattcttaaccacagcccaagaagatttagtcaaacaagttaattcttccctcg

SEQ ID NO: 109876 - DNA, 342 bp, Homo sapiens
actgagggcacagtaaaggaggagggagacaaattgtgaaaattacttatgtccactagttttactttaataaatcctgcttaaatactcagaatttatgaatacaatttatgatatataagtgggatattttaggtcgcccatttaaatttatataatgtctataaatggtcaattttatactataatattcattaataagcataagaaacatcatcttgattggtcatttgctactgagtcccaagtaagtagcttgatagaaactgcatttttcagaaaatttgcttattttattctttgtatttgtgaattctgttctgatgttgttgcttgaataaa

SEQ ID NO: 109877 - DNA, 1021 bp, Homo sapiens
gtgcagctgccttggcgaccatttgtcctacagtttgtccggacccaggctgtccttctgtgtgctggaatgaggcgaacatgtctttgagcccagcagggaggaatcctccagcctattcctcgctggtgcatcaggtcgttggcgggccctgacacacaacaggaacgtcggagcaggaggagtcagtggagccatcaggacacccaggcccatggggcaggaggcctcggtcaccacaggactggggcggaagacgagaggcggccggccgtgagggaggcgccctccctccccgcgcttacgtcgcgcggccatgcggtttgggacaggacacccctgagagtgcaggcacctccccctcccgcccctccatccctctgggggctggcgcctggccccccacctggtccccctgggcaggctgaattggggctccctgcagggcggtcccgatggccgggcgtgggtggggcgcgctgtgggtgtgcgtggcggccgccaccctgctgcacgctggcggcctggcccgcgcagactgctggctgatcgagggcgacaagggcttcgtgtggctggccatctgcagccagaaccaacccccctacgaggccatcccacagcagatcaacagcaccatcgtggacctgcggctcaacgagaaccgtatccgcagcgtgcagtacgcctcgctcagccgctttggcaacctcacgtacctcaacctcaccaagaacgagatcggctacatcgaggacggcgccttctcgggccagttcaacctgcaggtgctgcagctgggctacaaccggctgcgcaacctcacggagggcatgctgcgcggcctgggcaagctggagtacctgtacctgcaggccaacctcatcgaggtggtcatggccagcagcttctgggagtgtcccaacatcgtcaacatcgacctgtccatgaaccgcatccagcagctcaacagcggcaccttcgccggcctggccaagctgtcggtgtgcgagctctacag

SEQ ID NO: 109878 - DNA, 611 bp, Homo sapiens
tatttaaaacaacagcacaaggggcgtcaaaccacctgctaaattggaggcaatgttatcctctcccctcctcccccggccccggatattagagacaacaacacagaggtgatgtacacccactgctttattgtgagtaatatcatcctctcccttcttggatagtaggaacagtatcacactgtgcgtgtaggcctgtcgcgaaattcaatggaatgtcatcctgcgcctccctggatatgacgaacaatatcacgggggatgtacaacttctgagatattgggagtgatgtcatcctctcccctctggaagttagggacaatatcacaggggtagtgtacaccctctgggatgttgggactaatatctcacaggtgtctgagaattcctcctcctgggactctcagaggatccagaactgcagccggccctcgctttgctgtccctgtccctgtccatgtatctggtcacggtgctgaggaacctgttcagcatcctggctgtcagctctgactgccccctccacacccccatgtacttcttcctctccaacctgtgctggcctgacatcggtttcacctcggccatggttcccaagatgattgtggac

SEQ ID NO: 109879 - DNA, 400 bp, Homo sapiens
gatctgcacaatagtaacatctctgcatggcagaaatgtcatccaagttaaaggtgacaaaaagatacctttcacggcaatgcagaaaacactgaccagtcacaaggagcaggtgagcagcgtttagagtgcgctgttgcggccaaacgcccgaaaacaggcctcattcatggcgaaggaagcgcaaagcaaaccacggtgctcagctcttcccacccacagaccgcacgctggaggcggggaccactgtcaccggcgggggacccacatcaggcaccaccctcgacatgcaggacgctggctcctgaccagcagtgccatgtgcagaccctgcacacgcctgtgcacacatacagaccccgtacatgcctgcgtgcacacgtgcagaccccccacctgc

SEQ ID NO: 109880 - DNA, 613 bp, Homo sapiens
gccctctgcgcggtcgactctaacgatccctaaaggcgagtcagggtaacaatgcagtaatggtacagaggaggaaagatgcaggcttgtgcggtcttgggatacctggaatctactgaagactgacttgcaggcagcaacacgtgccttagaaattgcatccatggctgaatctttacttcccaaggattctttttgcctgagtaccaggctatggttctgcatcagggtggtctatatatgtgtttacagcaaggccctagtacagtagctgctaaactatcttctgcagagtcctagggtttctggagttatcttaaaggcatccatagcacctgcaaagagagctgtttgacttttgtcatatctttaagttctacataagattttgtttggagaagaggttcattcggagggaaggggaaaaaaagaaaatgtgaaaacacactaattttatagagaacttatgctgaaacccaaagaaggagatggacttacccagggtcaaaggcggcatagcgacagagcaagcccctggaatgcagactttaaaaaacttaagtggagagaaccggataaggcaccctatgtataacacccagatccaacatga

SEQ ID NO: 109881 - DNA, 219 bp, Homo sapiens
ggaatagtcaaggaattaataactggtggacaagtgagggattttacagggggttgagaggatgggatgaagtgatggtgatgggctttgagaagctgcccgcacatcctgggttgaccacagggcactcacatgcacaacagagataggagcatagtcctggtcttcagaacccatgtgctcttttgtacccagcagacgtgagaggtgagcaaacct

SEQ ID NO: 109882 - DNA, 462 bp, Homo sapiens
tcctataatactgtcttaatttagatcctcaacgtcaccaacctcgaccagctaccagaaatgtccttcttacattcatcctctcaacagccacctaagactgaaatctgacccaacagcatttaaggatctccctatttgacccctgaatgtagtccctgcttccacgtgctgcatacaaatccccccagtggtctctgcttgccccacaacctcatcttacactgctctttgcctttcactttatgctccaagaacactaaactgcctcactttttcttgtgaatgggtctatgtatgctcaggctgttttcaccatcggtaatgccattttctacccttcttcctatttacctagtaaccactactttattgtttaagtctcagcccagaagtcgactactccaaaaactctccctgaattacatttctccccaacgctctccatataatctggattaa

SEQ ID NO: 109883 - DNA, 391 bp, Homo sapiens
agatagattaagatatggaacaagataacaccaggctgtggtaagcaagactaacccccagtgatcctcactcttgtataatactctcccctttgagtgtaggtgaaacctgtaaataggatgaagatatcactcttgtgattatgttatgtggcaaaaagagactatcctggtgaacgtaatctaatcacacataccctttaaaaacagagagttttctctgtctggtggcaaaagaattcagagatgcatgaaagagggtcaatatgtcattgctggtttgaagttggaaggaatcatgtgagatgcaaggcaggcagcctctaggaacagagagtggcctcaggttgacagccagcaaggaaacgggaacctcaaactcacaaccatg

SEQ ID NO: 109884 - DNA, 863 bp, Homo sapiens
ggaggcgtctagaaagcgccaggctccttcctcctgcgtgagccactgcaagctgtcggcgcctcagtgctatggagaccttgggtggattattccttgttggcggggggagggtcccagctgtcctgtgcattataggatatttagcagcatccttgctagatgccatttacaacaatcaaaaatgtctccaggcattgctaagtgtccaggtggggagcggaataggcagaaccgcctccagtcgagaagggctgaactgtacttaggatttgtgattctgcagaaatgggttctgtgaatgcactaaagcatgagaacatccaaaaatcagtgtggcacagaactgaattcaaatttacctggatccaggtaaataagcacaattttgaaagtaccaaacagaattcaagaaaaacaacaacaacaacaaaaaacacattaaaaacagaaaagttggccgggcgccgtggctcacgcctgtaatcccaacactttgggaggccgaggtgggcggatcacctgaggtcagaagttcgagaccagcccgaccaacatggtgaaaccctgactctacaaaaaatacaaaaattagccgagcgtggtggtgggtgcctgtagtcccacctactcgggaggctgaggcaggagaatcgctcgaacctggagggcggaggttgcagtaagccgagatcgcaccattgcattccagcctgggcaaaaagagtgaaactccatatccaaaaaaaaaggggggaaaggtcagaaagacgttctttttcactaggtgatgaattaatctttcccatctttgtcatgttaaaaatgtgcctgtggctgtttctccactaaatgaagacact

SEQ ID NO: 109885 - DNA, 719 bp, Homo sapiens
aacaaggaaaatattttgaaagaatagtaactaaagggagaaaagccaactgtagtggcttacacctgtaatcccagcactttgggaggctgaggcgagaggatcatttgagcccaagagttgaagaccagtctgggcaagatggtgagaccccatctctacagaaaatttaaaaattagctgggtacagtggcatgcgcctgttgtcccagctattctgaaggttgagatgggaggagttcccttgagcctaggaattcaaggtggcagtaagctgtgatcatgccattccactccagcctgggtgacaaagtgagaccccttctctttagaaaaaaaaaagaagaagaagaagaaggagaccaattcaaaagcaatgattttagcaaaaaaaaagaaagaaaaaaaaaagaaactagactaaggcactgggagaatggaagtcaagggacagatttgaaagacctaataattaaagatttgacaggactcagttactaaatgtgggaggaatgagaaggccttgcctgaatcattgggtctcatttagattggtaatagtaggtctctccaccagatggcaatgatgctcttttcttagtttttaatttgccatgctaagagatttacaattacagcaatttaaagatcagatagatagacaagtttctaacaactgccagagaaacttgctaaacaacagtaaaaagcctgaaaaa

SEQ ID NO: 109886 - DNA, 268 bp, Homo sapiens
aggtaactcttaggcttatggccagatctcaggtcttaactactttcctgtggtctaagcaattcttcttgcattgcctgtgaaacccactatcctaccaccagttgcatgtggaatgtcccctgtgggtaaaggtgtgtaacctacagcagccttctctccaccccaatctcatgctgccacctcctttcttcccttccacaaattctctcgtacccacctggcttcctagctgttccccaataaggccaagcatgccacccactca

SEQ ID NO: 109887 - DNA, 369 bp, Homo sapiens
aagctgggctggagtggaaatgagaggatctcttccttttccaaatgagagagctggagaaagaagaaactacctttgcttgaggagctgcacaagggctctgaatattccctataggctcgatatctacaaactgcaccactgctctggattcagagcagtagcatttctagtttgagtttaagatctggcagcacatggcatttgagagtcttcatattttggagacccagcaggaagtggtagatgacatggactctgatgacgctgtttctacagagactatctgtggacaactttcagatttacactttttataaactctaagaatatgatagttctttttttcaaaacctcttctagattttt

SEQ ID NO: 109888 - DNA, 474 bp, Homo sapiens
gacgagggaagcggacggaaagcaggagagaaaaactgaggttccgatttgattgagaatgaaccctctctcgggaggaggggccaggtagtttagtttggtgctggtagtgctgagtttgagaagctgaccccaaaatctggtcttgaccgcaacacggagtggggcctgagctcctcggtgcagccccagctccgctactcgctgctgaacgaccttggacgagcccatgtctaaatcagacttgataaaggagtcgcctctaaggaggaactgggatcccctccttcccaggctggtgctcgggagggtggaggatggaaggagcgggtccttcccccagggagctcggggtctacagcagggcggggaagcggcccttccagaagaggcaggagagggtcgctccctcggccagcctcgggccgcctgggctttactgggaaaagcagccgaggtcctggaagagtcgcg

SEQ ID NO: 109889 - DNA, 470 bp, Homo sapiens
gcaaagtcataagctcatgttaaggtttttcaagagtctgcctcctactacacaaaggaaagcaagggaaaggaaatgaccctggcaaacagtagggaagggtgtattcaaacatttcattttcaaaaccttcgggttagaataccacttacacatgtattctgagagacagaattcatgaggaactcatctctctttataactggaaacacaccagcttgatatattgctaatccatactaaaatcatattattgggttttttctgaatcaggcctgtattaatggtacagtatttattcagaatggaattctaaaattactaacaaacttgttgaaaatttgaatacctccacaccaacctaaaaatggaccttaagttcctagaacctctgatgttcttttaaattaatggaaaaataatttgtgaactgtatatagagagtgcattcataaatgtgattatgtatt

SEQ ID NO: 109890 - DNA, 311 bp, Homo sapiens
gtcgcatagccaaggctctaatccctgcccttagtcacaaaaacaaaactgcttcaatctccctattccactccataatattcagcacatcataagtcctgccatttttaactcctaaatatttttcgttgttttcatccctattaccacagccccaattcggacccacatcagctcttgcctagacaatgatcacttcctcttgatgggtctgactacatctagcctttctctagttaagcctgtcttagatggtggtcaaagtgatatgcttgaaaggctgcaagtcttcttgttgactatcagacact

SEQ ID NO: 109891 - DNA, 352 bp, Homo sapiens
taattatgtaataacttaaacaatgtcataaaccttcaaatcagtttaagtctaaatgtgtcatatttaataacaagagcaagaaacatacgttatgatgaagagctcttatattttctttggataaaagtcagtaggcggggcgcggtggctcatgcctgtgatcctagcactttgggaggctgaggtgggcagatcatgaggtcaggagatcgagaccatcccggctaacacggtgaaaccctgtctctactaaaaatacaaaaaattagctgggcgtggtggcgggcgcctgtggtcccagctactcgggaggttgaggcaggagaatggcgtgaatccgggaggcgga

SEQ ID NO: 109892 - DNA, 398 bp, Homo sapiens
aatacaaataacacaaaaggagttgctataggctattattgacatccatcgtttccattcaacttggggagcctaagtttatcctgaatagggtgagggagaagatcagatctgtattttaccctgactgaattctactagcatattcaaactgaaaattatctaaccatagcagtaggaaaatcagatatttaaattgatcaaaagaaattcactatgtgcccattcttccctagtcagtatgtttgtcagtgtagaaatactttttctccacatgatgaactgactctctaattgtgaaaataagatctacaagaaaaataactaagacagaataatatgaatgctaaataaatggaatggacaaatactacattttttgaccaaaaaacatatac

SEQ ID NO: 109893 - DNA, 199 bp, Homo sapiens
atgaagaggcatttcctagaagggaaaattaggctttaaagtcaggcagatgggtttgcctgggaaacaatcaagagcgctgagtctgagccagggagctggtggggagtgagccaaagtgtgtcaggtaaggcagagaaccaaaaccagatatcaggtgacaagtcaagaatgagtaacatagagtacatgaataggt

SEQ ID NO: 109894 - DNA, 750 bp, Homo sapiens
agaccccatctctaaaaaaattaaaaaaaaaatggtttgctcttcactccattgagctgcaaaaacgctggtctagatggaatttgggacatatggagggcagcgaaccagtgagcgaggcagtgagcaggcatgtgggtggctatgcacacaccccagggacctgggattatttctggagtcagagtgatcattaggagctgaccacagccacccagcccatagcaagggccaccctccagccgctcactcagcaaatatttagcaggcacatactgtgtgccaggccaggcgccgaggcacatgttgggaagacagaggagacgaggcaggttcatcccttactcttggagctgatacctgctcgcactagtccccaagggtcattccagaagggaaatttcaatgtggctctggggaggagcgggcaaggggagcaaggagcagcttttccatcctacctggtccattgctcccacagaccccccaggaagggcctggcttggggaggcagcaacgggggaaggacagggaacagaacttgggtcagcaaccatggccccagctctgtcacctctgtttatgccattgtcctggggagcctgtcgtctccgagctccagcttccacatctgcatggtggggatcctggggtcctcctgcctcacccaacagaggtctggattagaaggagcttgggagaggacagtgggctgacttgtgatcacagtccaagtttccagagtgcacc

SEQ ID NO: 109895 - DNA, 709 bp, Homo sapiens
aaaataaaataagccttgtttatctgtattgagtctagaatgtctcaaaattatttggctatggaaaggcaaacttatttggccacagaatcttttgtttggtttaacagaagaactaattcataaccaaagaactagtatcctgtgtcctcctcccaccctggaaaatgctgaatgactattctgggccttataagactcagtgaggctctactattgcagctgacttggatctccaggactcttggctaagggactgacatattcctcaagaccccagactttctgaaaggatcagaggtgtggcccattaacatccaacagtttaaaagtggtgctgctaggcattgatagtaaatggctgtaaccaaagatagctagaattaaaacagcatccaagaaagcctgcaagaatgatggtcctttatgcttttgcactcagatcctgatatctcttgcatggttagttccagaagatagcttttcagaggtgaatagagcataaaactctttttggaagcagcatggtatagtggaaagaacataggctttgaaatcagagaaccattggagtcaaacctgtcactcatagctgtgtgacgttgtacaaactccttgagcctcagtttccttatccataatacaggaatatgccaccaaaaataaaataagtaaaagtgcctagcaggatgtcaaacacacaagatgg

SEQ ID NO: 109896 - DNA, 272 bp, Homo sapiens
ttatccaaggcatgattattgctaataaaaagcttatattaggaaaaaatatctgtaatcaatcatctatgcttccatctcaagaagctgccagcctgggcaaaatggtaaaaccccatctctacaaaaaaataaaaaaaattagctggcatggtggcacatgcctgtggtcccagctacttgggaggctaaggtggaaaaatcgcttgaacctaggatgtagaggctgcagtcggccatgttcatgctactgtactccagcctgggtgaca

SEQ ID NO: 109897 - DNA, 273 bp, Homo sapiens
cttcagtgaagagttagacaattcacaagattttcaccagggagatcctccaccagcacagtggagtgggagcatggagacctgccttgcctctctggacctctgtctcctcctctgtaaaacagcgctggcctagatggtttctaagggctcctccagtttgatgtcttagatcttcaaatccaatttagctgagtgcatgatggaggaaagaaagacgagaatggcttatgatgtggctccagatgagcatggtggggagagcactggact

SEQ ID NO: 109898 - DNA, 369 bp, Homo sapiens
gattttagagatgatcctcataatcagaatcacactcaggaaatggtctccagcatcttcataaatttccgagagctggaaaactcattgctctgtgtggttgttctgctgtagtataatcatagttccaaatgacagacacagactcctacagtccagccgagttattttctgagtttttcaaacagatttccccctcttatatttataaataatgcttttgatacttggaattgaaatgtgtcatatttcttttctattagcttatagtaatattagatttttttgcctttaggagctagtctgtggttctgttaaatatctgggaattcaagagatgcatgaacttacctcaataaatggtcaaaa

SEQ ID NO: 109899 - DNA, 226 bp, Homo sapiens
ggaagggaatggggggagctagccaggtttgtgacccattttacttctgggaaacagactcagagagctctagggacttgtccaaggtaatacaggtaacagccagaatctaaaccaatgtctagtttttctacagagtgtgtttttactactgataattcagtgcctccaaagtcaggcagagtctctgctatgggaaaggcaagatgtaaaccacgatgacttt

SEQ ID NO: 109900 - DNA, 129 bp, Homo sapiens
aacccccaaaaccctctcataagagctgcaatatacgctagtcaaagaggcaatggctgcaccaatttaggagtgtttcatttttctttatcagtgatctacagtctctatttcctagcttttacacat

SEQ ID NO: 109901 - DNA, 288 bp, Homo sapiens
aaatggagactctctgggcatcggctaagggggcccggggccttcccaggcctgctggagtccgggaagccgggggcacccagaaggaaggacccgtcggactctgcctggggacagcctgctccgcgccagaagggtccgctgctcaggcagcatccccgtgcctctcctccagtgggtccctcaggtagaatcggggcaggccccactggacgtgcagggaggaggctcggaggatgcatcctttgcaggacccggtctggtacagcagcagacggagccatctcc

SEQ ID NO: 109902 - DNA, 367 bp, Homo sapiens
actttggtatgcttgatcaacagggagaagaccagtgtggcttagaatagaataaaagggtactttcttttctgcctacttccaaagtgcacttggagttcagagaaggcagaacttgtacaaagttcagcgaaggaagagactgcatcctataccgaagagatatgtcaccatgacagaaggcttgaattggtggagagggaaattgtgtgagtaattctattgagtcttggctggttaggtggcatgtcattgtcttacatgtgtggactggcatatgccaagtcgggcacaccaggaagaaagtttctcctccatttctgtgtggctttgagcatgctgattaacttctctgaatcttggttgt

SEQ ID NO: 109903 - DNA, 310 bp, Homo sapiens
aagctgaaaagcaggtaaacaagcagtgatcgacttggccatcctaagaaagctaaagtttaagccagcattaagaggcaacaaaacaacctgctataccctgaagcatctaccatatgtctctgcaatttggtacagtaggtacttctggaagtgaggatggaaacaggtatgaaagcagcaggtgaaagtctgttagtgaagcactgagccctcctgacctctcctgatgcctgcagtggggtgcctgcccttccttcccctagcacaagtgctcgctatggagactgtatgaaagtgggggagtagc

SEQ ID NO: 109904 - DNA, 421 bp, Homo sapiens
cttattaatgatcgccattctaactggtgtgagatggtatctcattgtggttttgatttgcatttctctgatggccagtgatgatgagcattttttcatgtgtctgttggctccataaatgccttcttctgagacgtgtctgttcatatccttcggccacttgttgatggggttgtttgtttcttgtaaatttgtttgagttctttgggctttacaactttcaaagtgaattggatttttaccgtaagcaaaatagaacagagggtttatctcaaccagaaacaaatggagtgtgtaaaattcagtctctctcttcagccccatgctactgacttctgaatagcattccagctgtatttatctggggcttgggaaattttcttggttcctgggaagaaagttaactaaaacatatgacatc

SEQ ID NO: 109905 - DNA, 381 bp, Homo sapiens
cacacgagtgtcactaaatctcatttcctgttcctgtaaatgtcgtaatagtctcagattccggctgccacactcccaggtcaccaccatgtcaccctagctggctgacctgactctctttgcggttatcctgccatccttgcccctttaggctccctgaaactccactgtcactacatcctctcctgccccgagacttacacattgctcttcaccctcctcccagtcattgtaagttggatttgcctcagtgcagttctcgggttctgcccatttaaaataatccaatttcccactatggccaacttgcctgtactctaggcaggccgacatcaaaactggcctgcaaaggggaacaccctgtctgtgcactctcaatgc

SEQ ID NO: 109906 - DNA, 542 bp, Homo sapiens
gtaacagacttcatcaaaggaatactctcttcagtaatggtgattttaaaatactcggcaatttttgtttttcattgactcagacacagttctgtctaattctgaccttatctattcctatcatcctgttgttcaaagtaaatgtatttttaccaactgtttgagagaggaaatcctgggataattagctgaaggatatagtgtaataaaaaaataccaagttttgatattttgaagcctctgatctactagggatgtttagatacagtacaagcctgagtcagagctgaacttctcaaagttctttttcagacttgggattctgtggtatattctgaaactgaaaatagcttctaggagattcacagtccccaccaccactgcccattggcgccactggggccaaagtgaaggggcctagaacagctcacacctttttctgagagctatagcacagctttagaagagagattgtcgcagccagtgacccatatcgggtactcatagagaggggttttgtttaataggattacccttgacca

SEQ ID NO: 109907 - DNA, 167 bp, Homo sapiens
ctttctaagaacttagaagctcaaatgacttcatttgaattaaatttatttttttgttcacctaacttgtattatttttcctattttcggaagaggctaacttacacaaatttattacacagtttctgtttattagattgaggtcacagtcaatttttattatctag

SEQ ID NO: 109908 - DNA, 151 bp, Homo sapiens
aagagacagggtcttgccatgttgtccaggctagactcaaactcctagactcctacctcctagtaatcctcctacctcagcctccagagcagccagactacaggtgcatgccatcgcagccagctctctcaaaactgttatacctctagtg

SEQ ID NO: 109909 - DNA, 158 bp, Homo sapiens
caattcagatgaacagaataacagattaaaaagcctgggccttggggaaatgtacttcctcattcttttgtttttttttgttttgttttgttttgttttttgagacggagtctcgctctgtcgcccgggctggagtgcggtgggtggcgcaatctcag

SEQ ID NO: 109910 - DNA, 232 bp, Homo sapiens
gaatacgcattccaagcatctgtctaagagggcctagctgatgcctggcttgtaacaggcccccaggcaacatttgctgaatgagtgcttaaaggaatcctgtgaaggtgcccacatggcagatgctgtcggcagaacccagccctgaagcctgcccgcagcagctggcaatgagaccccgtagcacccgggtcaccctgcggcagagcccagcagcttccaaagcaaagca

SEQ ID NO: 109911 - DNA, 361 bp, Homo sapiens
tattacacacataaatatttaggattgttatgttctcttgatgaatcgagcccttattcattaggaaataaacttatttactttggttatatccttttcactttaatctgctttatctaatattaacatagccactccatttttcttttactctgtgttagcatggtatgagttttttatccttttagtcttaacctctttgtttctttatatttaaaatgtgttactgacagatgacacgtagttgggtcttgcttttgtattcaaactgaaaatctctgacttttaattggagtgtttagaccatttacatttaatctgatgattgatagtatattattaaattaaatcagtcaccttg

SEQ ID NO: 109912 - DNA, 415 bp, Homo sapiens
agtagtaaccactgtattaaccaatatctaatcagccagtgagaataatgaagatcaaaattagggaaggaaaataacatttattgaacaattattgcatgccaagtattcatgtaatgttcacagcagccttgcaaaataaatattcctttgcagagttcacaaataagaaaagtgagacatgtggaggctagtaatggaggtaaataatggaagtgagtagaaaactccaagctgtcttggagacaaaaagaggccttttcaaatggccctttttggtcctaattatgctaactgttcagcagaacatttgtagcttagatgcagtcactaccagccctctcttccaaatcatctctttgggttttgcttcagtgtgaaactatcactataaatgagtatttgtttgtcttca

SEQ ID NO: 109913 - DNA, 297 bp, Homo sapiens
ctgcacttagcttcactggccatccaaaagctattattctaactgaagtcactagctgaataataagtgacccaacttgtccagtcttttctaagaaaggcctgagttaaaattttttatccagtgtgagtaacatctgagaacaaaaatgttcctacaaacttgagaaacagattgttatgtgcccataataacaagtagctttcaaaactggttccaagcctgagcagtgaatcaatgacaactcatttcagaataaacttggcaagctaaccaatcagtgtcagcctcatgctt

SEQ ID NO: 109914 - DNA, 577 bp, Homo sapiens
tgacccagtaaccagagcacctgctaaaggacaggcgactccgccctctatgctccagcctcatctgctgagctcgttccctggcagaggaagcagagagccagagggtgatatggggcaagtgcccacttagcagatttagccagcaggtcaactaattttaagtttcacttggctttctgtctcgttgtacttgaaaaaagtctttataatttgctggctgggaaaatagttgcttaaagaatggtttatggatgctctgccttagaatccatggggaacatcttgagattgcagattcctgggctgcgcaccagacttgctgagtcagaacctcaagggctggggccctgggatctgccattttgacaggctctccagggatttggattgagggacgttggcgattgcaattgggaatactttgtgggatgcttgattccgtaaactaggccaattagctcagtttaggaggtggttatgacccagagcatcggagcttcctccttacctgtcagttctcttctttccctctctaagcacaataaacacagtggccctgagaggtgtcttgaaa

SEQ ID NO: 109915 - DNA, 388 bp, Homo sapiens
aaaacagattgttcctctggaattgactgtcttgagggaaacaaataaataatatttgatacatgtgtgttacattttggttgaagttttaggttagatagttactgttatatttgttgctttgatttcactgttactaccaggttttttataatatatatgagttgggctgttttttatttgaatgcttcacaagcaaatcttctctctcaataacattcggttttaaaaatcactttattgctacctatgtttagtttttatatagaaatcaactctgtttaggtgagtgagttgataaatatgtaagtttttcagcataggaaaatagccattgccatttatagagttacagtttattagttgatggtcaatgcccatgtgaagt

SEQ ID NO: 109916 - DNA, 291 bp, Homo sapiens
tagaacttgaattttctgatgcctccttggcatctctgtcattttgtttctaagaatattctaatattagctttagggtctctcttttagatgttctgagctcactgtttatgcacctgcactaaccaaggcctctctcttctcaaatggtttttccctcaccatccctttcctcccctggttccagcctcggtgacatatgcagaggctatctgcctcaagcctctttcctgtagatctgcggtagcatttccttgccttggtaccatgcagggtcataatctttgtctt

SEQ ID NO: 109917 - DNA, 477 bp, Homo sapiens
gccattttgcaagttactgtttttgaaaacaagatattaatttaatcaaagcttactttggtagtgattgtacctacttccaaacttgccgtaggtttccatattccattgaagctacttttgatccttaagatgctacatgactggtatgaaatctctcatagttgtggggaaaagatgatataagaagcttcaggctggacatagtggctcacacctgtaatctcagcactttgggaggctgagggggacagatcacttgaggccaggagttcaagatcagcctggccgacatggcgaaactgtctctactaaaaatacaaaaactagccgggtgtgacggtgcacacctctaattccagctactagggaggctgaggcaggagaactgcttgaacctgggaagtggaggttgcagtgagccgagatcgtgccactgcattccagcctgggcaacagagcaagactccatctcaa

SEQ ID NO: 109918 - DNA, 424 bp, Homo sapiens
tccccctcaaaacagagggtccctgaccctcaagaagctaagtggatgaaagatatagaaagatacgcatagaagatcaaggatccgccttggacactatgatgtttgcctgggaaacatagctaggctggtaacaccttagatacagagttggaagagtatttcaggtagagaagccagcatgtgcaaaggcctcaggtgaaagagcatgaagctgggtagaggactgaaggaatttaggttgggatggattagaggatggtagacggggattagtcagagagggtggcaggagccagcacatgaacatctgggaagctacataaaaggattaggctccaccttggaactaaaaagtgttttgatcaagaagcgatcacaatcagcaatgctgagtgctgggtgtgacatgtctagatgaaag

SEQ ID NO: 109919 - DNA, 830 bp, Homo sapiens
gaccaagtctgtctttagagataagaaattgagctgctgctatgctgatttcctggggatgacaaagctattaaatggcaagcaattcaaaaccaaatccagttatatcctactaacattatttgtttttctttttaatttgggccttcctacaattctgtgagttagacagggcatagacaattatctgcattttacagaagagccccctgagacagtgagttaagtagaagagctaaaattagaacctggggatttcatgactcccttccttttaccctattacttctcttccccttcaagttaagacttcatagaaagtaaaaatagcttctccatccaaaacagctgggaacccctgttctgccaaggacgtgatccttctgtaaatctttactcctggggcccacagtgcacagctatttagaagggatcaatgccagcttctacccagcagcttaaattcatgtatatttctttaacatacagccaaatgtatgtgacacatgagaagaaaatatgcttttattttcataattcttggaatcaaaaatataaattccaaggatgttttaatagtcaaaatgcctttccccaactactgcatacaaaatttgccaataataatggtggaagctctttataaaaagtactaaatttaaaaaaaagtttactgagatatatttcacataacatacaattaacccatttaaattgtacaattcaggccaggcgtggtggctcacacctgtaatgccagcactttgggaggccgaggtgggcggatcacttgaggtcaggagtttgagaccagcctggccaacatggtg

SEQ ID NO: 109920 - DNA, 359 bp, Homo sapiens
gtatatagcaacttctggttgcctgtagctatctttactgaaatattccatcatatcttcaccatatcacattaacttaaataggatctcttttccttttatcaagtatagtaatagctaacattagtgagtgtttattatgtatccagcactgtgcccatatgtaatactttgcaaggatcaatgtgctgtatatgaggaaactgcaagttaaggaacttccatgtatactttgaagttcattctcttaaataaggaagctatattgccttccactgccttgcatttttgttttcagccctgtccttcaaaaccttactgtgtttgtgtaaattctgtcttcccatgttccttctccc

SEQ ID NO: 109921 - DNA, 273 bp, Homo sapiens
tcggtccgcagaagccggggtcttctgggtggttggttgggggtgagctccctgtaccccgatgcccatgtgggggccccaggctttagggaacctgcgaaaaggcctctttctttcctcctatggtattcacagacagccacaggaagagccttccgtgcgtgggcgggggttggagagggttcattcttaaactttctttcccaggtctacccctaccctagggccccacttcgggaacaaattccgtgagaataaaatcatagctaggct

SEQ ID NO: 109922 - DNA, 423 bp, Homo sapiens
tagagtgtacttacacaaccctagatggtatagcctgctacatacctaggctatatggcatagcctattgctcctaggctgcaaacctgtatagcatgttactatatggaatactgtaggcagatgtaacacaagacgaatatttgtgtatctaaacatatccaagccataaacgtagagaaggtacagccaaattatggtataaccttatggttatagttatgggaccaccatcatgtatatatggttaatcattgactgaagtgtcattgttcaacacatgcctgtactctttctaaaccaaaatagtgtcatcttgctttgtacataaatcatacctgctttttttgtcattgctcaaaaggtttattctggaatgtccttcgaccaccttgtagatttatatattctttattcaaattt

SEQ ID NO: 109923 - DNA, 299 bp, Homo sapiens
ccttccactgcctgcctgcccttcagccctcactttgctggcacaggggcactgctaagcatttgggctctgtagcgactggaaggcagttctggcggatcccagacagaagagacaggcaaggctgtgcgctccgggagctatgtgtggcgtgcttggaggaaagggcttggtgggcttttcctccattccattgtgtcccacccccaactatgtgggtggccctggggtgacaatgaacagtctcctcagggtctgatttgtcagtcagccccactcggggcatttcacttttgggg

SEQ ID NO: 109924 - DNA, 488 bp, Homo sapiens
cccatagcttagtgtttggtgacatttctcagtgcactgtggtgctattttgtatgctgctgttctttgtcaatgaagctccaagcagagggcttgtgaatacggagctaaggtttgttgcaatggggaagaaatatgagtcaattagtgatgaaaatgagaaaatgcactgttcgatatcataggcatgatcttgtcaaattgaaaaaagttctctttacactgtgagaccattctgtcttttgttattatatgcatacttctctctctttgattagagtcattttttttccctcccagccagttaacatgttcataaacagaggtccttctaactcagttaccttttgtaatgcccataggaaaatgctcattttggggttaaaatcttatcgtctcccctgcttccatctcagtttctttaccttaccagaaaattaggtaattatctgttagatttaaaatgtgaggatcagatttaactcctg

SEQ ID NO: 109925 - DNA, 338 bp, Homo sapiens
ttctggttcacacagctctgatagtaatctgctcactaagtgttagttgccgtgttctctgccacaactccctcctgttgcacccctgcctttgagtcctgctaaacaacagtattggaacccatcattttctctcatgcctttacccaaactgttaattttctgcaattcccttctctccacatttttccttctcagatcactgaagatcgtccagtcttccctgcccatcccttcccgaccccatcctccattatttgtactctcttagcatccagtgcacttttttcagtacttatcacacaacattataattgtttttttggtttattttgatc

SEQ ID NO: 109926 - DNA, 454 bp, Homo sapiens
aatcacagtgaactccacccttacactgtttcttggtgctggtcattctccatgtgctcccctcccctgatgccttctccgtcctgtctgtaccccaagcgactgccctttctggctggctcctggctggttcagcctgtgggaggcattccttgcaggaaacaggacagagggcatagaaagggatgggtcgttctctcccatccctccctgcttcagagctgtgtcccagtagagctgcatccctccagaccaacaagcgacccatccctcaggccacagctccagctctcaccagtctcctcctttgcccttccatcccttgtttgctgccttaagcctgcccatgcctctctaagtagtctctaaatttggtctttattgaaacatctgctgtgaattgttttctgccaggactctgatacatcccggactcccaaaatgcacacacgta

SEQ ID NO: 109927 - DNA, 343 bp, Homo sapiens
tagatatccaaatgagccataaaaaattgtgcaaaatgttattccttaatacataatattttaatttattaaaaaatgagttttacaaatgagtatcaaaagcttagcaccccatcatccctgtcaatgttcacaaaataataaattctaaaatctttaagatgtatatttaattactcatccaagatcagttattgcatgcttaatcagaaaaatacctattaacgtttaacacttagttactttacagattaaaaaacatattatacctgccatctagggagccagcatcctcggtgtatcaaaagtgtttagggcagaaagcagtgatgtgtcatagtgt

SEQ ID NO: 109928 - DNA, 300 bp, Homo sapiens
gtgatccgaatgtgcttggtagaaacaatattacttcagtgcttagggtggcatttgaataacgcacgagtaaaaattctgaatgctccattctcatttcttttttgtaaagaggtaagatgcggtcagagaatggactccatgcctctggtaatgaagctgagctactggcctccgagtcttgcccagctctgtaagtgactgttaccctgggagacacgctagtgtgatgagcaatggtccaggcacaaccttagggcaggctctgaggcttccaggatgtaggagcaggatctcagg

SEQ ID NO: 109929 - DNA, 108 bp, Homo sapiens
tgtttactgccagtattttaaactagttaaaaacttaactctactggtgaccacctaaagatcaagtttcagcaaagtgggacttcattcatttattgggcaactgag

SEQ ID NO: 109930 - DNA, 431 bp, Homo sapiens
aatggagggtgtgaatgttggataggtatgcccatcacagaatgaactggggaggaaatgagtcagttttagttccagccacttgacagctgtgtgacactgggcaagtgaatgtgcctgtaatggctttttaatatgtcaacctagctagggtgaactatatagcctagtcattcaatcacacaccaatttaggtggtgctgtgaagaaatttttagaggaaattaaagtctctaataatcagactttaagttaatcagaaggtatattattttacaaaaggcaaaatttagaccaaaaaggcattgtataatcatcctgggttcaacagagaagcagtaccactaccagtaagatgtaggatagctggatggatggttagataaaaaggttgcaactggcctgttctgatttattatagacacccctat

SEQ ID NO: 109931 - DNA, 126 bp, Homo sapiens
agccagataaaatgacttcctcattcaaggtttaccagctcaccagcgctaccttcctggaagagtgccatcggccttccgggacgtaataaaacctgctgcatgcctcactcacccttcgcagcc

SEQ ID NO: 109932 - DNA, 162 bp, Homo sapiens
cctctgccaccttccagatgcctgctccgtcccataaggagacaaggacagaaggtgagaaacactgagaaaggctgggctgtggcccaaatcctttgaggcctgaaaacaacctgtctcggctacccaagcccagactaagcaagtctgctgggtgagtag

SEQ ID NO: 109933 - DNA, 795 bp, Homo sapiens
gatgcccaatgtcttaaaagctattatttcatctattttatttgagattatttcaagcaggggtataattctggttcctgtaactcttctatgaccagaaatagaagactgtccttcagttttcttcatatctaagtattttcccttttttaaattaagttttcttcttaacccaggaattctttagaaatgcattaatttccaaatgtattttaattttgacttctatcttaattacatcatgttctgtgcagagggcattgtgccacactgtccggattcctcttcagattttctccccgcaaccacctcactagaggggcaggccaaaagccttcaaatgtcagccttctctgggaactatcctcagctttaatctacctcacccactttaagcccaggacaaatcccacaatcctccttgctgtcttccattgctgctggctgacttttttctaatgcatactttcactgagggtgtagccctgtaagcatctgggcttcttgtggagacctgtgccaactttccccctcttgcaagcccaaggactcaaatcctcttctgcatggctgataaaattcaagtccattggataccaaatcaccaaactgcctcttggcaaccaaagacagcatccacacacttacctttctaacttccatttcatcttcatttttggctctaaggatttatttcactttcttgaaaatactttaaaaggacgtttaaattttattcagcatttctgtgtgtttgtagccaaagggctttatgaatacccagcttgtcatgtt

SEQ ID NO: 109934 - DNA, 372 bp, Homo sapiens
aaataaatacactgttcaaacttatgctaaaacaaagaacattcctaataagtctttgagaactgagttattaacttttattgtaatattctaatggtttcttacatatatatgcaaaattcagagtattatggaaaaagttattagaataactcagtgatgatcactatggacattaaagaatggtaagattatttttttcattgtaatggctttataaagaaataaggccaggcgcagtggctcacacctgtaaacccagcactttgggcatcagaggcaggagaatggcctgaaccctgaaggcggaggttgcagtgagccgagatcgccccactgcactccaccctgagtgacagagcaagactctgt

SEQ ID NO: 109935 - DNA, 676 bp, Homo sapiens
catctcaagaagatgcagctccatggcaaaggatctcaagatcccagcaccaaggtccacataaaagctttgcaaactgtgacctcctttcttctgttatgtgccatttactttctgtccatgatcatatcagtttgtaattttgggaggctggaaaagcaacctgtcttcatgttctgccaagctattatattcagctatccttcaacccacccattcatcctgattttgggaaacaagaagctaaagcagatttttctttcagttttgcggcatgtgaggtactgggtgaaagacagaagccttcgtctccatagattcacaagaggggcattgtgtgtcttctagcagaaaacaaactggtggtgtatgaaacattttatatttcttactgggttttctgtaatatatgtatatgaataatttccacatgtatacctagaaaagtcttttacctaaagttagtctagaaaagtacatatatatagatgtgtgtgtgtgtgtgtgtgtgtatgaaaaactgaagaacattgacaataacatgctttttattgttttttcacaaaaactgccaaattatagaaaatatgacaaaaattcctcaattatgaagccatgtttatttcatacatgtattttatatttcatttgtagaatttatatctatttataatta

SEQ ID NO: 109936 - DNA, 327 bp, Homo sapiens
aaccttaatttaggaggacccactgtatagagaatatgtcaaatatttgagaaaaggcagatagctcacttcagaaaaggtagttggatcaggtgatctctcttttcaggctaggcaaccttctggaattctgtaggatagactttgtcaaagtgagtgtataagtcagaatcctgctgagaaacagatggtatactcaaggagtttagctgagatgagcttagtgaagggacaatttatgatggcgtgtgcagggttaagggaacttaccagtgattgtgaggcatagaaagactatgaacagtgaggggctgttattattattac

SEQ ID NO: 109937 - DNA, 339 bp, Homo sapiens
aggctcttcttgaaaatctggcaggcagtattccttgactaacacttagctgcctgtggcgcccaggctatggtattttcttgcctaccttgctccctccctccttctatagacagctccatgcaggatacacataggaatttgttgtagtttctcctttcaacctctaatgacccttggcttttgtgtgctttgcaagattctgtctcctcatacttaatctaataaaacctgtgaaatgggtggggtactcattactacccctattttacaaatgaaggaattgactcagagaggatcatcttttttgtttttttttttgagatggagtttcgctct

SEQ ID NO: 109938 - DNA, 231 bp, Homo sapiens
gtgaaacgggagcttgcatgtcacatggcaaagcaggagcaagagagaaagagtgaggggggaggtgtgacacacttttaaatgaccagattgtgtgagaactcactatcatgcagacagcaccaagctatagagtcctatgggaagtaaaacagagactgtgtgtatagacaatactatcagtgggtttgaaggaaccgagaaagagataagaaggtaggatggaagaag

SEQ ID NO: 109939 - DNA, 256 bp, Homo sapiens
gtgtcaaaaaaaaaaaaaaatccaaaacacgctctctgttttcccattcggaggagaattacatccttctggaaagaggcctccatgtctgctggcgccacgtccgtcctatgtcccctctctctgctctgcctccttcaaaccccagtgagtgggtcaccaagaccccgtaggattgacggggaggtggaggttgcagtgagccgagatcacaccactgcacaccagcctgggcaacagagtgaggctccgtctc

SEQ ID NO: 109940 - DNA, 716 bp, Homo sapiens
atagttcactaattaaactttatatattgtttatatttgaaacatcttaagatgcaatattttgtattatgtatggtaaataatctttgtaattatgttggtattaatgccaaatcaaatgtagattcatattctactaactacatctttatgttccaggaaatacactgagttttattacaatcactatcctgtttagtcagacaaataaccctacaatttagatattatcatatctaaatccaaggtgagaacttaggtctaaggcagcgaagtaagtctccagcatcacaggtgtatacatgtattacaaatgaatctaactttctcatttcttttcacggtttcatatagcacacagaaaattatatggtatagctatgcggtaggagtacagacagaaagaggaaagaatttcctgtgaaaccttaccccaaagactagcataattgcttcatcaaatctacttctgtttaatcttagcacaatttatccaatgagcttacaaatgtgctcataagattagttatatctcacagatatttttatttttaaatgttgaaagttatgaatttgggagtgaaattttttatcatttattcacccattgaccatctatacaaaaaaaattacagctaactctacaaggaaagaattttagtctgacaaaagtgaagctcactcagagaaactaaattatttgtctaacgtcacaa

SEQ ID NO: 109941 - DNA, 363 bp, Homo sapiens
tggcacatggtaagcactcatgtatactagctattatttatctagcacaatttagtgagagcataccagttgcctttactgcttgcagaagatataaaaatgagtaagaaactttcctgaccttcacaaagcttccagattaggacagagcaaccactaagcaattctagcacacggctgaatataatccaccctgacactagaagaaaaatagtcactgctcttatgaagcatacatattctttacctaaatttggatgtgaatggcaaaaactgaaattcagagagataaagtcacttgcccaagatcatacagcaaattagaggcagagctaggagttgcggccgcagctgtcgggctcc

SEQ ID NO: 109942 - DNA, 671 bp, Homo sapiens
gtgtatcaattttagtattcaaactagctttatagagtagctaaaatagttcctatatcagagagtctgaagaatatgaagggctggagaattcatagataagagctcactgatagggaatcctctacatgctgatgtagaatatattgttcagtgaaaggaaagggcagaaaagtacagtatcatacttcttgtgtcagaaaggaggcggatattagaatacagactctgctgatatttgcacaaagaaactctaaaaaaaactagaagaaataataaaagaaaatacctatagaagcaggtagaaatggggtggaagaggacggggtgaaaaataaggcttctcagtatatgtctttttatgttgtattcatttttgaactatctggatatttcatctataaaactttggccttgcgtgccactgcaagggagtagcagtgaaatgactctgatttcttgttgctccatgtatcaaattcactccttagtctactgtttagatgtttctaccttgtgccttggcatgatctgtttaactgaaatgaactatatctatgtccctaaatcactttcaaacttcaactcaaaatatatcacttcctcctcaattggctatttatttcattctgccttttagcataatgtatttatgttgtatatttgtatat

SEQ ID NO: 109943 - DNA, 220 bp, Homo sapiens
tccaatacatatacacatgccaggcagccagagtcttgatagcatcaaaatttcaagagcaatacccacagttattgtggatggcttttgaatggcatggctgatctggaaactgacttcagttgtgacattggtgaggacctcgttagagatttctgaaacaatggtcaagtactaattgaagaatgccagtagtgagtgccttggtgggccccagcca

SEQ ID NO: 109944 - DNA, 201 bp, Homo sapiens
ttttcacatcactttcttctctgcgtgtctatgtcttctcttctgttcaccctgtctctaccaattagcccaggataaatgccatcagaaaaggtatggctttcaagatctagtcattgataaaaagaaatataacttttggaagcccttttgtataaagaaaaagcactcaacttgaagttaaaaggcataggtatgagt

SEQ ID NO: 109945 - DNA, 536 bp, Homo sapiens
tttttagtagaaacagcatttcactatgttagccagactgttctcaaactcctgacctcaggtgatccaccgcctcggcctgccaaagtgctgggattacaggtgtgagccaccacgcctggcctaggggcagattttcagttgaattattaactggaattcatgttcctgttcccatttctccagttctaccgtcagccattttagtgatagtaaactcttaatctagagcaccattcttaaccccaggtacaggtttgtctgaggaacttttaaaaattattgatgctttaactagagattctgatttatttgttctgaaagtaaggccttagcattagtattttttggaaaagctcctcaggtgacattactctgtagctaaggttgggaactactgatgtgcagtatgggtaggtacaaagaaaagttgtaaattcttgttggtctctacctctgataaaaggaaaggaattacattttactcttgaacaacacagtggcgagggttgccagcccccaccccactgtgcagt

SEQ ID NO: 109946 - DNA, 433 bp, Homo sapiens
ctttcccagggaaatccactttcacgtccaccggtatccaatagacaccctccccacatccaaggaggaccttcaactctggtgccacaaacggtgggaagagaaagaagagaggctgcgttccttctatcaaggggagaagaatttttattttaccggacagagtgtcattccaccttgcaagtctgaactcagggtccttgtggtcaaattgctctctatactgtattggaccctgttcagccctgcaatgtgcctactcatatatttgtacagtcttgttaagtggtattttataatcaccattgtaatctttgtgctgcaagagagaatatttggtggactggagatcatagaacttgcatgttaccgacttttacacaaacagccacatttaaattcaaagaaaaatgagtaagattataaggtttgc

SEQ ID NO: 109947 - DNA, 852 bp, Homo sapiens
aaatcagccaggagtggtggtacacatctgtagccccagctactcaggcggctgaggtgggaggactgcttgagcccaggagtttgaggctgccgtgatctatgaccatgccactgaactccagcctaagtgacagagcaagaccccatctctaaaataaacaaaaacaagtttaaaaaaagaaaataatttcaggctgagcgcggtggctcatccctataatcccggcacttcgggaggccaagacaggaagatcgcttggggccaggagttcgagaccagcctgggcaatacaagacaaaaaaattaataataataaaaaaaaattcatgaccccagcagtgcaacattaaactaacctccaggtccctccaagcagggctgccgtgagactgcccgtttcacaaatgcatgaagccagccctaagtctttagtgagtggagcctcttttgataagagcccaacacctggctagcagactccagttttggagcccaagtctgcccagatttgaaagccccagctctgcagcttctgagctgggtgactctgggcaagtcactcaacctctctgggcctcagcttccccatctgcaaaacagggataataagtatggacttcataagtcatggtgaggaccccatgagtgataaacatgatcacgacagagctgctgctgtctttgccaaggcaaaggataacggaaacgtgggtgtctcacaccaggaccccagtgtccgcccgatgtggtggcgctcaccacttcgagacaggcggcgagtgatgtcctgttttgtcccctccctatacacacatacacacataccagccactctttcccatcaggccc

SEQ ID NO: 109948 - DNA, 473 bp, Homo sapiens
gagtaaaagaagccagacacaaaagaccatgtgtcgtatgattccatgtacatgcaatgtgcaaaaagccaaatccgcagaggagggaagtagattagcagctgcctggggctgggcgtgggaacagggagtgactacagctgagcaaaacggaggttttggggtgatgaaaatgttctaaacttgaattgtggtgatggttgcacaactctgtaaatttcctaaaagtcattgaattgtacgcttcaaacaaatgagttttctggtatctaaattatacttccgtagagctatttttttaaaaaaggaagaacagaggcttggggatctgagaggcccagctccagttctggttccttactcccatgcctcagacaggtggctccaggcctcagtatccacatctgtgaaatggggtctctaccaaagctttggaggccatgaggatccaatgagacgtgtttaaaggcctg

SEQ ID NO: 109949 - DNA, 533 bp, Homo sapiens
tggcgtatatgtacaccaaaatctagatagtcagccatacttttcacatgacttttgtaaccatttcaccctgaccctctccagccctcctcccctgatccttggcaaccactgttttgcttactgccactagagattagtttgtattttctagaactttatataaagggagcaatatcatatgtattctgttaggtctagcttctttcattcagcataattattttgagactcatccatgttgtagaatgcatcaatagtttgtttctttttattgataaatggtattctacttatgactatgccacaatttaaactaattggtatggatgctcatttgaattattaggtttgttttcagttttgggatattacagataaagctgttctaaacattcatatgcaagtctttgtatagacatgagcttttatttctcttgagtaaatacctgggatttaaatggctgaatcttatggtaggtatactttttactttatagttaagtgccaaactgtttttcttttacatttct

SEQ ID NO: 109950 - DNA, 760 bp, Homo sapiens
agcctggttctggagccactgcactccagcctgggcaacagagggaaaacttatctcaaaaagtaaataaataagtacccatgtagttaaaatgtttaaagactagcaaatagatgttggctggtttgatggagaaagtaaatccattctttttcttaaaaatgatctcttcaccaccagtcccagcaccccccttaccagcctcccagggcactgtccatggctacattgtccatgggccatcatgtcccctcggcttctcttctggttgtaaatgctcttgcacttttctcccttgtggctgccgtccacactcccagctgccttccctctgcacttaagatctaagatcttagagacgagatgagacatctcttgccttcgtgcatctaagacagctcatcaacaggtccaggtgaactgctaacactgctgtgttgcttggaggcccctgtcccaccctggctgcctcagctttggccatggtacccacggtctccagctacatcagatgcctgaagaacaaatctctccttagctctccctgccccctctccaggaataggagcagtgggacccccttcaagaatcccccatttcccatatactttcctgcaaagccacagggcgtgcaaagtgggattccagggctccagcctgctccccatgggcctctggatccaggggtgactctttgcctgtttgggtgcctctttagattttccaccagcttcctgtggccaggagccagaccacgccc

SEQ ID NO: 109951 - DNA, 688 bp, Homo sapiens
catttttggtgaatgttttttgttgttgttgctaatgtatatggtattattttaatttctaatttcagttgttcattactgatacataggaaggaagttgacaatttgtatattaaccttgtatcctgcaacctttctacagtagtttattagttccagtgattttgttgttattttgggattttctacgtgcataatcatagcatactattgggacaaagaatgatgagaaaaggtatataaagaatgataaaaatataataaaacagtgtatttgagcctatttcttcatagttgatcatcaattattgtcccattgatagccttttaactttggggagtaaaagggattgcagaaaaggatgaaggtagggtaccaaagttctaagccatataatgctgtcttttttaagcccccaaccccctaatttttagctctccttttcccacccaaaaagcacaactgtctaaaaatcctatttcattgtaaatgtcaactgacatttccatttatccttgcaagattacctaagcatgctgatggggggatggacaacatattcattagcaaaacagaattggagaatatcgtttcgttgactctagaatttagtctcctgtgctttttgcataagctgaagggtctcattagaaacaatgtattattcctaaaagtttttagggaaaa

SEQ ID NO: 109952 - DNA, 343 bp, Homo sapiens
aattcgcccaccctccccacacacttgcttttccgacactaacagggttttagtgactgcatctgctgcacagtattcttgtgactgctccaagcagaaagtaacttgaggaatgagtccctgatttttggcatcagaatcctctgggggtgaggttcctgttttttttgaacaggccttaaattataacccacaaacgatctaatttatagtatgatgcctgttgtaggagaaaattggctcaacaaacggttgtttaagaatttttttctgtgtaactgtcattgaagtttaacacacttttctctgggacatttagtaactttgtcagtgatattttttg

SEQ ID NO: 109953 - DNA, 594 bp, Homo sapiens
tatactctttaggtcgtttgttaattatgttcgtatcttttatatctttacttgttctgttttcgtgtattttgcttattcagactgctactgaaatctgtattaaaaatttatggcataattgtagatgacatttttgccttataaatttttttaattttaatttatttgtaattcacaaataataattgcatgtatttatggggtacagtgtgatgttttgatacatgttcacattgtgaaacaaatcaaggtaattaatatatccatcaccttggccaggcaaggtggcttacgcctgtaatcccagcactttgggaggctgaggcaggcagattacatgaggtcaagagctggagaccagcctggccaatgtggtgaaaccccttctgtactaaaaatacagaaattagctgggcatggtggtatacatctgtaatcccagctattcaggaggctgaggcaaaaggaacactcaaacccaggaggcagaggttgcagtgagccgagattgcgccgctgcactccagcgtaggtgacagagcaagtctctctctctctctctctctctctctctctctcaatctctctctc

SEQ ID NO: 109954 - DNA, 384 bp, Homo sapiens
gatttcctttcctgtcttcccttttcaaacaagcacatccctaggccactttttggggaatagcctagaagaacagaattcccagttgaagttataacaaagaaacatgagacccagtgcctgagcccaaagtgtgggtgctgctccgagggactgcagggaacataactctactgtcttcttatcttaagagagagcagtgtgcaggaggagactagaacgtgggacctggaaggaaactggtgcagcctcacatggactcacagaagcaggaactcttggctcccaagtgaacaagactttttcagtccacccaaaggctcaaggctagctgaaaattcatgacacgataattctcctacattctcatttttctctgttaaa

SEQ ID NO: 109955 - DNA, 485 bp, Homo sapiens
atgtctttttcaagcacacattttggtcagggttgatggctgcaagaaggagaaacctattcaccaccaaaatagctctgaaagggaatattctctcattaggcatttttatagacaaggagcctcacggttttggtacttgcctcgtgacctcaagtggcttggacttgccgggatccagttttgatcctattgtcacaggactttttagctgcagaaccctttatggatggctggtctctttcattcagttcaaattctgaagacagcctgattggctcactctcacttgtgggttggttctccttatctcttcccacccagtccaatcatagtatccagaagatgaagtcatgtggttcatatcattacttttctaaggagaagtagatggatttaaacaaagcaaaacactgctggactgttagatatgtgtgtttttaacctgcaattgtagtatagtataacacccttcaccaagtttc

SEQ ID NO: 109956 - DNA, 890 bp, Homo sapiens
gaacttcagacatctcaggagaccagtacgcatgaatgaacatgtagggacccctctaatacgtttcacatccattatgatacaacaatgaccatacactttagtagttctcagtgtgtgttctccagatcagtagacagcttcagcagcttgggaacatgttagaattgaaaatttttgagtcccacctcagagctgccagttcagaaactcttcacgtaacctgtgttacaacaagtccttcagataattttgatgtttactagtttcagagccactgcactaaatgaaactattggtagcatttgtgcactgtaaattgatgctgtttaattttcattcacttgtgctctgttggaagcttttttgtgtttccttcacttgggatttcaaggaagtatctaatttttttttttttttttttgctcaattacatgtaattgagaataagataggtatctgattctccaaaagttcagcatctttattttatgatttaaacttgtcgagttatgcctctgggtcctgtcattctcccagcgaataaaaatgtggatgcttggggaagtggaggtggatggtaaatgggaatactcttgtttgaatttttaaaaatttacattgtaaataacattaaataccatttgttgtgcccatgataacttcatccaaaatatatatattagtctgctaagatatgccataacaaaataacacaggcttggtgccttaaacaacagaaatttttcttctggttctggaagctggaagtctaagatcaagctgttggtggatttgatttcccctaaggcctctctccttggcctgcagaccaccaccttctctctgtgtcctcacctagccttttctctgtgtcctcacctagcctt

SEQ ID NO: 109957 - DNA, 434 bp, Homo sapiens
tggcagtaacaagtgttggtgaggatggagaggaatcagaacccttacacaatgctggtgagattgtaaaatggtacagccatgtgagaacagcctggaagtccttcagaaggttaaacatggagttaccatacgacccagcaattccactcctaggtgtatacccaagagaaatgaaaacatatgtcacacaaagacttgtagggaatgtttgtagctgcattactcttaatagccaaaaactggaaacaagtcaacccagatctttcccctcacagatcccacaggaggtctacagggaggtgtgactagctctgcatccctggagtcacacagtaggctggtggcagagccaattctagtgttctttctattggaataatttgcctccagtaacaatgtgaggaacaataagaggaagagattgaaaacag

SEQ ID NO: 109958 - DNA, 431 bp, Homo sapiens
tcaaggttacagtaagctatgatcatgccactgcactctagcccaggcaacagagcaagaccctctctaaaaaaacaaaaaaagaaagaaaaagaaatctgtttatattggtaaatggatttatatctgtaaatatctataaatagattactgcaaaatagcataatccctactccaccttgaatctggtaccacatttacaggcttccataacacacactattttctttcctataatttatcagagttttttgggagaacgaatattcctttaatgcctgtccccctaactagactatgagctgtggaagggcaggaaccatttccatgtaagggcctatttctaccacctgccaaaatgcctacacatagaagatgttcagaaaatatttgcactttgaatcaatgaatatgttattctgatttaatca

SEQ ID NO: 109959 - DNA, 620 bp, Homo sapiens
gacacgtgcctgtaatcccagctactcaggaggctgaggcaggagaatcgcttgaacctgggaggcagaggttacagtgagccgagatggcgccactgcactccagcctggggacagagtgagactctgtctcaaaaaagaaaaaaagaaaaagaaatacaaattgcccatgaatacatgtacaacaagtacaaagctattctgtgtggtggtgttcatataagctaaaaattagtctcagtgtaaatgtttactaacaggattatcaattaacaaatcccctgagaccagagcctctttgccaaagtggagctgatggttgaggaggagattttggcctcagcccagtcactggcagaggagaacgttctactcaggccccatgcagtatgacctcacgccctgagataagagtctgggatctgatctctcctcacctgaaggagagcaagaaagagaagaaaagaaatggcctctccagagggcaaggaaaggaaatattgtcccactgaagtacagtgagcagggcatgtgtgttcccaaaatacttcccagggctgtttaacctctgatagcagagtctcaaagatattaggatgcactttctttatcagaagaaa

SEQ ID NO: 109960 - DNA, 1165 bp, Homo sapiens
tttaattaaatgcaagctgagtcatttcaacctgcaaccttcaggtaacaggagttacccaagctccaggaattatgattgtggggtaaacccattctcttgttttcttgcggttctattttataacgcactagaggagacagagacgtcattgcttcacccagggcaagaggacaaaggaggatgcatggaaatacaaacagcccttctcctccaggccataccgactgtccaactagcaacagacttcacctggttttggagcaatctgaatttggaatatgccagagaaaacttctatcaggcaagatggaagactcctaggataggtctctctcatggagggattggcacgatggtaagagtccagtggatggaaaaggcctcctccttaaagatggtgatggaaacgagcactgcacagggaaacacaaatcaggtcccctgaaatccagcccaacctggccagaccctccagtgcccatcagggcttatgaacagggtgcttcagtgtctttgttaggggtggttaaaaaggagcacgtgcttataggggatgctgctgagctccatgattttgacttcctgtctaacctgttgatgctacaaaactcttttaaaaacagttaccatgggaacttttccctagcaagcattcttcaagaaacgttacaggtgctggtgaattcaatgcccttggtgtcaataagcttttgctgagtcttagaatgtgtggcttgaactgagaggactttcaaacagataatgcgaagtttccaatgcaaatgtcttcggggttaagtgtcagtgaagtgcagtggaaggtagggggataaaatgatctcagtgtatatggaggccccacttaagcattcaaaaaattctatatacagtgttttcaatgtattatgtatcagcaaaacaaaataccccatagggctataatcagctcagggggtcacctcagcaagagatgctctggctatcactcctactacgggatttcctctctcatcagaaccagtaggtggtcaaaaccacaataatgcataaatgaaggcagggaattgggtatccaatgtgagcaactgaaaaggtgccatgtattagctatttgccattatggttctgcaagtgctcagatgactcataaaatgaccagaac

SEQ ID NO: 109961 - DNA, 1014 bp, Homo sapiens
tttaattaaatgcaagctgagtcatttcaacctgcaaccttcaggtaacaggagttacccaagctccaggaattatgattgtggggtaaacccattctcttgttttcttgcggttctattttataacgcactagaggagacagagacgtcattgcttcacccagggcaagaggacaaaggaggatgcatggaaatacaaacagcccttctcctccaggccataccgactgtccaactagcaacagacttcacctggttttggagcaatctgaatttggaatatgccagagaaaacttctatcaggcaagatgggagctgttgttgggacaggacaagagtccacatcccctgcccagtgcctggttctgggtcatgtcaccgaagcgcatcagcccatctgtcagccaaaccccactagccttgtgccttctcttctaaatccccgcggaggaaaacaacttctgccttctacagtacgaacagcgagggtctgctgggaaccaatacaacttcgcgtcccagtgcagcaatgttgccaggtaacaaatgtagaaacatactccaaaaactgtatgtgacaatatacaacctccgctctgcagctgataaccgagggagtgttaaaacaccgcgttctcttaacacttgggtttttggtgtgaaagtaaaattaaacgggatacttcctcttgtaaatataagacaggcatacaactcacacacgtatccactaatcggaaatagtagaggggtttgcaatagctatctgcagtgcatcccagccttcactcttaccctcaagatgaattccagaaaacctacagaaacgataactgaggaagagcctttcttctgtcggggacaagctctcctctaacaattgtgaggaagctacccacaagaaagacaccagcagaaattaaggaaaagctcatgcattgttattaaaaaaaaatgtgcttccattccactccattttaaaggtctacctttaaaactcattggctaaccaa

SEQ ID NO: 109962 - DNA, 551 bp, Homo sapiens
tttaattaaatgcaagctgagtcatttcaacctgcaaccttcaggtaacaggagttacccaagctccaggaattatgattgtggggtaaacccattctcttgttttcttgcggttctattttataacgcactagaggagacagagacgtcattgcttcacccagggcaagaggacaaaggaggatgcatggaaatacaaacagcccttctcctccaggccataccgactgtccaactagcaacagacttcacctggttttggagcaatctgaatttggaatatgccagagaaaacttctatcaggcaagatggaagactcctaggataggtctctctcatggagggattggtaataaaaaaatcatgggaaaagaaataagggagggtggaaaaaacacaccttagaaaacaacttctgatgtcccggggctacacaatgggggagctgagcacttaggaaggagagggaaaatattctgtttccggagacagctccaagaatcatgagtaggtgtgagaaacaaggaagcttacagatttaaaaaaaaaa

SEQ ID NO: 109963 - DNA, 460 bp, Homo sapiens
tttacactgccctcaagaccaatactccacatacaccctccctccctgccattcttatccttcaaacattccagcacagtagataatttttgaatttctttcattcattcaacatttatttactgagcacttactgctctgggcactgggaatacagaggtgaacaagaggaaacaaagcccctgtttaacaaatcttccaggctaaagcggaaaacacagcacagaaaggaatagggcagggggtagatccagaaagcacttgcagcccagcataaaaactggatgttattctaggtgagatggaaaggcaatggaggactctgaagagagaagtaacactgacctgcaaacctttgctcgagctgttgccaactgtgcctagaacaacactcttttccatcatttgtcaaattcttcaaagcccaactcaaaagtcactacctccatggtgccgtctc

SEQ ID NO: 109964 - DNA, 234 bp, Homo sapiens
ggaccagtagtcattcttcaaggttcttcacctcttaccaattttttaaccaactgttaactgttttcaagcccagtcactctatcctggtaaaggaacatgagccaataactttcatgatgtaaaatcaatggctgaactctgtatttttagttttctgaaaccctttctcttggttgctttatatatatatgtatattttttcccattctccattgcagtgttgtcattcta

SEQ ID NO: 109965 - DNA, 484 bp, Homo sapiens
taataagggttggtgggcctgaagtgaacatcctctcagggaagggatagacatcaagtgagaggatgccaggcaaagggccacccctagtaacagctgcttgcatgtgcagagggagtgcccgaggaggtgggagctctcgggggtcactagggggcgctgtgactatgactggatgccgtgttctgcctgtcttcttgccggattgtgagatcccagagccgcagatggcatccagttgtgtctgggttcccggcaccccatgctccctctgtgaccttggtaaatcgtagtttagtaaatgttgagtaagcggcagggggtggggctcatccccattgttccacttcatagggcaccgtgttttcccttctaaccccctactctgacactcgtccatccttcgaggctcaaaacggacttgatccctactgggaacaacccccattatcagttggttctcagactctaccctagtgtccag

SEQ ID NO: 109966 - DNA, 293 bp, Homo sapiens
gggagattgaggctgcagtgagccatgattgtgcctctgcactccagctagggcaacagagcaagaccctgtcccccttcccccccagaaaaaccacggaaatactgaaagaatgggactgatgggaaaggctcttttaggtaaaaagataataaatatctgtaaaacagataattctgtatattggtgttacagccacttttgttttaatattcaccatgatgttgttttgtgataacaaatcatccaaaattaatacaagaactctcaactattattatagataaactatt

SEQ ID NO: 109967 - DNA, 601 bp, Homo sapiens
atgtcaactgtggatgatctgtgatgtgtataaaaaaaattcacgcgcttttttccaaagatggttttgggaacatcactagttaaagaggaaggagctagcaggaggggcaaaaaagggaggttaggcagtgaggaggcaaatgattacattcttgtgagtcggtgattagcctcagtaaatctgcattttacctgtgaaaagagggagcagaggaaaattttatgtatgcattcatctcagggtaggtagagggattatggttattattactgttattttttagacggagtctcgctctgtctcccaggctggagtgcagtggcgcggtctcggctcactgtaacctccgcctcccgggttcacaccattctcctgcctcagcctcctgagtagctgggactacaggtgcccgccaccacgcccggctaattttttgtacttttttgtatttttagtagagacggggtttcaccgtgttggccaggatggtctcaatctcctgacctcgtgatccgcccacctcggcctcccaaagtgctgggattacaggcgtgagccaccgcacccggccgatttctggtcttttacttgtgaagat

SEQ ID NO: 109968 - DNA, 1084 bp, Homo sapiens
cccctttccactgcaaccccttggcatactctgcctcctataaaggggcattagagtagcctgtggcaactttaggatatagaaaaggggaaattgaaatgggagtacattttatttgggtttagtgagagtttatgtgctttgcagtctttttgtaaatagctaagtaattgttaagtatggcaatgtcagttctattcctaactgctcgccatgaagtttacttagtatcataatgtgaacctgcagggccagagttattctgctatatataaaagtgccctatagcatctacaattgggagtacgtaatggaaaagaagatagtagctattaatacgaatattgttatttttctgaattttgtgatgtttgtggtatccatcagcacttttatatttgtaaatttttcccatttcttttcttcattttctaaacacttttcatacaatttatttgttactttgcattccttttttcttagtgcggtgtccaaaattgtaagaatcctttatcccacaaaaaattgatcctgtcttttacagaattgcccagcagatgtctttttcatttcctttgcttgtggtttgcccatctgtcagctgtgaatgacccaaacaacgtgacacgctatttctaactcaacagtcctggaactttcttgacctttgacaaagccatcagatcaccatcaccatcattattgtttatagaaacatgaaaattcaaccataaaaagtcatcttgggctgagcatggtggctctaacatgtaatcccagcactttgggagcctaagatctttaccatgctggattggaagagaaaagaccatcactaaagcaaatggatcaaatggagttataaatcaactctgtactctacaggattgactcaactgcagacatctccaatacactccctcatggctttattttttctgcttatgtggaaaaataacagtaaatacagttaactatcccaagacagaagagtattattaaaaaagaatacaacgttattgatttttcaagacataatcagatatttttaaactctgatttaataaaacataatgtaatttca

SEQ ID NO: 109969 - DNA, 563 bp, Homo sapiens
atgccaaagttcatgagttgagagatgaagaagaccaaaaagaaaatcttaaagacatgataaattggggcaggagggaggagatggcttctttgctgcattttctccaaaaaacatttctgattttatttccaatttgcttagcaggtatgctcactctttcactaaccttgagagacattgtcagatgtgcataagggaagaacatgaaggacgacggataaactgtacacagacacagcacatggagtctgagtcatttgttttctctgacagatctttaccatgctggattggaagagaaaagaccatcactaaagcaaatggatcaaatggagttataaatcaactctgtactctacaggattgactcaactgcagacatctccaatacactccctcatggctttattttttctgcttatgtggaaaaataacagtaaatacagttaactatcccaagacagaagagtattattaaaaaagaatacaacgttattgatttttcaagacataatcagatatttttaaactctgatttaataaaacataatgtaatttca

SEQ ID NO: 109970 - DNA, 521 bp, Homo sapiens
ctctggaggctggaaatccaacaacagagtgccagcatgatcaggttctggagaggaccctcttcctgtttgcagactgctgacttcttattgtatattccaatggtagaaagagagcaagagaactctctggagtcttttttttataagggtgctaaccccatttaaggaggtttcccctcataatctaattatctctcaaaagccatacctttcaacaccattgcattgaagatctttaccatgctggattggaagagaaaagaccatcactaaagcaaatggatcaaatggagttataaatcaactctgtactctacaggattgactcaactgcagacatctccaatacactccctcatggctttattttttctgcttatgtggaaaaataacagtaaatacagttaactatcccaagacagaagagtattattaaaaaagaatacaacgttattgatttttcaagacataatcagatatttttaaactctgatttaataaaacataatgtaatttca

SEQ ID NO: 109971 - DNA, 204 bp, Homo sapiens
cagtgcctggtacgtggtgagaagtgatgaccatgagctattgtaattatgagacaaataatgtaatttcaatgtttgctgagaggagagatcccttcaattaagctatcaggaagcccagatccatctcgattttcccagtgctaggggattccacgtgctaatgctcagagcccaggacagaggtggtgtctcagagggagg

SEQ ID NO: 109972 - DNA, 151 bp, Homo sapiens
ctgagatcccctcctcggctgagaccttgcatggctttccagccttctaatggagagtctatagttctaagattttatgatttcaaaagtataagggtgtagagtacatgcatataatttttcaggccaagatcgattctatctctctacc

SEQ ID NO: 109973 - DNA, 202 bp, Homo sapiens
caacaccagtgacccacaaagatctctcttcagtgggtgtttgcctccttcctggtgctctgtgggttgcttttgcatttcttgtggacagaggcctctctctctcaggtgaagagcttccttagaggaagatagaatacagcccagagagcaggccagagaccccttgctccctcccgcaaagactgggaaaggagccatt

SEQ ID NO: 109974 - DNA, 345 bp, Homo sapiens
tgcggggactgacaagggtgctgctgaggtcacgggcagaaaacatctcggcccacgcaggggaggagccactgggccgactgtcccttgcagttcttttcgtccgcggcaggtcacgtgctcatcttgcagctctcactgcactctgcccacattgcttcgagaatccgaatgtgttgctgaggtcccctgaggcattcgttgctgtcccaagggtgtagggcgtcacacgcagcccgggggcgcgagcatctgccactcaggagccctgctgtccctagcaggtggctgcggctctgagccgctctccttacccacatggggccttgcagctctccttaccca

SEQ ID NO: 109975 - DNA, 496 bp, Homo sapiens
ccagcctataaacaagtttttttgtttatttttcatttcattattttcattcagagttctttatgtcacttgtcccaaactgcactacacattcctgtcaaaggccaacactcaatagttcacacaccaaagtgatgccaacagttaacaaactccaactaataacatcacacttacccacacacatcactcactgtcctcttaccctgctttacttgttttttgcacataacccttacatttgacagtttgcattctgtcaatctctccaaaatataagctccataagggagaggagtgttttatttgctgctgtatccccagcatctcgcacagtagacttaacagacagaaataaatgaaccattaaacgtctacacatggagccctttgcttttcagaagcctatttttgtgtaagcctgaaaatgcaagaataactgcagaagtcccttttaatactctaaatgaatctttgtgaaatcttattcttggtt

SEQ ID NO: 109976 - DNA, 248 bp, Homo sapiens
cagtcattgattagatttggatttaataaatttaagcctggccaataattagtgggaaccaaaccaaggcaacctatagtaaatggagcattgcatcgaagatctcagttcttcaaataaggcacagataaaggatctctatgtattaccctcctgttcttggatttaattgttcaaatgtttcacccaaaacctcaatttcaggctaatatttaggcattctcttctatgttatacctcaggtaatt

SEQ ID NO: 109977 - DNA, 352 bp, Homo sapiens
gggacagaggcacaacatccagtgttaaaaacagaagaaaccaaacagagcaaacttaagacattaaacctgtacaaatgcatggagtctatgtctaggacaacagtaatggcttgttttgttttcctccatttgtctgtgatgattcttgtcagatttcatactacacacactatctatggtgtcttagataaggctgtgatgacagactatttttcctgattacttctggtacacttttaagagcttaagatagcaccatgcatctatcagatgtgctgtttggatcgtactgtttgaaaacaaaattaaacggcagctgaataatggggtggctgccagagacaccttg

SEQ ID NO: 109978 - DNA, 402 bp, Homo sapiens
tagtgacacccgggtcctgtcgctgtgcccgggtggtgctgctggggcatcagctttcctcactcctggcagccagccccagtctcttccctttgcctggatgtttgcagtagctaccttgctgacctcgttgctcttggtcttttcattgtctccagttgacttggaacgctactgccaggatgatctttctgaaatactgttttcatctgtcgcctggtcagaagtgttaatgtcatattgcctctgtggcttgagtctcacaggctcaccctcttttataaccttttataacctgctgtcgacggatcatctgtgactcatctacacacctctggctcctgttattatttgcctgccttttcatcactgcggtgaattgcatatttcattattttgtct

SEQ ID NO: 109979 - DNA, 4112 bp, Homo sapiens
  misc_feature (4)..(7): n is a, c, g, or t
ggannnnggcccccgccccctactcccttccctcaggccccaggaagttgcaagagtaccatttgtcgcacactcggggaccgcgggtggccggaggagatgaaaccgtcttggctgcagtgtcgtaaagtcaccagcgccggggggctcggagggcccttgcctgggtcctctccggcccggggagccggtgcggccctcagggctttagtggtcccgggcccgcggggcggtctcgggggccggggatgcagggcactgtcctccggcagtggcagcgagtacaagacccacttcgcagcctcggtgaccgaccccgagaggttctggggcaaagctgccgagcagatcagctggtacaagccctggaccaaaacgctggagaacaaacactcgccctctaccaggtggtttgtggaaggaatgcttaacatttgttacaatgccgttgatcgtcatattgaaaatggtaaaggggataagattgctatcatctatgacagtcctgttacaaacactaaagcaacctttacctataaagaagttctggagcaggtctccaagctggctggtgtcttggtcaagcatggcatcaagaaaggtgacactgtggttatctacatgcctatgatcccacaggcgatgtataccatgttggcatgtgcaaggataggtgccatccacagtctcatatttggaggatttgcttccaaagaactaagtagtcgcattgatcatgtaaagcccaaggtggttgttacagcatcatttggcattgaacctggaaggagggtagagtacgtaccacttgtagaagaagcgctaaaaataggacaacacaaaccagacaaaattctcatttataatcgtccaaatatggaggcggttcctttggctcccggtcgtgaccttgattgggatgaagagatggcaaaagcccagtcacatgactgtgttcctgttctttcagaacacccactgtatattctttacacatctggcacaacggggttacctaagggtgtgattaggcccactgggggatacgctgtcatgctacactggtcaatgtcttccatatacggacttcaacccggagaggtgtggtgggcagcttctgacttaggctgggttgttggacattcctatatctgctatggacctcttcttcatgggaacacaacagttttatatgaggggaagcctgtgggaacaccagatgctggcgcttatttccgtgtgcttgcagagcatggagtagctgccttgtttacagcaccaactgcaattagagcaatccgtcaacaggaccctggggcagctttggggaagcagtactctctgacaaggttcaaaacattatttgtggctggagaacgatgtgatgtagagaccctggaatggtccaaaaatgtcttcagagtacctgtcttagaccattggtggcaaactgagactggatctccaattactgcgtcatgtgttggattaggcaattctaaaacacctccaccagggcaagcaggaaaaagcgtcccaggatacaatgttatgattttggatgacaacatgcaaaaactgaaggctcggtgtttaggaaatattgtggtaaagttaccattgccacctggggctttttcaggactctggaagaatcaggaagcattcaagcatttatactttgaaaaatttcctggatattatgataccatggatgctggttacatggatgaagaaggctatttgtatgttatgtctcgagtggatgatgtaataaatgttgcaggtcacagaatttctgcaggcgccattgaagagtcaatcctttcccatggtaccgtggcagactgtgctgttgttggcaaggaagatcccttaaaaggtcatgtccccttagcactctgtgtattgagaaaagatataaatgcaacagaggagcaagttttggaagaaattgtgaaacacgttagacagaacattggccctgtggctgcttttcgaaatgcagtgtttgtcaaacagctacccaaaaccagatctggcaagatcccccgatcagctttatctgccattgtcaatggcaagccatacaagataacttctacaattgaagaccccagcatttttggccacgtagaagaaatgctgaagcaagcataatgagtttgtcttattcctattttgagttgatttaatttcttaattgaaattaaattatttgagttgtttctcagaaataaatatttcagtagaaattacttgcaaaatgaaatgtgaattgtaaaacttggcctaaacaaatctaatgaaaacatgtgaaagacctgtgccttttttttggtttgaccctgttagcattgttattagttatctataacatggcttattgaatgtcatctactgctttaggaaaaacgtatctagtgtattatttttaaaattgtacctcccaagaagaacactttaattgaaagcaacactaatatagagccacttcctgaaaccaagaatctgtagttttgatccaaaatctaaaacttaaagtcagaaaataattaaaatttttcttgtagaaattttagatattttctagtattctttagatgctcacattgttttaaataaaatagatgaaatgggaagtttaggtaatcatctagacagatgaaattattatctaggtaggagggcttttctatacattttctgagggaaagcagaacaccggggttatagctataccttcaggtcttttgacttaggcaaggaaaaccacatgtctgacctggttcagcatgtaatccgagcactttgggaggctgaggcaggcggatcacttgaggtcagcagtttgagacgagcctggccaacatggtgaaaccctgtagctactgaaaatacaaaaataagccaggcgtggtggcgggaggctgaggcaaggagaatcacttgaatacaagaggcagaggttgcagtgagccaagttcccccactgtactccagcctgggtgacagagtaagactccatctcaaaacaacaaaaacaacaaaaaaaccacatgcctggcggagaacaaagagatcatttagtccaatctcttcatggagatgagggctcctgggagcccctcttcatgtctcaggttcttagttgactatgtttatccaaatgattccagattcctgtggaaacaaggaatcgatgtacaaatggggtagggtggcaaggaaaactcttaagagagaaacatcaaggttttcacattaggttaaagacaagaaggtttctaggcaggtagtgtaatgtctaggtgattttgaagtgaacttaagccactaggtttgagggacaaaggacagtagaaaatggtgaagactgcagatcacctgctatacctcaaggagcagcggacccagcagaatatggcccaaaaaggaggcaggtctcctgttgcaagagcctctgtttttttaaagagaaaacaaagaatcctggtttttatgtgaaatctctaattttaaaataataactcattaaaaatattgtaatgtccaaaagtatctttccatttaacttctaaaaatctcttaaatgttttttttaaataattgtaaagtgagtttttgttaagcttataggaatgggccagttaactaaggtagacagatgtaggaaattaaatatttgatttacttagggatctatatgacatcagttatcaaagaatacattttaacccaaaagtataccatgctcattgtatctttgatcgttcttcaagtatttctcaatcttttaatctatcaggaacattactatcaagagcagattgttgtaacataatactcaggatacatgaaatgtatgtgagagataaatagataatagaaagtttattgttataaaaatgacctacaacttatataaaaaaattctgaaaatgttgactttttttggactgaaggctgcaaaataaatggcttctcaaagtaaattcctatttacttaaattgccttcttgattgttacacctggaaaaatatattcatctactttttccttttaattatgttagtagactgaattaaaccagctacatagacactctctc

SEQ ID NO: 109980 - DNA, 3834 bp, Homo sapiens
  misc_feature (101)..(101): n is a, c, g, or t
ggcgatgtgcatgtgcctcgtggttacagcagtcaggctgttacgcctgaatataccgagcgtatagcggagcccaacgcgttgcgactcaaaactcagcnctgctaccaggtgtagctgtgtccacgcaggctcaacgctatgtcagtaaggccgtatataggcatatcttccaagctgcgaaaagggtgctagatagcatatcagtctatgagcacggcctgttccaaagcatctcaaagtcaaacttcacctatagaagaagttctgacgcagagtctccaagctggctggtgtcttggtcaagcatggcatcaagaaaggtgacactgtggttatctacatgcctatgatcccacaggcgatgtataccatgttggcatgtgcaaggataggtgccatccacagtctcatatttggaggatttgcttccaaagaactaagtagtcgcattgatcatgtaaagcccaaggtggttgttacagcatcatttggcattgaacctggaaggagggtagagtacgtaccacttgtagaagaagcgctaaaaataggacaacacaaaccagacaaaattctcatttataatcgtccaaatatggaggcggttcctttggctcccggtcgtgaccttgattgggatgaagagatggcaaaagcccagtcacatgactgtgttcctgttctttcagaacacccactgtatattctttacacatctggcacaacggggttacctaagggtgtgattaggcccactgggggatacgctgtcatgctacactggtcaatgtcttccatatacggacttcaacccggagaggtgtggtgggcagcttctgacttaggctgggttgttggacattcctatatctgctatggacctcttcttcatgggaacacaacagttttatatgaggggaagcctgtgggaacaccagatgctggcgcttatttccgtgtgcttgcagagcatggagtagctgccttgtttacagcaccaactgcaattagagcaatccgtcaacaggaccctggggcagctttggggaagcagtactctctgacaaggttcaaaacattatttgtggctggagaacgatgtgatgtagagaccctggaatggtccaaaaatgtcttcagagtacctgtcttagaccattggtggcaaactgagactggatctccaattactgcgtcatgtgttggattaggcaattctaaaacacctccaccagggcaagcaggaaaaagcgtcccaggatacaatgttatgattttggatgacaacatgcaaaaactgaaggctcggtgtttaggaaatattgtggtaaagttaccattgccacctggggctttttcaggactctggaagaatcaggaagcattcaagcatttatactttgaaaaatttcctggatattatgataccatggatgctggttacatggatgaagaaggctatttgtatgttatgtctcgagtggatgatgtaataaatgttgcaggtcacagaatttctgcaggcgccattgaagagtcaatcctttcccatggtaccgtggcagactgtgctgttgttggcaaggaagatcccttaaaaggtcatgtccccttagcactctgtgtattgagaaaagatataaatgcaacagaggagcaagttttggaagaaattgtgaaacacgttagacagaacattggccctgtggctgcttttcgaaatgcagtgtttgtcaaacagctacccaaaaccagatctggcaagatcccccgatcagctttatctgccattgtcaatggcaagccatacaagataacttctacaattgaagaccccagcatttttggccacgtagaagaaatgctgaagcaagcataatgagtttgtcttattcctattttgagttgatttaatttcttaattgaaattaaattatttgagttgtttctcagaaataaatatttcagtagaaattacttgcaaaatgaaatgtgaattgtaaaacttggcctaaacaaatctaatgaaaacatgtgaaagacctgtgccttttttttggtttgaccctgttagcattgttattagttatctataacatggcttattgaatgtcatctactgctttaggaaaaacgtatctagtgtattatttttaaaattgtacctcccaagaagaacactttaattgaaagcaacactaatatagagccacttcctgaaaccaagaatctgtagttttgatccaaaatctaaaacttaaagtcagaaaataattaaaatttttcttgtagaaattttagatattttctagtattctttagatgctcacattgttttaaataaaatagatgaaatgggaagtttaggtaatcatctagacagatgaaattattatctaggtaggagggcttttctatacattttctgagggaaagcagaacaccggggttatagctataccttcaggtcttttgacttaggcaaggaaaaccacatgtctgacctggttcagcatgtaatccgagcactttgggaggctgaggcaggcggatcacttgaggtcagcagtttgagacgagcctggccaacatggtgaaaccctgtagctactgaaaatacaaaaataagccaggcgtggtggcgggaggctgaggcaaggagaatcacttgaatacaagaggcagaggttgcagtgagccaagttcccccactgtactccagcctgggtgacagagtaagactccatctcaaaacaacaaaaacaacaaaaaaaccacatgcctggcggagaacaaagagatcatttagtccaatctcttcatggagatgagggctcctgggagcccctcttcatgtctcaggttcttagttgactatgtttatccaaatgattccagattcctgtggaaacaaggaatcgatgtacaaatggggtagggtggcaaggaaaactcttaagagagaaacatcaaggttttcacattaggttaaagacaagaaggtttctaggcaggtagtgtaatgtctaggtgattttgaagtgaacttaagccactaggtttgagggacaaaggacagtagaaaatggtgaagactgcagatcacctgctatacctcaaggagcagcggacccagcagaatatggcccaaaaaggaggcaggtctcctgttgcaagagcctctgtttttttaaagagaaaacaaagaatcctggtttttatgtgaaatctctaattttaaaataataactcattaaaaatattgtaatgtccaaaagtatctttccatttaacttctaaaaatctcttaaatgttttttttaaataattgtaaagtgagtttttgttaagcttataggaatgggccagttaactaaggtagacagatgtaggaaattaaatatttgatttacttagggatctatatgacatcagttatcaaagaatacattttaacccaaaagtataccatgctcattgtatctttgatcgttcttcaagtatttctcaatcttttaatctatcaggaacattactatcaagagcagattgttgtaacataatactcaggatacatgaaatgtatgtgagagataaatagataatagaaagtttattgttataaaaatgacctacaacttatataaaaaaattctgaaaatgttgactttttttggactgaaggctgcaaaataaatggcttctcaaagtaaattcctatttacttaaattgccttcttgattgttacacctggaaaaatatattcatctactttttccttttaattatgttagtagactgaattaaaccagctacatagacactctctc

SEQ ID NO: 109981 - DNA, 1970 bp, Homo sapiens
  misc_feature (4)..(7): n is a, c, g, or t
ggannnnggcccccgccccctactcccttccctcaggccccaggaagttgcaagagtaccatttgtcgcacactcggggaccgcgggtggccggaggagatgaaaccgtcttggctgcagtgtcgtaaagtcaccagcgccggggggctcggagggcccttgcctgggtcctctccggcccggggagccggtgcggccctcagggctttagtggtcccgggcccgcggggcggtctcgggggccggggatgcagggcactgtcctccggcagtggcagcgagtacaagacccacttcgcagcctcggtgaccgaccccgagaggttctggggcaaagctgccgagcagatcagctggtacaagccctggaccaaaacgctggagaacaaacactcgccctctaccaggtggtttgtggaaggaatgcttaacatttgttacaatgccgttgatcgtcatattgaaaatggtaaaggggataagattgctatcatctatgacagtcctgttacaaacactaaagcaacctttacctataaagaagttctggagcaggtctccaagctggctggtgtcttggtcaagcatggcatcaagaaaggtgacactgtggttatctacatgcctatgatcccacaggcgatgtataccatgttggcatgtgcaaggataggtgccatccacagtctcatatttggaggatttgcttccaaagaactaagtagtcgcattgatcatgtaaagcccaaggtggttgttacagcatcatttggcattgaacctggaaggagggtagagtacgtaccacttgtagaagaagcgctaaaaataggacaacacaaaccagacaaaattctcatttataatcgtccaaatatggaggcggttcctttggctcccggtcgtgaccttgattgggatgaagagatggcaaaagcccagtcacatgactgtgttcctgttctttcagaacacccactgtatattctttacacatctggcacaacggggttacctaagggtgtgattaggcccactgggggatacgctgtcatgctacactggtcaatgtcttccatatacggacttcaacccggagaggtgtggtgggcagcttctgacttaggctgggttgttggacattcctatatctgctatggacctcttcttcatgggaacacaacagttttatatgaggggaagcctgtgggaacaccagatgctggcgcttatttccgtgtgcttgcagagcatggagtagctgccttgtttacagcaccaactgcaattagagcaatccgtcaacaggaccctggggcagctttggggaagcagtactctctgacaaggttcaaaacattatttgtggctggagaacgatgtgatgtagagaccctggaatggtccaaaaatgtcttcagagtacctgtcttagaccattggtggcaaactgagactggatctccaattactgcgtcatgtgttggattaggcaattctaaaacacctccaccagggcaagcaggaaaaagcgtcccaggatacaatgttatgattttggatgacaacatgcaaaaactgaaggctcggtgtttaggaaatattgtggtaaagttaccattgccacctggggctttttcaggactctggaagaatcaggaagcattcaagcatttatactttgaaaaatttcctggatattatgataccatggatgctggttacatggatgaagaaggctatttgtatgttatgtctcgagtggatgatgtaataaatgttgcaggtcacagaatttctgcaggcgccattgaagagtcaatcctttcccatggtaccgtggcagactgtgctgttgttggcaaggaagatcccttaaaaggtcatgtccccttagcactctgtgtattgagaaaagatataatgcacacagagcgtttggagtgtgcgtagacgatccccatcacttt

SEQ ID NO: 109982 - DNA, 1275 bp, Homo sapiens
  misc_feature (4)..(7): n is a, c, g, or t
ggannnnggcccccgccccctactcccttccctcaggccccaggaagttgcaagagtaccatttgtcgcacactcggggaccgcgggtggccggaggagatgaaaccgtcttggctgcagtgtcgtaaagtcaccagcgccggggggctcggagggcccttgcctgggtcctctccggcccggggagccggtgcggccctcagggctttagtggtcccgggcccgcggggcggtctcgggggccggggatgcagggcactgtcctccggcagtggcagcgagtacaagacccacttcgcagcctcggtgaccgaccccgagaggttctggggcaaagctgccgagcagatcagctggtacaagccctggaccaaaacgctggagaacaaacactcgccctctaccaggtggtttgtggaaggaatgcttaacatttgttacaatgccgttgatcgtcatattgaaaatggtaaaggggataagattgctatcatctatgacagtcctgttacaaacactaaagcaacctttacctataaagaagttctggagcaggtctccaagctggctggtgtcttggtcaagcatggcatcaagaaaggtgacactgtggttatctacatgcctatgatcccacaggcgatgtataccatgttggcatgtgcaaggataggtgccatccacagtctcatatttggaggatttgcttccaaagaactaagtagtcgcattgatcatgtaaagcccaaggtggttgttacagcatcatttggcattgaacctggaaggagggtagagtacgtaccacttgtagaagaagcgctaaaaataggacaacacaaaccagacaaaattctcatttataatcgtccaaatatggaggcggttcctttggctcccggtcgtgaccttgattgggatgaagagatggcaaaagcccagtcacatgactgtgttcctgttctttcagaacacccactgtatattctttacacatctggcacaacggggttacctaaggtactcactctcttagagataactatctatagcagtagatttactttgcaccaagaatgtttgatcactgactggaaatgtttgcagactttactttgaagtttagagagttacttcatttgcttttatttttttttcctgtgcccagtctggagtgcagtggcgtgatctcacctgacacagttactccatatcttaaagagattttgtgtttagtgctaaatataaaaacatttattatttaacatcaaatat

SEQ ID NO: 109983 - DNA, 829 bp, Homo sapiens
gacctctttatcttctcttctttgtttcttatatctggtaagttactaagtctcagattttcctttgaagtgtctgttgggttcattccaccttcagtattccccttgcctttgagctctggcagctgcattatcctctgtcctgatttaaagtttcctaatcactcatctctattctctctgctttttgatacacactgcacactgctcccagagtccttttatgaaggcttgttcctctcataggactctctggccaccttcttgtgttctataatatctaatatattctgcctagcattaaaggcagagaaatttatttttcttcaaaacaattgtcattacatatgtaatttgttcatttaatttattttgtttattccctatagtcctccctctaagtgttccctgggaaacaaattttcatattaaatggatcaactataaactttggaataagcagacaaccaccacaacaataactctatctgctgcttcttttgagggatggctatatatatgagaatgggtacattgtctagaagccatttacctcctcacaaagtacagagattttaaaaaatttgactcactgaaagcagctatgagccatgggagccctacaacctttatatgtacatattttattttagtcccacttagttcaatgaattagatcaacctttttatatacatattttcagtattctcaccttctctgcatctggggcagaatatcaaatttgggttaaaaattagtgagattactttgcaaaaaattagctctgattgtaaaaatgattttcatgtaaaagattaactgaatgac

SEQ ID NO: 109984 - DNA, 509 bp, Homo sapiens
cattctttctacagaaatatatagaagactcttaagaggaactccaactctagagaaaataccatctaggtccaatagttttgctaactgaactgtttatttttttactctggaaagctacagatgagtattaatatattaggttcaaagttccctatttttaaactttccatatgaatattacaagacaatggggaaaacaacattgcatataattgtttaattatagaaagagtagaagaaattcaaggaagagtattcacctgaccctaattttttttccagataacttctacaattgaagaccccagcatttttggccacgtagaagaaatgctgaagcaagcataatgagtttgtcttattcctattttgagttgatttaatttcttaattgaaattaaattatttgagttgtttctcagaaataaatatttcagtagaaattacttgcaaaatgaaatgtgaattgtaaaacttggcctaaacaaatctaatgaaaacatgtg

SEQ ID NO: 109985 - DNA, 2323 bp, Homo sapiens
  misc_feature (4)..(7): n is a, c, g, or t
ggannnnggcccccgccccctactcccttccctcaggccccaggaagttgcaagagtaccatttgtcgcacactcggggaccgcgggtggccggaggagatgaaaccgtcttggctgcagtgtcgtaaagtcaccagcgccggggggctcggagggcccttgcctgggtcctctccggcccggggagccggtgcggccctcagggctttagtggtcccgggcccgcggggcggtctcgggggccggggatgcagggcactgtcctccggcagtggcagcgagtacaagacccacttcgcagcctcggtgaccgaccccgagaggttctggggcaaagctgccgagcagatcagctggtacaagccctggaccaaaacgctggagaacaaacactcgccctctaccaggtggtttgtggaaggaatgcttaacatttgttacaatgccgttgatcgtcatattgaaaatggtaaaggggataagattgctatcatctatgacagtcctgttacaaacactaaagcaacctttacctataaagaagttctggagcaggtctccaagctggctggtgtcttggtcaagcatggcatcaagaaaggtgacactgtggttatctacatgcctatgatcccacaggcgatgtataccatgttggcatgtgcaaggataggtgccatccacagtctcatatttggaggatttgcttccaaagaactaagtagtcgcattgatcatgtaaagcccaaggtggttgttacagcatcatttggcattgaacctggaaggagggtagagtacgtaccacttgtagaagaagcgctaaaaataggacaacacaaaccagacaaaattctcatttataatcgtccaaatatggaggcggttcctttggctcccggtcgtgaccttgattgggatgaagagatggcaaaagcccagtcacatgactgtgttcctgttctttcagaacacccactgtatattctttacacatctggcacaacggggttacctaagggtgtgattaggcccactgggggatacgctgtcatgctacactggtcaatgtcttccatatacggacttcaacccggagaggtgtggtgggcagcttctgacttaggctgggttgttggacattcctatatctgctatggacctcttcttcatgggaacacaacagttttatatgaggggaagcctgtgggaacaccagatgctggcgcttatttccgtgtgcttgcagagcatggagtagctgccttgtttacagcaccaactgcaattagagcaatccgtcaacaggaccctggggcagctttggggaagcagtactctctgacaaggttcaaaacattatttgtggctggagaacgatgtgatgtagagaccctggaatggtccaaaaatgtcttcagagtacctgtcttagaccattggtggcaaactgagactggatctccaattactgcgtcatgtgttggattaggcaattctaaaacacctccaccagggcaagcaggaaaaagcgtcccaggatacaatgttatgattttggatgacaacatgcaaaaactgaaggctcggtgtttaggaaatattgtggtaaagttaccattgccacctggggctttttcaggactctggaagaatcaggaagcattcaagcatttatactttgaaaaatttcctggatattatgataccatggatgctggttacatggatgaagaaggctatttgtatgttatgtctcgagtggatgatgtaataaatgttgcaggtcacagaatttctgcaggcgccattgaagagtcaatcctttcccatggtaccgtggcagactgtgctgttgttggcaaggaagatcccttaaaaggtcatgtccccttagcactctgtgtattgagaaaagatataaatgcaacagaggagcaagttttggaagaaattgtgaaacacgttagacagaacattggccctgtggctgcttttcgaaatgcagtgtttgtcaaacagctacccaaaaccagatctggcaagatcccccgatcagctttatctgccattgtcaatggcaagccatacaagataacttctacaattgaagaccccagcatttttggccacgtagaagaaatgctgaagcaagcataatgagtttgtcttattcctattttgagttgatttaatttcttaattgaaattaaattatttgagttgtttctcagaaataaatatttcagtagaaattacttgcaaaatgaaatgtgaattgtaaaacttggcctaaacaaatctaatgaaaacatgtgaaaga

SEQ ID NO: 109986 - DNA, 4164 bp, Homo sapiens
  misc_feature (4)..(7): n is a, c, g, or t
ggannnnggcccccgccccctactcccttccctcaggccccaggaagttgcaagagtaccatttgtcgcacactcggggaccgcgggtggccggaggagatgaaaccgtcttggctgcagtgtcgtaaagtcaccagcgccggggggctcggagggcccttgcctgggtcctctccggcccggggagccggtgcggccctcagggctttagtggtcccgggcccgcggggcggtctcgggggccggggatgcagggcactgtcctccggcagtggcagcgagtacaagacccacttcgcagcctcggtgaccgaccccgagaggttctggggcaaagctgccgagcagatcagctggtacaagccctggaccaaaacgctggagaacaaacactcgccctctaccaggtggtttgtggaaggaatgcttaacatttgttacaatgccgttgatcgtcatattgaaaatggtaaaggggataagattgctatcatctatgacagtcctgttacaaacactaaagcaacctttacctataaagaagttctggagcaggtctccaagctggctggtgtcttggtcaagcatggcatcaagaaaggtgacactgtggttatctacatgcctatgatcccacaggcgatgtataccatgttggcatgtgcaaggataggtgccatccacagtctcatatttggaggatttgcttccaaagaactaagtagtcgcattgatcatgtaaagcccaaggtggttgttacagcatcatttggcattgaacctggaaggagggtagagtacgtaccacttgtagaagaagcgctaaaaataggacaacacaaaccagacaaaattctcatttataatcgtccaaatatggaggcggttcctttggctcccggtcgtgaccttgattgggatgaagagatggcaaaagcccagtcacatgactgtgttcctgttctttcagaacacccactgtatattctttacacatctggcacaacggggttacctaagggtgtgattaggcccactgggggatacgctgtcatgctacactggtcaatgtcttccatatacggacttcaacccggagaggtgtggtgggcagcttctgacttaggctgggttgttggacattcctatatctgctatggacctcttcttcatgggaacacaacagttttatatgaggggaagcctgtgggaacaccagatgctggcgcttatttccgtgtgcttgcagagcatggagtagctgccttgtttacagcaccaactgcaattagagcaatccgtcaacaggaccctggggcagctttggggaagcagtactctctgacaaggttcaaaacattatttgtggctggagaacgatgtgatgtagagaccctggaatggtccaaaaatgtcttcagagtacctgtcttagaccattggtggcaaactggtataaagcactaaagacctctttatcttctcttctttgtttcttatatctgagactggatctccaattactgcgtcatgtgttggattaggcaattctaaaacacctccaccagggcaagcaggaaaaagcgtcccaggatacaatgttatgattttggatgacaacatgcaaaaactgaaggctcggtgtttaggaaatattgtggtaaagttaccattgccacctggggctttttcaggactctggaagaatcaggaagcattcaagcatttatactttgaaaaatttcctggatattatgataccatggatgctggttacatggatgaagaaggctatttgtatgttatgtctcgagtggatgatgtaataaatgttgcaggtcacagaatttctgcaggcgccattgaagagtcaatcctttcccatggtaccgtggcagactgtgctgttgttggcaaggaagatcccttaaaaggtcatgtccccttagcactctgtgtattgagaaaagatataaatgcaacagaggagcaagttttggaagaaattgtgaaacacgttagacagaacattggccctgtggctgcttttcgaaatgcagtgtttgtcaaacagctacccaaaaccagatctggcaagatcccccgatcagctttatctgccattgtcaatggcaagccatacaagataacttctacaattgaagaccccagcatttttggccacgtagaagaaatgctgaagcaagcataatgagtttgtcttattcctattttgagttgatttaatttcttaattgaaattaaattatttgagttgtttctcagaaataaatatttcagtagaaattacttgcaaaatgaaatgtgaattgtaaaacttggcctaaacaaatctaatgaaaacatgtgaaagacctgtgccttttttttggtttgaccctgttagcattgttattagttatctataacatggcttattgaatgtcatctactgctttaggaaaaacgtatctagtgtattatttttaaaattgtacctcccaagaagaacactttaattgaaagcaacactaatatagagccacttcctgaaaccaagaatctgtagttttgatccaaaatctaaaacttaaagtcagaaaataattaaaatttttcttgtagaaattttagatattttctagtattctttagatgctcacattgttttaaataaaatagatgaaatgggaagtttaggtaatcatctagacagatgaaattattatctaggtaggagggcttttctatacattttctgagggaaagcagaacaccggggttatagctataccttcaggtcttttgacttaggcaaggaaaaccacatgtctgacctggttcagcatgtaatccgagcactttgggaggctgaggcaggcggatcacttgaggtcagcagtttgagacgagcctggccaacatggtgaaaccctgtagctactgaaaatacaaaaataagccaggcgtggtggcgggaggctgaggcaaggagaatcacttgaatacaagaggcagaggttgcagtgagccaagttcccccactgtactccagcctgggtgacagagtaagactccatctcaaaacaacaaaaacaacaaaaaaaccacatgcctggcggagaacaaagagatcatttagtccaatctcttcatggagatgagggctcctgggagcccctcttcatgtctcaggttcttagttgactatgtttatccaaatgattccagattcctgtggaaacaaggaatcgatgtacaaatggggtagggtggcaaggaaaactcttaagagagaaacatcaaggttttcacattaggttaaagacaagaaggtttctaggcaggtagtgtaatgtctaggtgattttgaagtgaacttaagccactaggtttgagggacaaaggacagtagaaaatggtgaagactgcagatcacctgctatacctcaaggagcagcggacccagcagaatatggcccaaaaaggaggcaggtctcctgttgcaagagcctctgtttttttaaagagaaaacaaagaatcctggtttttatgtgaaatctctaattttaaaataataactcattaaaaatattgtaatgtccaaaagtatctttccatttaacttctaaaaatctcttaaatgttttttttaaataattgtaaagtgagtttttgttaagcttataggaatgggccagttaactaaggtagacagatgtaggaaattaaatatttgatttacttagggatctatatgacatcagttatcaaagaatacattttaacccaaaagtataccatgctcattgtatctttgatcgttcttcaagtatttctcaatcttttaatctatcaggaacattactatcaagagcagattgttgtaacataatactcaggatacatgaaatgtatgtgagagataaatagataatagaaagtttattgttataaaaatgacctacaacttatataaaaaaattctgaaaatgttgactttttttggactgaaggctgcaaaataaatggcttctcaaagtaaattcctatttacttaaattgccttcttgattgttacacctggaaaaatatattcatctactttttccttttaattatgttagtagactgaattaaaccagctacatagacactctctc

SEQ ID NO: 109987 - DNA, 1870 bp, Homo sapiens
  misc_feature (4)..(7): n is a, c, g, or t
ggannnnggcccccgccccctactcccttccctcaggccccaggaagttgcaagagtaccatttgtcgcacactcggggaccgcgggtggccggaggagatgaaaccgtcttggctgcagtgtcgtaaagtcaccagcgccggggggctcggagggcccttgcctgggtcctctccggcccggggagccggtgcggccctcagggctttagtggtcccgggcccgcggggcggtctcgggggccggggatgcagggcactgtcctccggcagtggcagcgagtacaagacccacttcgcagcctcggtgaccgaccccgagaggttctggggcaaagctgccgagcagatcagctggtacaagccctggaccaaaacgctggagaacaaacactcgccctctaccaggtggtttgtggaaggaatgcttaacatttgttacaatgccgttgatcgtcatattgaaaatggtaaaggggataagattgctatcatctatgacagtcctgttacaaacactaaagcaacctttacctataaagaagttctggagcaggtctccaagctggctggtgtcttggtcaagcatggcatcaagaaaggtgacactgtggttatctacatgcctatgatcccacaggcgatgtataccatgttggcatgtgcaaggataggtgccatccacagtctcatatttggaggatttgcttccaaagaactaagtagtcgcattgatcatgtaaagcccaaggtggttgttacagcatcatttggcattgaacctggaaggagggtagagtacgtaccacttgtagaagaagcgctaaaaataggacaacacaaaccagacaaaattctcatttataatcgtccaaatatggaggcggttcctttggctcccggtcgtgaccttgattgggatgaagagatggcaaaagcccagtcacatgactgtgttcctgttctttcagaacacccactgtatattctttacacatctggcacaacggggttacctaagggtgtgattaggcccactgggggatacgctgtcatgctacactggtcaatgtcttccatatacggacttcaacccggagaggtgtggtgggcagcttctgacttaggctgggttgttggacattcctatatctgctatggacctcttcttcatgggaacacaacagttttatatgaggggaagcctgtgggaacaccagatgctggcgcttatttccgtgtgcttgcagagcatggagtagctgccttgtttacagcaccaactgcaattagagcaatccgtcaacaggaccctggggcagctttggggaagcagtactctctgacaaggttcaaaacattatttgtggctggagaacgatgtgatgtagagaccctggaatggtccaaaaatgtcttcagagtacctgtcttagaccattggtggcaaactggtataaagcactaaagacctctttatcttctcttctttgtttcttatatctgagactggatctccaattactgcgtcatgtgttggattaggcaattctaaaacacctccaccagggcaagcaggaaaaagcgtcccaggatacaatgttatgattttggatgacaacatgcaaaaactgaaggctcggtgtttaggaaatattgtggtaaagttaccattgccacctggggctttttcaggactctggaagaatcaggaagcattcaagcatttatactttgaaaaatttcctggatattatgataccatggatgctggttacatggatgaagaaggctaatttttaatttaaacagctcgagatatgagttctgcaaaatggtggtccgcatccttggccctctggatatactca

SEQ ID NO: 109988 - DNA, 423 bp, Homo sapiens
cccccagcacttttaagttccattgtcttctggtcttcattgtttctaatgagagctcagccattatttgtattgttcctttgtatgttttttgttgttgctttcaagattttatctttatcgtagatctttagaagtttgattatgataggccgggtgtggtgcctcatgcctgtaacccagcactttgggaggccgaggtgggcagatcaccaggtcaggagatcgagaccatcctggataacacggtgaaaccccgtctctactgaaaatacaaaaagttagccgggcatggtggcaggcgcctgtagtcccagctactcaggaggctgaggcaggagaatggcatgaacccaggaggtggagcttgcagtgagccgagattgcaccactgcattccagcctgggtgacagagcgagaca

SEQ ID NO: 109989 - DNA, 697 bp, Homo sapiens
ggccagatttttcttgaaaaccagatttttaaggcaaatatgtttagttaaaactaggaattgattgatgtttaaaattttaaaataccctggactgggaatcagtaagcctggaatctcgttttgactctcccaataaattagtagtgtgacatgttaactagccatttagcctctctcgatcttattttccatgtatgttaaatgaagcaatctttaagaacccctttagctgtgaaactatcattctgtgattctattcagatgattaaagtgtactggatgatagaagcaatgtctattcatagctccatgtatgttttctctttggccattggcttattcagaatttttcttggggtaagtttaaaggtttttattgacactggattggcaaaagtaatgtctaacaataaacactgtaatataggtgctgacatttggtaggcttttaaaattgtatatagcagctgaattttggacaattaaaaatctgtttctcttttgtacaaagtatttcaattctcagatacacatctttttacattttaacttctccgaaatcaatatattatttataatagatagtgtattagagtttaattgacagcgtttgttctttcttagtagttcataaaataatagtaactcttacaattaagaccattggattagaggaaatttagtaactttaata

SEQ ID NO: 109990 - DNA, 563 bp, Homo sapiens
aaactttcatgctaaatatggagtatcatgtccgccctgttaccaaaatgaaaactttggccgtaccttcggcagttaattaaggtgctcctacttccatctcagagctgagctgaggggaggcagggcacaccaggcctgtcatgtgcagttctcagccagagccagtgagttccccacagaagcaggcagcgttttcattcacgcctgccttgcctgcttctcgtttcttgctagatgaatggcatcatatgccgcaggtgtattagtaatttctgagtttgttccccactaaaaatgacctcattgttttgtgcttcttttccataattatacagtaacaggaaaataaaccagctctgagtacagcccacagcagaaatcttgtgctctttatgcaagtttgatttatagacgtgtactgcagagcagagtgactatgaaacattcatcttcccattgctagttgccatggaaatcgagtacacagagcagtgtcattccagtcctggtgatgcctgcagtagtttattcctttgttgttcccgtttcttaagcaactg

SEQ ID NO: 109991 - DNA, 161 bp, Homo sapiens
cactccagcctgggcaagagagcaagaccttgtctctgaatgaatgaatgagtgcttaagtgtctgtttttcatttaacactttgtgacagtttaagttgacaattcctttagtgttagtgacatttaaatgtttttagacattaaatgtttgttatatgc

SEQ ID NO: 109992 - DNA, 519 bp, Homo sapiens
aggagatgaagaagatttagcctcacacaaacatataaatggaaaagaggagtattttaatagccttttaagataattgtggatattcctttatgattgagaaaatcaacaagtaatttcttaaaggttggtagattttgaaactgtatcgatgacttttgtactccattgcattacaattcattggtctctcttatgcattggttgttttgaaaatagtgattcactaagttatgcagatcttgcaaatgctaacacattcattataccatatcaaataatcactttcattacacttatactgatttaatcataaaattcttgtgtgtgtgtgtgtgtgtgtgtgtgtgtgtgtgtgtgtgacagagtttcgttcttgttgcccaggctggagtgcacaatctcagctcactgcaacctctgcctccgggttcaagcgattctcctgcctcagtctcccgagtagctgggattacaggcatgcgccaccattcctggctaattttgtatttttattaa

SEQ ID NO: 109993 - DNA, 294 bp, Homo sapiens
gggttaccgtcttagccggtctacaggaaacacattccattgcctgcattctgctgtgttcatattgatctcagtaggatatgtgtaggttctattaccaagcaaaagaaaaaacatacagcataaagtgagctgtgtctgtggagcaaattttaaagggtatgttatggatgacttctgatgaaaggtgttttagttgtgccattattttgatcctcagccaaacaacatcagcccatgtgtcaagagaagaaaggattgtctgagggaatagtcccagagggtaacaccgaa

SEQ ID NO: 109994 - DNA, 247 bp, Homo sapiens
ccacgtttacagaagaatccaatttgagacttactctaatacagactgttttttaaggtttgaagaagacattagggagtggagaaacagaacaagatcttactttttattctagagacacagaataacaaagccttcttaacaaaagaaacttcagagaactttttttttttttttttttttgcctaaaaaataaaaagaagaaaaacaaagccataacttttattttggcaagtattttttgaat

SEQ ID NO: 109995 - DNA, 640 bp, Homo sapiens
ctcttctccattcttcctctgctccttgacgagagatctgtagacttccttgagtgcagcatctcagacatctggtattgactagaattccttattggacttccttgggtgtagcatctcagacatctagtataggctagaattccttagtagtagtatcagtgtccaggccttcctattttgtaaatgatagaggtttgtaaaaggagtatggcctttggaatgtactgttcataatcttaagtagttatggaagcatagtgaaaaggtcagggcagttctcattttgcatcaggaagcttttgacaaagtcctgttagttatcagatgatgatagccagcagtaaccattaagacagtcttttttttttttttaagtagaaatccagttaaggaagcatagcttgtcttttattaaagaggcactcagcaaaggggtgatgagacagaatgctgttattactgatgcttttgttttacattttcagtaattaacgtgctttgctcagtagtgacacattacctgaacttcaaaggatccccttagtacatcggtattgcagaggcattaaagcaatgagagcctgccaggatcttaatcacctctgtcctacatttggtcagagcctctccactttta

SEQ ID NO: 109996 - DNA, 440 bp, Homo sapiens
ggacagacaagacacaacgcacacaatcaccaatgtcaggattggggacggttgctatggaggacagacaagacacaacacacacaatcactgatgtcaggattggggatggttgctacagacaaagaagagatgaagagggtgcaggcttgggggcaggttcagtgacagcagagtggagtgtggatcattgcaatgacgagagagcctcttttggccactctgttgacctcgaacatccccccaagcagactacacactgtcaatgtgttcaaaaacagagatgacggctgttgcatggaacagacatacacagcctcagcgaccccccgggggcccctcgaaatgtgtttgtcaggctgcctccacgcagcccacaggcatggagcaaacacacgctccagcgaataggacaagcacgctgaagggaaaagggggtt

SEQ ID NO: 109997 - DNA, 321 bp, Homo sapiens
atttcacttccagggtcgtcgctgcactcctgcattgttctgattgtgtcgttatatcaccaggtcgtgactggcacacacccagccacttctcagttgcttctgctgcccacccccacctggaggggaggggtatccacgagggagctgcccacccctgactggaggggaggagtatccacgagggagctgcccatccctgcctggaggggaggagtatccatgagggagctgcccatccctgcctggaggggaggagtatccacgagggagctgctcctgagacggaaacagctgaagcacacacagtaaggatgagga

SEQ ID NO: 109998 - DNA, 801 bp, Homo sapiens
ttctaggccgagggaacagtgtagaaaaaaaagcatgaaggtgtgaaagagcccaaggttttctcagaatgatgaggatctttgtgtggctgaagctgagagatgttctgggttgaggggtgacaggtgggtggggctagctgagggaccacaaatgtaagaaaggtgtgcagacagacccaggatggtggggatgggatctagatccgaatcactggatggcaagcatgaatgggggatgccccaccagggtggagcaccaaggccagccaaaaagtggggaagggcttaggcagggacacctcagggcagcgtgatgtgggctaaggcaggctcttcccatgacccacaccattggtccacccagccccatgcagctccccagtgacaaatcatttggtggccagattgaatgacgtgagcaggatttggggcttatcttgtctcaccagagctagctccatgagcagggcaagcagtcctctccacaccaccaccctaagatttctggaggcaccgaatcagggccagcggagtccagggagagtggggtagtgacaggagctgcacaagatagggcagtgccaccgcccctccccaaggctggaggtgtgcctggggaagagcagaacaccagcttgagcccaggcaatctctagtctgagggaggagacccagctttgggctgggtaaatcccaaatcagagacgggaggtatggctctggtttcaagcatctaaggaggactggagccctccccttgggcagcccccagtctgcagggtcatgggggtgggaagc

SEQ ID NO: 109999 - DNA, 578 bp, Homo sapiens
caatgcagtgtttgctgttgctgtttggatggcatcagagcgatctctgtcttactacaatttttctcaggctgggtttgtccctgttgctcacgctgcagtgagcaacactgcacatctgccacacagcacagcagtgtcagctctcccaggtctgtccaaggttgtcttaaagtctttgctcagatttaggatgaccagctgccctggtttgcccaagtctgtcctggttttagcacaaaatgtccctagtcctgggaaacacctcaatcccaggcaagccaggacaatcgcttgccctatttggagtcttctgtgaacacgcttccctccctggcatcaggggggaaagccagcagtatctttcctgatgagtaattaaacatctgataagaaaggcctgcaggctgacttaaggttaggcccaagtgtgctaacgcaggaaagggtttttagctgttttgacacagcttgagttaatgggatgtaactggaaacaaaatgatttctcagcttgctgcttcagttaaatcctgtgcttctagaagttaattaacaaatagttcattgcctgcctg

SEQ ID NO: 110000 - DNA, 502 bp, Homo sapiens
ggtttcgtcatgtagcccaggctggtcttgaactcctgagctcaagcaatccactcaccttagcctcccaaagtgctgggattacagacaagagccactgtgcctggctgtttccccccatctttcaataataataataataataataataataataataataatagagagagagaggtattcgaagatttaaaattaatgaaacaaaaattaatgaaacaaaataaatttacagagaacaaaaaataaatttaaacgttgtaaaaatgaaaactcaatagatggattggaagagaaggttgaagacatctcccagaaagaaagaaaacagcatgtaaaataacaggtaaaacataggcaaattaaaaggccagtcctgaagaagttcctcaaagatagattagaaaaagcaattatttcatcaatgaaataatttaagatttctgaaaattgaaggatacatgtctgcagtgtgaaagggttcactgagtatccagcaatg

SEQ ID NO: 110001 - DNA, 335 bp, Homo sapiens
ggtaagcaatgaaaagccaggtggaatatgaagagcagattaggttagccgtgtgactgatcccaagctgtttgccgagtctctgtgtaaatttcatgcaggttgtctgattgaggacacctggaatgccgcgggcttggtggttatgaaagtcccactgtttcattccttagccccgctcaccagttatgtgcaagttgaaccgtaccatcaaccccattcccagcagctcctgtgcatgtcggaggcaggggatccttgtgtcaggcaccagcagatgcacctactttttccctaggagatgaaaaaaggaagaatgtgagtccgtgccttca

SEQ ID NO: 110002 - DNA, 428 bp, Homo sapiens
gcttgactcctcaccttccactgcaccctccagctccatctagaccctttccctcagcatggcagcttcacccacacatgtttatttaaagcacaggcaaagaatgccagtggtaaggccagagggcgggcagctcagcacggcagaccacagatcccttctcagcccaggaaatggctctgtggcccatatcagccaggaaaatgaagggtcacagacgccctgctgggagctaaagagaaatgtgtgcaaatctaaggagaaatgtgcaaggctcgtgccttccctgtggtgtgtgcctgctctttaatgagagttgcattctcctgagggagaccctgcgcaggccctgccccacgtaacggctttacacaaactctaaaaagtcatcccagccatgcatggacccagggatgctgacaccattc

SEQ ID NO: 110003 - DNA, 407 bp, Homo sapiens
gagtgttaatattctatattgattcatgattagcatatattataaataaaataatttctgactatggctaagagaacttttaatttttcacatggacctaagcatttcaatttataatagcagtgtagaataattcttgtgtatttgacttctgaaatgagggagaggaaaaatacaggcaatgcatattttaagcataatgaacagtattgtttctttcagagctccttgcaagaaacaaactctattctaggatttttaggcagaaagatatcttatggtaggcaatttggtacttacaaaatcattgcatggtctggaagagctggaatcagagggttatcactagattaatatattcaagaacataagcccatagctgtgactgagaggtcaggaaacaaact

SEQ ID NO: 110004 - DNA, 339 bp, Homo sapiens
aaaaagatcaatgtatggaccaaaggcaaattatacaggcacaccttcccaggtgtgctatcctcccacctctgtttttagtcatagaatctgaatggaagcagccactgccctcatcctgatccccaaaccacgtgagagttcaaacgttgtgcacaagacccagtccagccagtaagaatccttaccaagaacttttattaaaacattgccatcggccgggcgcggtggctcacgcctgtaatcccagcactttgggaggccgaggcgggcagatcacgaggtcaggagatggagaccatcctggctaacacggtgaaaccccgtctctactaaaaa

SEQ ID NO: 110005 - DNA, 460 bp, Homo sapiens
tgggcaggggagaggtgtggagaggccagaccagggatggggcagagctgtggagtccagggagctgatgatcccccgatcgtgaggttggaggagggttgggagtgattccaagtcagcaggtcgggtgatgagcagctgctccattaaatgtctacctgtggagcgaccccatgaggactgaggactgtgcttcctttaaagacaaaaacacgggaccccgggggtgggggcagagaacaggccaaagtgccacaaaaccacactcgccttgcaatccaactctttgaatgccatgtacatacttgcctcttgggtttcatgttaacattagtccacttcagagtcagcactaagcaaaccgcttctccagggcccatgcctggatgcttgaactaaattgcccccaaggagccatctgggtctgattcaagttcccaccccatcctgtggtttcagc

SEQ ID NO: 110006 - DNA, 258 bp, Homo sapiens
cgttttcctcctcctaaaggatgatccttgaacctcggaagggaggttcattcttacatttacagaggaggaagctcagaaaggtgaagtcacttgcccaaagtcacacagctaagaagtggcagagcccaggccgggtgcggtggctctcacttgtaatcccagcacattgggaggccgaggtgggcagatcacgaggtcaggagatcgagaccatcctggctaacatggtgaaaccccatctctactaaaaataca

SEQ ID NO: 110007 - DNA, 441 bp, Homo sapiens
caaggcagttcttgatttccatatctggtttgttaacacatatattactctctttctctcttactggttcaaaaattgcaaatcttatgaccccctatgtcctggagtcaaaacaactctggatagaaagtgattatgcgaagtttattctaaaatcaaaagcgaaataagacctcctacgttttttgtttagttaaaaacaacttactgaatcccatttctgatgaggaatttgaaagtgcaaaatgccaacatcctgtgttgggatcaaaatttccaatttgcacaggaaaaatttgtatctaaaacactgaaaaataatttctcctccgcctaagaatacccttccctttctcatagtgggcccctgctatttctgtagctatcacctccatctcctcctctccaaactttcctgtcttctgtttcattgcccagctt

SEQ ID NO: 110008 - DNA, 384 bp, Homo sapiens
acccatcccagctgacattctctgagtgctcacgacattccaggttctgtgccaagtgctggaagaacctcagctgaggccccttggccagccagcccaggctccaggagaaccccctgcaatgctaccttcagcacccatcccctgctatgccatctgccctaggcccagtccttcctcagtgggaacacagaatgatgctgtctgtcctccctcttctccctctcccttccttctggatgtttgctaatgagtaatgggtggcagtataacactttctttgctaattccactgtctaacattcaaagggctttttgtctgtggtgttacctttctgcccctccctgtatgcattttttatatttatttattcatttatttta

SEQ ID NO: 110009 - DNA, 259 bp, Homo sapiens
tgaccctgtcagccattgggagaacattttagtgacttgagagcctgtggattccaaagtaaaggaagaatcgacactgcaaagagctgagataaccctgggaacatcactcaggcatcaggctccaggcatggtccccttccttactccctatgctgtgttgagttggtggcactggctggaagttctcagagatctcctgggtaacagactgcattttaaaccacgcatattagcaggcaataaatgtagcacagtg

SEQ ID NO: 110010 - DNA, 405 bp, Homo sapiens
aaaaggtgtaccacatttgagaaataatgagaagttcttcataagtaaagtctatctccagtgaggggcaggatgatctctgtgtgtgagatgcctggtatttccagatgtagatttgtttgtttgttttgagacagggtctcaccctatcacccaggctggagtgcagtggtgccatctcggctcactgcagcctccacctcccaggttcaagcgattctccagcctgagcctcccaaatagctgggaccacaggtgcatgctaccacacccagctaatttttgtatttttttgtagagacggggattcaccatgtttcccaggctggtctcgagctcctgaactcaaagtgatccacctgccttggcctcccaaagtgcagggattacaggtgtgagccacca

SEQ ID NO: 110011 - DNA, 314 bp, Homo sapiens
actgtatttgcattaagaggttcaggctgaaatctgcttatgtgaatctgcagaaatcataagctggtgtgtctgtgaggcaccacagagctctctgggaaggccacagccacaggcccaggagcgaaggccacctgccttactttttgtccagtcacctttggggtctcaggttaacaagaggtgcccagatgtagacacacctccacacctaaaaggtggaccagcagagctctcctagaccgcagagctctcctagaccgggcctggggtccgcaggaggccactgtgctccagccacccagggaattttt

SEQ ID NO: 110012 - DNA, 317 bp, Homo sapiens
cttggaaatgtagacttgtgaatggggaacaattcaagcacgtttctgatatcatcttactaaattagtgcatctttataaaatatgatctggcagaattatttgatataggaaatagggttgatcttctgcaaacaaaaatataactaatgcaatcatctctatcagaggtttcaaaccaatactcatgagcaaaatcagcctggagacatgttttgagtttttttgacccatgctgtgtttcatatattttgaattaagtttcagtatttcaaaagtttgatttttcatattaaaaatcatatttctgtaacaac

SEQ ID NO: 110013 - DNA, 361 bp, Homo sapiens
gatgcttagatttgtcagatgaaaaatgttggaaagagagccaacaatgtttaaggctcctttttcctttagaaatggaaggtccagcccccttgaggcttgtgtgaggaacctaggagctggagaaggtgtgaaattgtcattgcagagaggggtcagaagaacactaagcttggggacatggtgagattactggagttgacaggcctgctgcgggggatgaagacactgatattacggtgctgtgacttttctcaggagatgttcagctgcttcagtgacaatacagagaagccagatggctgtgttcattccagagtgaaggatttgccttaaggccaggtgcggtggctcatgccta

SEQ ID NO: 110014 - DNA, 450 bp, Homo sapiens
ctgtgtctcaagtgatccacccaccgtggccctccccaaagtgctggggattacaggcaagatgctcaaaatcttttatcaattgttgaccccctttaaaatcccccacaatatatcttgacggtaaactaaaatggtatttagtttataatggaaagcattaataggatatgtagaatattagatttagaacccgggcgtatgaatcttagcataatgcttcctgggaaattctgaaattgattccatttctgccgttacaaacacacacgaagttcctagttcactgggacttcctgatttgttcttttagcttgctccttctcacctagaagctctgtttatttctgagcaaccctggggcttgtctcataggacaggatttatttatctcatcaaggctgagtgtgccttaggaagtcataaacataaaaagagaagaaaaaaaaa

SEQ ID NO: 110015 - DNA, 479 bp, Homo sapiens
acagacttgataatcaaattgcatgggtttaaattttggctttgctactccagctatatgattttagaaatacttactttagcatctttttgctattttggcatctacaaaataatggcagtagtggtactcacctcattctggggtaattctgagggttaaatgagataatgcccataagattgttagctattataacatatgctcgatagacaagtatttttaaaataaaaattccagtttggcatactgctacatagcatgccaaatgcaattttgaattttcaaaattttgaatttttgtaccttgtatatgtaaggtagttctgcttttgtgagaagattggccagatacattaggttgtttctgatagaaataggatgtgtgcatcacttagaaaattataaccacttgacgtgatttttcataaacttcattttacctgttagttgttgcctttagttaagttgttgcagtg

SEQ ID NO: 110016 - DNA, 317 bp, Homo sapiens
gttttttcctgcacatgtgaacacacacacacatacacacagagagagtaaatacatacacatagtaaatcaaatctgttcacatgcccacaaaaaacgcttttatagctttcaaatatacctaatcttgtttacattaacatttcttaatttgatctttctaacttgcagaacgttaagaacacaaatctgaacattaagtttatcttcagtgaacactattgcatatggtaattataatttccagataaaaagttgactgtcatttgccccaaacttatgaaacagtatgtatgattcaaaaagttttgctcagt

SEQ ID NO: 110017 - DNA, 256 bp, Homo sapiens
gaattggctcacatgattccaaggtgaagttccatgataagccttccgtaagctggggaatagagaagccaatagtggctcagtccaagtccaaaagcccccaaacaaaggaagctgacagtacacgctttagcctgcagccgagctcgagtccctgggaagccactggtgcacctccagagtctaaaggccgaagaatctggagtctgatgtccaagggcaggaggagcagaagcaagcatctggcgcagaaaga

SEQ ID NO: 110018 - DNA, 345 bp, Homo sapiens
ggaatttgaaatgaaaaaaatacaaacaacacaattttaatcacagcacccccaaaatgaagttcttacatcatttgttaaatctaacaaaatatgtcaggatttataggctgaaaactacaaaacattgatgaaataaatgaaaaaagatctggataaataggaaatactaggttcatgaatcaggagactcagtgaggtacaaatgctctccaatttcatctaatagattcaataacataccaaccaaaatttcagcaacgtcttcttgtagctattgccaaatttattcaaaaatttaagttaaaaagcaaagaaattagcgaaaacaatcatgaaaaataa

SEQ ID NO: 110019 - DNA, 235 bp, Homo sapiens
tgcttgatgctcagtgcgtcctctacagctggggtaacgacagctctgccactgctactgaatatgaagctgaacagaaacttcagaaatatacagaaatttagtgtatgccaacgggtagcatttttaaaacatgaaattcaataaactattggggcaactggttatttcacgtggaaaaattttaaagctcaatctctatgttcccaaacataaacaataatatcctccaata

SEQ ID NO: 110020 - DNA, 382 bp, Homo sapiens
agaggctttctttgcaatatatctgtaaagtaacactcccttccaccctgaaactgtccaattcagtgctttattatctttaaggcagtcgtgactatctgaattttttaaaaatctggctgtcccaactggagcctaataagttttgtgagaatagggatcttgcctgcatgttcagcaccacattcctggtgctttgaactgtgtctggcacatgataaatgttgattgaataaatatcaattgtgtgaatgcaattaattcattcatttaaaagggatcttatttatttattacacctcatacctccaaaaagtaagttgtggcaccttctgataaaaggcataaataggataaagccataaaaccatgttaaggctaa

SEQ ID NO: 110021 - DNA, 164 bp, Homo sapiens
tggtgaggactaataaggaagtgaggagcgtgatagagaaagcctgtattatcctagagaatacatatattgtcgtaaagaggatgttaatagaaagatgaatgttaaagctgatgctagtgcagacttagaaggaaatgagacatatgattttgtaaactccg

SEQ ID NO: 110022 - DNA, 1080 bp, Homo sapiens
atgtaatatggacccgaggacctcagcccacagctctgcctcctcaggttcttttcaaggcacctccaggattcagtatctccactccatagagggaagcagcatgatttagcacagcagttcccacaagtgtggtccgtggtcccttgcaggggtcgactcttccaaggaaacccatgaggtcaaaacaattttcataatactttgacaaatagtagagttttccaggggttacatgatgtgtgataccaccacacactgaatgcagaagcagagctgggaatccagctgttttctattaagccagacataaaagagatacgcaaaaataaaaaagaatgccactcttctaactggtttttgttttggaagatttttgtttaattacaatatgttatttatgttaggatgcaatgggtttataatattttaaaacacatgtattttaaattattttctctattttcagttcttggatggtaagtatcaataaatgtaattcacataaacaaaaagctctttaagatcctcaataatctttaagagtataaaggggtcacgagatcaaaaagtttgccaaccagtgatttagcataacgcctgacatatagtaaatgtgtggcaaatggacaaactgatggattaaagggttttaataactgctttcaaatgttcagagttcaataaatgaatatggccagtaaagatctttggataaccatcttcaggtcctccacacctgcttacacatgatttaaaagcaaatgatggtaagaagacaaaaccgtaggctgggtgtggaggctcacgcctgtaatcccagcactttgggaggccgaggtgggcagatcacctgaggtcaggagttcgagaccagcctagtcaacccagtgaaacccgtttctactaaaaaaaaaaacaaaaaaaaaatagctgggtgtggtggtgcatgcctgtagtcccagctaccgaggaggctgtggcacgagaatcacttgaacccaggaggcagaggctgcagtgagccaagatcatgccactgcactcgagcctgggcaacagagcaagactccatctcaa

SEQ ID NO: 110023 - DNA, 355 bp, Homo sapiens
catttaactagtctttcagaacttgaactatattaagtggtacttccactgttcagtgtctgtttttcttattacactgattttgcttcagaatcagtgagattatatagacgtcattcagaatatttgtttttatccttcaactcgaagagttttctcacctctttattttcaagttgaaaacattattataagagtatgttagcgggtcatttgactctgaaaaaaatagctttttaaaggttgatcacactttaatcttcaatttcaggatagtaaagaaccattataatttaggccccagtgactgtcataaaacagcttttaccagaccaccatcttaatactgatattt

SEQ ID NO: 110024 - DNA, 641 bp, Homo sapiens
ggaggtgaaggaactagttgaatttctaggagttctaattcttcaagatcttacaatcttaaagtggttaatatgaaaacatttacacttccgcttctggcaagcctaaataatttgcctgtgatttttaataaaaaccggatccttccctcatctctcatccaaagcttcatcctcttattaattctaaggacacttttttgaaatggaaaacagcacagaggtggagcagaaatacaggctgtgggctaattctcttaacagtcctcacccactaaaatgatctgtggaccaaggaagttttggtgtcatcacaccatgttcctgtgactataaatatgttgtctttttagtgttctgggcttgctatagagggatgtaaatgcattttcaagttttaatgttctaagttatttccaatcttttaccatgaatccagtttatttagttggggaatatttcttgagtgacatctattcaatgagcagtagcagatcttcagaatgccatcggagctcatggaaagaaatgatgggttcctttgcctggtaagcttttatgacttaatctggatttcttgttattttgacccatttctgcacatcttacttcatgcagctgggttttgtgaccgcacagtt

SEQ ID NO: 110025 - DNA, 177 bp, Homo sapiens
agtttcaaccttgtgagaagaatgcacccatcacaaagaagtttctcagaatgcttctgtgtagtttttacgtgaagttatttccttttccaccataggacacaaacggcttcaaatacccacttccagattctacgaaaagaaagtttcaaaactgctaaatgaaaacaggttcaa

SEQ ID NO: 110026 - DNA, 556 bp, Homo sapiens
tcactcaaaatggagtcactttgctcaaaagcctctgacagttttagatggagatgaggaaccttttgggaaatggagcaaaggttacttatgctgtgctttagcaaagatacaggcagcattttgcctctgccctacagatctgtggaactttgaacttgagagagatgatttagggtatctggtggaagaaatttctaagcagcaaagcatttaagaggtggcctggctgattctgaaagcattcagctatatgcactcacaaacacgtggttcaaacttggaacttaggctgggcgcagtggctcatgcctgtaatcccagcactttgggaggccaaggcaggtggatcacgaggtcaggagatcgagaccatcctggctaacatggtgaaacctgtctctactaaaattagccaggtgtggtggtgggcgcctgtagtcccagctactcaggaagctgaggcaggagaacggtgcgaacctgggaggcggagcttgccgtgagccgagattgcgccactgcactccagcctgggcgacagagccagactctg

SEQ ID NO: 110027 - DNA, 283 bp, Homo sapiens
actgtagactccctgttctaggcagaggatgccagctctccacctgaatctgttctccccttcttcctgggaacacacagatgttctacatttccagcatccttgcagttaggtgtgactgcatcctggccattatacatgagcagaagtgatgtggttactcctaggcctggcttccaggattccttctcttgctacccttctaagctcatttcccttttctggttgattgggatgggaccactttggaattcccatgtagaatatggtagaatccctgcag

SEQ ID NO: 110028 - DNA, 273 bp, Homo sapiens
taaatttatactgatttattgatcaaataaactagcattacttccactttatggttaaagattatgaaaaatataaatttgtatttggccaaattggttcattattctgattttcaacaaaagttttatgtcagtttgaagagaatttcagtgatctctatttttccttttcagcactgtgttgaatatgaatgttataagcagaaaaccttccctgtttcagatcttagagggagaggattcaatctcactaagtataatgtttgctgtagg

SEQ ID NO: 110029 - DNA, 4696 bp, Homo sapiens
atgctgaagcggaggcggccgctgctcgaggatcaaacagagcatactgaatcagcaggactggctggtggtgcagcagacatcatgagtaagcaccgagaagtctgttccttatcacgtgtgtaaggggaaaaaggtttaaacaagtctcttaagtggtgtttcctcaccgatggagaattacttccaagcagaagcttacaacctggacaaggtgttagatgaatttgaacaaaacgaagatgaaacagtttcttctactttattggatacaaagtggaataagattctagatcccccttctcaccggctgtcatttaaccctactttggccagtgtgaatgaatctgcagtttctaatgagtcacaaccacaactgaaagtcttctccctggctcattcagctcccctgaccacagaggaagaggatcactgtgctaatggacaggactgtaatctaaatccagagattgccacaatgtggattgatgaaaatgctgttgcagaagaccagttaattaagagaaactatagttgggatgatcaatgcagtgctgttgaagtgggagagaagaaatgtggaaacctggcttgtctgccagatgagaagaatgttcttgttgtagccgtcatgcataactgtgataaaaggacattacaaaacgatttacaggattgtaataattataatagtcaatcccttatggatgcttttagctgttcactggataatgaaaacagacaaactgatcaatttagttttagtataaatgagtccactgaaaaagatatgaattcagagaaacaaatggatccattgaatagaccgaaaacagaggggagatctgttaaccatctgtgtcctacttcatctgatagtctagccagtgtctgttccccttcacaattaaaggatgacggaagtataggtagagacccctccatgtctgcgattacaagtttaacggttgattcagtaatctcatcccagggaacagatggatgtcctgctgttaaaaagcaagagaactatataccagatgaggacctcactggcaaaatcagctctcctaggacagatctagggagtccaaattccttttcccacatgagtgaggggattttgatgaaaaaagagccagcagaggagagcaccactgaagaatccctccggtctggtttacctttgcttctcaaaccagacatgcctaatgggtctggaaggaataatgactgtgaacggtgttcagattgccttgtgcctaatgaagttagggctgatgaaaatgaaggttatgaacatgaagaaactcttggcactacagaattccttaatatgacagagcatttctctgaatctcaggacatgactaattggaagttgactaaactaaatgagatgaatgatagccaagtaaacgaagaaaaggaaaagtttctacagattagtcagcctgaggacactaatggtgatagtggaggacagtgtgttggattggcagatgcaggtctagatttaaaaggaacttgcattagtgaaagtgaagaatgtgatttctccactgttatagacacaccagcagcaaattatctatctaatggttgtgattcctatggaatgcaagacccaggtgtttcttttgttccaaagactttaccctccaaagaagattcagtaacagaagaaaaagaaatagaggaaagcaagtcagaatgctactcaaatatttatgaacagagaggaaatgaggccacagaagggagtggactacttttaaacagcactggtgacctaatgaagaaaaattatttacataatttctgtagtcaagttccatcagtgcttgggcaatcttcccccaaggtagtagcaagcctgccatctatcagtgttccttttggtggtgcaagacccaagcaaccttctaatcttaaacttcaaattccaaagccattatcagaccatttacaaaatgactttcctgcaaacagtggaaataatactaaaaataaaaatgatattcttgggaaagcaaaattaggggaaaactcagcaaccaatgtatgcagtccatctttgggaaacatctctaatgtcgatacaaatggggaacatttagaaagttatgaggctgagatctccactagaccatgccttgcattagctccagatagcccagataatgatctcagagctggtcagtttggaatttctgccagaaagccattcaccactctgggtgaggtggctccagtatgggtaccggattctcaggctccaaattgcatgaaatgtgaagccaggtttacattcaccaaaaggaggcatcactgcagagcatgtgggaaggttttctgtgcttcctgctgtagcctgaaatgtaaactgttatacatggacagaaaggaagctagagtgtgtgtaatctgccattcagtgctaatgaatgtggctcagcccagagagcagaggcgagtttggtttgctgatgggatcttgcccaatggagaagttgctgatgcagccaaattaacaatgaatggaacttcctctgcaggaaccctggctgtgtcacacgacccagtcaagccagtaactaccagtcctctaccagcagagacggatatttgtctattctctgggagtataactcaggttggaagtcctgttggaagtgcaatgaatcttattcctgaagatggccttcctcccattctcatctccactggtgtaaaaggagactatgctgtggaagagaaaccatcacagatttcagtaatgcagcagttggaggatggtggccctgacccacttgtatttgttttaaatgcaaatttgttgtcaatggttaaaattgtaaattatgtgaacaggaagtgctggtgtttcacaaccaagggaatgcatgcagtgggtcagtctgagatagtcattcttctacagtgtttaccggatgaaaagtgtttgccaaaggatatctttaatcactttgtgcagctttatcgggatgctctggcagggaatgtggtgagcaacttgggacattccttcttcagtcaaagtttccttggcagtaaagaacatggtggattcttatatgtgacatctacctaccagtcactgcaagacctagtactcccaaccccaccttacttgtttgggattcttatccagaaatgggaaactccttgggctaaagtatttcctatccgtctgatgttgagacttggagctgaatatcgactttatccatgcccactattcagtgtcagatttcggaagccattgtttggagagacggggcataccatcatgaatcttcttgcagacttcagaaattaccagtataccttgccagtagttcaaggtttggtggttgatatggaagttcggaaaactagcatcaaaattcccagcaacagatacaatgagatgatgaaagccatgaacaagtccaatgagcatgtcctggcaggaggtgcctgcttcaatgaaaaggcagactctcatcttgtgtgtgtacagaatgatgatggaaactatcagacccaggctatcagtattcacaatcagcccagaaaagtgactggtgccagtttctttgtgttcagtggcgctctgaaatcctcttctggataccttgccaagtccagtattgtggaagatggtgttatggtccagattactgcagagaacatggattccttgaggcaggcactgcgagagatgaaggacttcaccatcacctgtgggaaggcggacgcggaggaaccccaggagcacatccacatccagtgggtggatgatgacaagaacgttagcaagggtgtcgtaagtcctatagatgggaagtccatggagactataacaaatgtgaagatattccatggatcagaatataaagcaaatggaaaagtaatcagatggacagaggtgtttttcctagaaaacgatgaccagcacaattgcctcagtgatcctgcagatcacagtagattgactgagcatgttgccaaagctttttgccttgctctctgtcctcacctgaaacttctgaaggaagatggaatgaccaaactgggactacgtgtgacacttgactcagatcaggttggctatcaagcagggagcaatggccagccccttccctcgcagtacatgaatgatctggacagcgccttggtgccggtgatccatggaggggcctgccagcttagtgagggccccgttgtcatggaactcatcttttatattctggaaaacatcgtataaacagagaagacttcatttttttctgttcagacttgttgcaacagcagtcatacccaaatcatttgcactttaaaactggaagattaagcttttgttaacactattaatggggtggggaatagggtgggagtgggggtttgggagacgggtgggaaagggtggttggggggaccgatgttccataattctaagtcttctatgcattgtccaccaagaagatctgggcagcttctgttcctgcacaacagttatgctatccttgcagctaatccccttctgttactgtttagacaagaattccgctcctctctcaagatttacttatggtcatgtgctcagaaatgctcaaatgggtacaaccatcaccaagggtgggatgggagggcagaggggaaataaaatataaagcatcagttcttgcac

SEQ ID NO: 110030 - DNA, 4283 bp, Homo sapiens
atgctgaagcggaggcggccgctgctcgaggatcaaacagagcatactgaatcagcaggactggctggtggtgcagcagacatcatgagtaagcaccgagaagtctgttccttatcacgtgtgtaaggggaaaaaggtttaaacaagtctcttaagtggtgtttcctcaccgatggagaattacttccaagcagaagcttacaacctggacaaggtgttagatgaatttgaacaaaacgaagatgaaacagtttcttctactttattggatacaaagtggaataagattctagatcccccttctcaccggctgtcatttaaccctactttggccagtgtgaatgaatctgcagtttctaatgagtcacaaccacaactgaaagtcttctccctggctcattcagctcccctgaccacagaggaagaggatcactgtgctaatggacaggactgtaatctaaatccagagattgccacaatgtggattgatgaaaatgctgttgcagaagaccagttaattaagagaaactatagttgggatgatcaatgcagtgctgttgaagtgggagagaagaaatgtggaaacctggcttgtctgccagatgagaagaatgttcttgttgtagccgtcatgcataactgtgataaaaggacattacaaaacgatttacaggattgtaataattataatagtcaatcccttatggatgcttttagctgttcactggataatgaaaacagacaaactgatcaatttagttttagtataaatgagtccactgaaaaagatatgaattcagagaaacaaatggatccattgaatagaccgaaaacagaggggagatctgttaaccatctgtgtcctacttcatctgatagtctagccagtgtctgttccccttcacaattaaaggatgacggaagtataggtagagacccctccatgtctgcgattacaagtttaacggttgattcagtaatctcatcccagggaacagatggatgtcctgctgttaaaaagcaagagaactatataccagatgaggacctcactggcaaaatcagctctcctaggacagatctagggagtccaaattccttttcccacatgagtgaggggattttgatgaaaaaagagccagcagaggagagcaccactgaagaatccctccggtctggtttacctttgcttctcaaaccagacatgcctaatgggtctggaaggaataatgactgtgaacggtgttcagattgccttgtgcctaatgaagttagggctgatgaaaatgaaggttatgaacatgaagaaactcttggcactacagaattccttaatatgacagagcatttctctgaatctcaggacatgactaattggaagttgactaaactaaatgagatgaatgatagccaagtaaacgaagaaaaggaaaagtttctacagattagtcagcctgaggacactaatggtgatagtggaggacagtgtgttggattggcagatgcaggtctagatttaaaaggaacttgcattagtgaaagtgaagaatgtgatttctccactgttatagacacaccagcagcaaattatctatctaatggttgtgattcctatggaatgcaagacccaggtgtttcttttgttccaaagactttaccctccaaagaagattcagtaacagaagaaaaagaaatagaggaaagcaagtcagaatgctactcaaatatttatgaacagagaggaaatgaggccacagaagggagtggactacttttaaacagcactggtgacctaatgaagaaaaattatttacataatttctgtagtcaagttccatcagtgcttgggcaatcttcccccaaggtagtagcaagcctgccatctatcagtgttccttttggtggtgcaagacccaagcaaccttctaatcttaaacttcaaattccaaagccattatcagaccatttacaaaatgactttcctgcaaacagtggaaataatactaaaaataaaaatgatattcttgggaaagcaaaattaggggaaaactcagcaaccaatgtatgcagtccatctttgggaaacatctctaatgtcgatacaaatggggaacatttagaaagttatgaggctgagatctccactagaccatgccttgcattagctccagatagcccagataatgatctcagagctggtcagtttggaatttctgccagaaagccattcaccactctgggtgaggtggctccagtatgggtaccggattctcaggctccaaattgcatgaaatgtgaagccaggtttacattcaccaaaaggaggcatcactgcagagcatgtgggaaggttttctgtgcttcctgctgtagcctgaaatgtaaactgttatacatggacagaaaggaagctagagtgtgtgtaatctgccattcagtgctaatgaatgctcaagcctgggagaacatgatgagtgcctcaagccagagccctaaccctaacaatcctgctgaatactgttctactatccctcccttgcagcaagctcaggcctcaggagctctgagctctccacctcccactgtgatggtacctgtgggagttttaaagcaccctggagcagaagtggctcagcccagagagcagaggcgagtttggtttgctgatgggatcttgcccaatggagaagttgctgatgcagccaaattaacaatgaatggaacttcctctgcaggaaccctggctgtgtcacacgacccagtcaagccagtaactaccagtcctctaccagcagagacggatatttgtctattctctgggagtataactcaggttggaagtcctgttggaagtgcaatgaatcttattcctgaagatggccttcctcccattctcatctccactggtgtaaaaggagactatgctgtggaagagaaaccatcacagatttcagtaatgcagcagttggaggatggtggccctgacccacttgtatttgttttaaatgcaaatttgttgtcaatggttaaaattgtaaattatgtgaacaggaagtgctggtgtttcacaaccaagggaatgcatgcagtgggtcagtctgagatagtcattcttctacagtgtttaccggatgaaaagtgtttgccaaaggatatctttaatcactttgtgcagctttatcgggatgctctggcagggaatgtggtgagcaacttgggacattccttcttcagtcaaagtttccttggcagtaaagaacatggtggattcttatatgtgacatctacctaccagtcactgcaagacctagtactcccaaccccaccttacttgtttgggattcttatccagaaatgggaaactccttgggctaaagtatttcctatccgtctgatgttgagacttggagctgaatatcgactttatccatgcccactattcagtgtcagatttcggaagccattgtttggagagacggggcataccatcatgaatcttcttgcagacttcagaaattaccagtataccttgccagtagttcaaggtttggtggttgatatggaagttcggaaaactagcatcaaaattcccagcaacagatacaatgagatgatgaaagccatgaacaagtccaatgagcatgtcctggcaggaggtgcctgcttcaatgaaaaggcagactctcatcttgtgtgtgtacagaatgatgatggaaactatcagacccaggctatcagtattcacaatcagcccagaaaagtgactggtgccagtttctttgtgttcagtggcgctctgaaatcctcttctggataccttgccaagtccagtattgtggaaggtaaagaatgaattgttcagtcctcataataaggactgaacttatgtacataaagggaatcctttacacttctgctgtagatgtctgactcctactgttttttcagtagcatctcttcagcaaattaaaactgccatgagagtgcttagttctctgaagaaaggagtaagtggtagggataccatgtgacaatgacattaaaactaggagatggcctttcagagctctgggataaggtacctgagggcatgtagtctgagttcaaatatatcattgggtggaaatattaatatctaaatgtgtagatgaaagtcctgtccacaagaatgctgtggtcatcatttggagtacaaaatggcatgtgcttgctgctagtgtgctataattagacatgacacatatgttgacaaaagttaattaaactaaaagctaattggcaca

SEQ ID NO: 110031 - DNA, 3991 bp, Homo sapiens
atgctgaagcggaggcggccgctgctcgaggatcaaacagagcatactgaatcagcaggactggctggtggtgcagcagacatcatgagtaagcaccgagaagtctgttccttatcacgtgtgtaaggggaaaaaggtttaaacaagtctcttaagtggtgtttcctcaccgatggagaattacttccaagcagaagcttacaacctggacaaggtgttagatgaatttgaacaaaacgaagatgaaacagtttcttctactttattggatacaaagtggaataagattctagatcccccttctcaccggctgtcatttaaccctactttggccagtgtgaatgaatctgcagtttctaatgagtcacaaccacaactgaaagtcttctccctggctcattcagctcccctgaccacagaggaagaggatcactgtgctaatggacaggactgtaatctaaatccagagattgccacaatgtggattgatgaaaatgctgttgcagaagaccagttaattaagagaaactatagttgggatgatcaatgcagtgctgttgaagtgggagagaagaaatgtggaaacctggcttgtctgccagatgagaagaatgttcttgttgtagccgtcatgcataactgtgataaaaggacattacaaaacgatttacaggattgtaataattataatagtcaatcccttatggatgcttttagctgttcactggataatgaaaacagacaaactgatcaatttagttttagtataaatgagtccactgaaaaagatatgaattcagagaaacaaatggatccattgaatagaccgaaaacagaggggagatctgttaaccatctgtgtcctacttcatctgatagtctagccagtgtctgttccccttcacaattaaaggatgacggaagtataggtagagacccctccatgtctgcgattacaagtttaacggttgattcagtaatctcatcccagggaacagatggatgtcctgctgttaaaaagcaagagaactatataccagatgaggacctcactggcaaaatcagctctcctaggacagatctagggagtccaaattccttttcccacatgagtgaggggattttgatgaaaaaagagccagcagaggagagcaccactgaagaatccctccggtctggtttacctttgcttctcaaaccagacatgcctaatgggtctggaaggaataatgactgtgaacggtgttcagattgccttgtgcctaatgaagttagggctgatgaaaatgaaggttatgaacatgaagaaactcttggcactacagaattccttaatatgacagagcatttctctgaatctcaggacatgactaattggaagttgactaaactaaatgagatgaatgatagccaagtaaacgaagaaaaggaaaagtttctacagattagtcagcctgaggacactaatggtgatagtggaggacagtgtgttggattggcagatgcaggtctagatttaaaaggaacttgcattagtgaaagtgaagaatgtgatttctccactgttatagacacaccagcagcaaattatctatctaatggttgtgattcctatggaatgcaagacccaggtgtttcttttgttccaaagactttaccctccaaagaagattcagtaacagaagaaaaagaaatagaggaaagcaagtcagaatgctactcaaatatttatgaacagagaggaaatgaggccacagaagggagtggactacttttaaacagcactggtgacctaatgaagaaaaattatttacataatttctgtagtcaagttccatcagtgcttgggcaatcttcccccaaggtagtagcaagcctgccatctatcagtgttccttttggtggtgcaagacccaagcaaccttctaatcttaaacttcaaattccaaagccattatcagaccatttacaaaatgactttcctgcaaacagtggaaataatactaaaaataaaaatgatattcttgggaaagcaaaattaggggaaaactcagcaaccaatgtatgcagtccatctttgggaaacatctctaatgtcgatacaaatggggaacatttagaaagttatgaggctgagatctccactagaccatgccttgcattagctccagatagcccagataatgatctcagagctggtcagtttggaatttctgccagaaagccattcaccactctgggtgaggtggctccagtatgggtaccggattctcaggctccaaattgcatgaaatgtgaagccaggtttacattcaccaaaaggaggcatcactgcagagcatgtgggaaggttttctgtgcttcctgctgtagcctgaaatgtaaactgttatacatggacagaaaggaagctagagtgtgtgtaatctgccattcagtgctaatgaatgctcaagcctgggagaacatgatgagtgcctcaagccagagccctaaccctaacaatcctgctgaatactgttctactatccctcccttgcagcaagctcaggcctcaggagctctgagctctccacctcccactgtgatggtacctgtgggagttttaaagcaccctggagcagaagtggctcagcccagagagcagaggcgagtttggtttgctgatgggatcttgcccaatggagaagttgctgatgcagccaaattaacaatgaatggaacttcctctgcaggaaccctggctgtgtcacacgacccagtcaagccagtaactaccagtcctctaccagcagagacggatatttgtctattctctgggagtataactcaggttggaagtcctgttggaagtgcaatgaatcttattcctgaagatggccttcctcccattctcatctccactggtgtaaaaggagactatgctgtggaagagaaaccatcacagatttcagtaatgcagcagttggaggatggtggccctgacccacttgtatttgttttaaatgcaaatttgttgtcaatggttaaaattgtaaattatgtgaacaggaagtgctggtgtttcacaaccaagggaatgcatgcagtgggtcagtctgagatagtcattcttctacagtgtttaccggatgaaaagtgtttgccaaaggatatctttaatcactttgtgcagctttatcgggatgctctggcagggaatgtggtgagcaacttgggacattccttcttcagtcaaagtttccttggcagtaaagaacatggtggattcttatatgtgacatctacctaccagtcactgcaagacctagtactcccaaccccaccttacttgtttgggattcttatccagaaatgggaaactccttgggctaaagtatttcctatccgtctgatgttgagacttggagctgaatatcgactttatccatgcccactattcagtgtcagatttcggaagccattgtttggagagacggggcataccatcatgaatcttcttgcagacttcagaaattaccagtataccttgccagtagttcaaggtttggtggttgatatggaagttcggaaaactagcatcaaaattcccagcaacagatacaatgagatgatgaaagccatgaacaagtccaatgagcatgtcctggcaggaggtgcctgcttcaatgaaaaggcagactctcatcttgtgtgtgtacagaatgatgatggaaactatcagacccaggctatcagtattcacaatcagcccagaaaagtgactggtgccagtttctttgtgttcagtggcgctctgaaatcctcttctggataccttgccaagtccagtattgtggaagatggtgttatggtccagattactgcagagaacatggattccttgaggcaggcactgcgagagatgaaggacttcaccatcagacggataggaaatactttagcccaaggagtttcccatttctggataagaatccccaacatgtaagct

SEQ ID NO: 110032 - DNA, 2399 bp, Homo sapiens
gtgggttgaccgtggcttgtgggttgaccgtggcttgtgggttgaccgtggctatccctcccttgcagcaagctcaggcctcaggagctctgagctctccacctcccactgtgatggtacctgtgggagttttaaagcaccctggagcagaagtggctcagcccagagagcagaggcgagtttggtttgctgatgggatcttgcccaatggagaagttgctgatgcagccaaattaacaatgaatggaacttcctctgcaggaaccctggctgtgtcacacgacccagtcaagccagtaactaccagtcctctaccagcagagacggatatttgtctattctctgggagtataactcaggttggaagtcctgttggaagtgcaatgaatcttattcctgaagatggccttcctcccattctcatctccactggtgtaaaaggagactatgctgtggaagagaaaccatcacagatttcagtaatgcagcagttggaggatggtggccctgacccacttgtatttgttttaaatgcaaatttgttgtcaatggttaaaattgtaaattatgtgaacaggaagtgctggtgtttcacaaccaagggaatgcatgcagtgggtcagtctgagatagtcattcttctacagtgtttaccggatgaaaagtgtttgccaaaggatatctttaatcactttgtgcagctttatcgggatgctctggcagggaatgtggtgagcaacttgggacattccttcttcagtcaaagtttccttggcagtaaagaacatggtggattcttatatgtgacatctacctaccagtcactgcaagacctagtactcccaaccccaccttacttgtttgggattcttatccagaaatgggaaactccttgggctaaagtatttcctatccgtctgatgttgagacttggagctgaatatcgactttatccatgcccactattcagtgtcagatttcggaagccattgtttggagagacggggcataccatcatgaatcttcttgcagacttcagaaattaccagtataccttgccagtagttcaaggtttggtggttgatatggaagttcggaaaactagcatcaaaattcccagcaacagatacaatgagatgatgaaagccatgaacaagtccaatgagcatgtcctggcaggaggtgcctgcttcaatgaaaaggcagactctcatcttgtgtgtgtacagaatgatgatggaaactatcagacccaggctatcagtattcacaatcagcccagaaaagtgactggtgccagtttctttgtgttcagtggcgctctgaaatcctcttctggataccttgccaagtccagtattgtggaagatggtgttatggtccagattactgcagagaacatggattccttgaggcaggcactgcgagagatgaaggacttcaccatcacctgtgggaaggcggacgcggaggaaccccaggagcacatccacatccagtgggtggatgatgacaagaacgttagcaagggtgtcgtaagtcctatagatgggaagtccatggagactataacaaatgtgaagatattccatggatcagaatataaagcaaatggaaaagtaatcagatggacagaggtgtttttcctagaaaacgatgaccagcacaattgcctcagtgatcctgcagatcacagtagattgactgagcatgttgccaaagctttttgccttgctctctgtcctcacctgaaacttctgaaggaagatggaatgaccaaactgggactacgtgtgacacttgactcagatcaggttggctatcaagcagggagcaatggccagccccttccctcgcagtacatgaatgatctggacagcgccttggtgccggtgatccatggaggggcctgccagcttagtgagggccccgttgtcatggaactcatcttttatattctggaaaacatcgtataaacagagaagacttcatttttttctgttcagacttgttgcaacagcagtcatacccaaatcatttgcactttaaaactggaagattaagcttttgttaacactattaatggggtggggaatagggtgggagtgggggtttgggagacgggtgggaaagggtggttggggggaccgatgttccataattctaagtcttctatgcattgtccaccaagaagatctgggcagcttctgttcctgcacaacagttatgctatccttgcagctaatccccttctgttactgtttagacaagaattccgctcctctctcaagatttacttatggtcatgtgctcagaaatgctcaaatgggtacaaccatcaccaagggtgggatgggagggcagaggggaaataaaatataaagcatcagttcttgcac

SEQ ID NO: 110033 - DNA, 2002 bp, Homo sapiens
ctctagaggatcttctaaacattcaaatatcactggtgtaaaaggagactatgctgtggaagagaaaccatcacagatttcagtaatgcagcagttggaggatggtggccctgacccacttgtatttgttttaaatgcaaatttgttgtcaatggttaaaattgtaaattatgtgaacaggaagtgctggtgtttcacaaccaagggaatgcatgcagtgggtcagtctgagatagtcattcttctacagtgtttaccggatgaaaagtgtttgccaaaggatatctttaatcactttgtgcagctttatcgggatgctctggcagggaatgtggtgagcaacttgggacattccttcttcagtcaaagtttccttggcagtaaagaacatggtggattcttatatgtgacatctacctaccagtcactgcaagacctagtactcccaaccccaccttacttgtttgggattcttatccagaaatgggaaactccttgggctaaagtatttcctatccgtctgatgttgagacttggagctgaatatcgactttatccatgcccactattcagtgtcagatttcggaagccattgtttggagagacggggcataccatcatgaatcttcttgcagacttcagaaattaccagtataccttgccagtagttcaaggtttggtggttgatatggaagttcggaaaactagcatcaaaattcccagcaacagatacaatgagatgatgaaagccatgaacaagtccaatgagcatgtcctggcaggaggtgcctgcttcaatgaaaaggcagactctcatcttgtgtgtgtacagaatgatgatggaaactatcagacccaggctatcagtattcacaatcagcccagaaaagtgactggtgccagtttctttgtgttcagtggcgctctgaaatcctcttctggataccttgccaagtccagtattgtggaagatggtgttatggtccagattactgcagagaacatggattccttgaggcaggcactgcgagagatgaaggacttcaccatcacctgtgggaaggcggacgcggaggaaccccaggagcacatccacatccagtgggtggatgatgacaagaacgttagcaagggtgtcgtaagtcctatagatgggaagtccatggagactataacaaatgtgaagatattccatggatcagaatataaagcaaatggaaaagtaatcagatggacagaggtgtttttcctagaaaacgatgaccagcacaattgcctcagtgatcctgcagatcacagtagattgactgagcatgttgccaaagctttttgccttgctctctgtcctcacctgaaacttctgaaggaagatggaatgaccaaactgggactacgtgtgacacttgactcagatcaggttggctatcaagcagggagcaatggccagccccttccctcgcagtacatgaatgatctggacagcgccttggtgccggtgatccatggaggggcctgccagcttagtgagggccccgttgtcatggaactcatcttttatattctggaaaacatcgtataaacagagaagacttcatttttttctgttcagacttgttgcaacagcagtcatacccaaatcatttgcactttaaaactggaagattaagcttttgttaacactattaatggggtggggaatagggtgggagtgggggtttgggagacgggtgggaaagggtggttggggggaccgatgttccataattctaagtcttctatgcattgtccaccaagaagatctgggcagcttctgttcctgcacaacagttatgctatccttgcagctaatccccttctgttactgtttagacaagaattccgctcctctctcaagatttacttatggtcatgtgctcagaaatgctcaaatgggtacaaccatcaccaagggtgggatgggagggcagaggggaaataaaatataaagcatcagttcttgcac

SEQ ID NO: 110034 - DNA, 494 bp, Homo sapiens
ttagggagctgtacattgtgtatttctcattttaattttcacaaccaaagattaaggtattatttctgatactccatacctttttacacacctctacccttccccagaaaactaagaccataacaggttaagtggcttacccagtgcctcatggttgtcaagtggtcaggaggagtaaacaacaggataagtgatcacccagaaaagaggataaatttgtattcactgccatatgtttagcctatggccaaaaaggacatctcctttcctgctcagcctccttgccctcagccctggagaggccttctctgttcagtaacctctcctccttttctctctgtggtataggttggctatcaagcagggagcaatggccagccccttccctcgcagtacatgaatgatctggacagcgccttggtgccggtgatccatggaggggcctgccagcttagtgagggccccgttgtcatggaactcatcttttatattct

SEQ ID NO: 110035 - DNA, 4873 bp, Homo sapiens
atgctgaagcggaggcggccgctgctcgaggatcaaacagagcatactgaatcagcaggactggctggtggtgcagcagacatcatgagtaagcaccgagaagtctgttccttatcacgtgtgtaaggggaaaaaggtttaaacaagtctcttaagtggtgtttcctcaccgatggagaattacttccaagcagaagcttacaacctggacaaggtgttagatgaatttgaacaaaacgaagatgaaacagtttcttctactttattggatacaaagtggaataagattctagatcccccttctcaccggctgtcatttaaccctactttggccagtgtgaatgaatctgcagtttctaatgagtcacaaccacaactgaaagtcttctccctggctcattcagctcccctgaccacagaggaagaggatcactgtgctaatggacaggactgtaatctaaatccagagattgccacaatgtggattgatgaaaatgctgttgcagaagaccagttaattaagagaaactatagttgggatgatcaatgcagtgctgttgaagtgggagagaagaaatgtggaaacctggcttgtctgccagatgagaagaatgttcttgttgtagccgtcatgcataactgtgataaaaggacattacaaaacgatttacaggattgtaataattataatagtcaatcccttatggatgcttttagctgttcactggataatgaaaacagacaaactgatcaatttagttttagtataaatgagtccactgaaaaagatatgaattcagagaaacaaatggatccattgaatagaccgaaaacagaggggagatctgttaaccatctgtgtcctacttcatctgatagtctagccagtgtctgttccccttcacaattaaaggatgacggaagtataggtagagacccctccatgtctgcgattacaagtttaacggttgattcagtaatctcatcccagggaacagatggatgtcctgctgttaaaaagcaagagaactatataccagatgaggacctcactggcaaaatcagctctcctaggacagatctagggagtccaaattccttttcccacatgagtgaggggattttgatgaaaaaagagccagcagaggagagcaccactgaagaatccctccggtctggtttacctttgcttctcaaaccagacatgcctaatgggtctggaaggaataatgactgtgaacggtgttcagattgccttgtgcctaatgaagttagggctgatgaaaatgaaggttatgaacatgaagaaactcttggcactacagaattccttaatatgacagagcatttctctgaatctcaggacatgactaattggaagttgactaaactaaatgagatgaatgatagccaagtaaacgaagaaaaggaaaagtttctacagattagtcagcctgaggacactaatggtgatagtggaggacagtgtgttggattggcagatgcaggtctagatttaaaaggaacttgcattagtgaaagtgaagaatgtgatttctccactgttatagacacaccagcagcaaattatctatctaatggttgtgattcctatggaatgcaagacccaggtgtttcttttgttccaaagactttaccctccaaagaagattcagtaacagaagaaaaagaaatagaggaaagcaagtcagaatgctactcaaatatttatgaacagagaggaaatgaggccacagaagggagtggactacttttaaacagcactggtgacctaatgaagaaaaattatttacataatttctgtagtcaagttccatcagtgcttgggcaatcttcccccaaggtagtagcaagcctgccatctatcagtgttccttttggtggtgcaagacccaagcaaccttctaatcttaaacttcaaattccaaagccattatcagaccatttacaaaatgactttcctgcaaacagtggaaataatactaaaaataaaaatgatattcttgggaaagcaaaattaggggaaaactcagcaaccaatgtatgcagtccatctttgggaaacatctctaatgtcgatacaaatggggaacatttagaaagttatgaggctgagatctccactagaccatgccttgcattagctccagatagcccagataatgatctcagagctggtcagtttggaatttctgccagaaagccattcaccactctgggtgaggtggctccagtatgggtaccggattctcaggctccaaattgcatgaaatgtgaagccaggtttacattcaccaaaaggaggcatcactgcagagcatgtgggaaggttttctgtgcttcctgctgtagcctgaaatgtaaactgttatacatggacagaaaggaagctagagtgtgtgtaatctgccattcagtgctaatgaatgctcaagcctgggagaacatgatgagtgcctcaagccagagccctaaccctaacaatcctgctgaatactgttctactatccctcccttgcagcaagctcaggcctcaggagctctgagctctccacctcccactgtgatggtacctgtgggagttttaaagcaccctggagcagaagtggctcagcccagagagcagaggcgagtttggtttgctgatgggatcttgcccaatggagaagttgctgatgcagccaaattaacaatgaatggaacttcctctgcaggaaccctggctgtgtcacacgacccagtcaagccagtaactaccagtcctctaccagcagagacggatatttgtctattctctgggagtataactcaggttggaagtcctgttggaagtgcaatgaatcttattcctgaagatggccttcctcccattctcatctccactggtgtaaaaggagactatgctgtggaagagaaaccatcacagatttcagtaatgcagcagttggaggatggtggccctgacccacttgtatttgttttaaatgcaaatttgttgtcaatggttaaaattgtaaattatgtgaacaggaagtgctggtgtttcacaaccaagggaatgcatgcagtgggtcagtctgagatagtcattcttctacagtgtttaccggatgaaaagtgtttgccaaaggatatctttaatcactttgtgcagctttatcgggatgctctggcagggaatgtggtgagcaacttgggacattccttcttcagtcaaagtttccttggcagtaaagaacatggtggattcttatatgtgacatctacctaccagtcactgcaagacctagtactcccaaccccaccttacttgtttgggattcttatccagaaatgggaaactccttgggctaaagtatttcctatccgtctgatgttgagacttggagctgaatatcgactttatccatgcccactattcagtgtcagatttcggaagccattgtttggagagacggggcataccatcatgaatcttcttgcagacttcagaaattaccagtataccttgccagtagttcaaggtttggtggttgatatggaagttcggaaaactagcatcaaaattcccagcaacagatacaatgagatgatgaaagccatgaacaagtccaatgagcatgtcctggcaggaggtgcctgcttcaatgaaaaggcagactctcatcttgtgtgtgtacagaatgatgatggaaactatcagacccaggctatcagtattcacaatcagcccagaaaagtgactggtgccagtttctttgtgttcagtggcgctctgaaatcctcttctggataccttgccaagtccagtattgtggaagatggtgttatggtccagattactgcagagaacatggattccttgaggcaggcactgcgagagatgaaggacttcaccatcacctgtgggaaggcggacgcggaggaaccccaggagcacatccacatccagtgggtggatgatgacaagaacgttagcaagggtgtcgtaagtcctatagatgggaagtccatggagactataacaaatgtgaagatattccatggatcagaatataaagcaaatggaaaagtaatcagatggacagaggtgtttttcctagaaaacgatgaccagcacaattgcctcagtgatcctgcagatcacagtagattgactgagcatgttgccaaagctttttgccttgctctctgtcctcacctgaaacttctgaaggaagatggaatgaccaaactgggactacgtgtgacacttgactcagatcaggttggctatcaagcagggagcaatggccagccccttccctcgcagtacatgaatgatctggacagcgccttggtgccggtgatccatggaggggcctgccagcttagtgagggccccgttgtcatggaactcatcttttatattctggaaaacatcgtataaacagagaagacttcatttttttctgttcagacttgttgcaacagcagtcatacccaaatcatttgcactttaaaactggaagattaagcttttgttaacactattaatggggtggggaatagggtgggagtgggggtttgggagacgggtgggaaagggtggttggggggaccgatgttccataattctaagtcttctatgcattgtccaccaagaagatctgggcagcttctgttcctgcacaacagttatgctatccttgcagctaatccccttctgttactgtttagacaagaattccgctcctctctcaagatttacttatggtcatgtgctcagaaatgctcaaatgggtacaaccatcaccaagggtgggatgggagggcagaggggaaataaaatataaagcatcagttcttgcac

SEQ ID NO: 110036 - DNA, 2625 bp, Homo sapiens
atgctgaagcggaggcggccgctgctcgaggatcaaacagagcatactgaatcagcaggactggctggtggtgcagcagacatcatgagtaagcaccgagaagtctgttccttatcacgtgtgtaaggggaaaaaggtttaaacaagtctcttaagtggtgtttcctcaccgatggagaattacttccaagcagaagcttacaacctggacaaggtgttagatgaatttgaacaaaacgaagatgaaacagtttcttctactttattggatacaaagtggaataagattctagatcccccttctcaccggctgtcatttaaccctactttggccagtgtgaatgaatctgcagtttctaatgagtcacaaccacaactgaaagtcttctccctggctcattcagctcccctgaccacagaggaagaggatcactgtgctaatggacaggactgtaatctaaatccagagattgccacaatgtggattgatgaaaatgctgttgcagaagaccagttaattaagagaaactatagttgggatgatcaatgcagtgctgttgaagtgggagagaagaaatgtggaaacctggcttgtctgccagatgagaagaatgttcttgttgtagccgtcatgcataactgtgataaaaggacattacaaaacgatttacaggattgtaataattataatagtcaatcccttatggatgcttttagctgttcactggataatgaaaacagacaaactgatcaatttagttttagtataaatgagtccactgaaaaagatatgaattcagagaaacaaatggatccattgaatagaccgaaaacagaggggagatctgttaaccatctgtgtcctacttcatctgatagtctagccagtgtctgttccccttcacaattaaaggatgacggaagtataggtagagacccctccatgtctgcgattacaagtttaacggttgattcagtaatctcatcccagggaacagatggatgtcctgctgttaaaaagcaagagaactatataccagatgaggacctcactggcaaaatcagctctcctaggacagatctagggagtccaaattccttttcccacatgagtgaggggattttgatgaaaaaagagccagcagaggagagcaccactgaagaatccctccggtctggtttacctttgcttctcaaaccagacatgcctaatgggtctggaaggaataatgactgtgaacggtgttcagattgccttgtgcctaatgaagttagggctgatgaaaatgaaggttatgaacatgaagaaactcttggcactacagaattccttaatatgacagagcatttctctgaatctcaggacatgactaattggaagttgactaaactaaatgagatgaatgatagccaagtaaacgaagaaaaggaaaagtttctacagattagtcagcctgaggacactaatggtgatagtggaggacagtgtgttggattggcagatgcaggtctagatttaaaaggaacttgcattagtgaaagtgaagaatgtgatttctccactgttatagacacaccagcagcaaattatctatctaatggttgtgattcctatggaatgcaagacccaggtgtttcttttgttccaaagactttaccctccaaagaagattcagtaacagaagaaaaagaaatagaggaaagcaagtcagaatgctactcaaatatttatgaacagagaggaaatgaggccacagaagggagtggactacttttaaacagcactggtgacctaatgaagaaaaattatttacataatttctgtagtcaagttccatcagtgcttgggcaatcttcccccaaggtagtagcaagcctgccatctatcagtgttccttttggtggtgcaagacccaagcaaccttctaatcttaaacttcaaattccaaagccattatcagaccatttacaaaatgactttcctgcaaacagtggaaataatactaaaaataaaaatgatattcttgggaaagcaaaattaggggaaaactcagcaaccaatgtatgcagtccatctttgggaaacatctctaatgtcgatacaaatggggaacatttagaaagttatgaggctgagatctccactagaccatgccttgcattagctccagatagcccagataatgatctcagagctggtcagtttggaatttctgccagaaagccattcaccactctgggtgaggtggctccagtatgggtaccggattctcaggctccaaattgcatgaaatgtgaagccaggtttacattcaccaaaaggaggcatcactgcagagcatgtgggaaggttttctgtgcttcctgctgtagcctgaaatgtaaactgttatacatggacagaaaggaagctagagtgtgtgtaatctgccattcagtgctaatgaatggtaagtattaaaacaggttgatttcatagttattgagacaaaacaagggaattacgatgagaagacttttttccccctgcctttctttacaagttgctcaccttctcaaatgtcataactttaactgaaaatatttagctaaatttccatgttttgaaagtatcttagcatttca

SEQ ID NO: 110037 - DNA, 4819 bp, Homo sapiens
atgctgaagcggaggcggccgctgctcgaggatcaaacagagcatactgaatcagcaggactggctggtggtgcagcagacatcatgagtaagcaccgagaagtctgttccttatcacgtgtgtaaggggaaaaaggtttaaacaagtctcttaagtggtgtttcctcaccgatggagaattacttccaagcagaagcttacaacctggacaaggtgttagatgaatttgaacaaaacgaagatgaaacagtttcttctactttattggatacaaagtggaataagattctagatcccccttctcaccggctgtcatttaaccctactttggccagtgtgaatgaatctgcagtttctaatgagtcacaaccacaactgaaagtcttctccctggctcattcagctcccctgaccacagaggaagaggatcactgtgctaatggacaggactgtaatctaaatccagagattgccacaatgtggattgatgaaaatgctgttgcagaagaccagttaattaagagaaactatagttgggatgatcaatgcagtgctgttgaagtgggagagaagaaatgtggaaacctggcttgtctgccagatgagaagaatgttcttgttgtagccgtcatgcataactgtgataaaaggacattacaaaacgatttacaggattgtaataattataatagtcaatcccttatggatgcttttagctgttcactggataatgaaaacagacaaactgatcaatttagttttagtataaatgagtccactgaaaaagatatgaattcagagaaacaaatggatccattgaatagaccgaaaacagaggggagatctgttaaccatctgtgtcctacttcatctgatagtctagccagtgtctgttccccttcacaattaaaggatgacggaagtataggtagagacccctccatgtctgcgattacaagtttaacggttgattcagtaatctcatcccagggaacagatggatgtcctgctgttaaaaagcaagagaactatataccagatgaggacctcactggcaaaatcagctctcctaggacagatctagggagtccaaattccttttcccacatgagtgaggggattttgatgaaaaaagagccagcagaggagagcaccactgaagaatccctccggtctggtttacctttgcttctcaaaccagacatgcctaatgggtctggaaggaataatgactgtgaacggtgttcagattgccttgtgcctaatgaagttagggctgatgaaaatgaaggttatgaacatgaagaaactcttggcactacagaattccttaatatgacagagcatttctctgaatctcaggacatgactaattggaagttgactaaactaaatgagatgaatgatagccaagtaaacgaagaaaaggaaaagtttctacagattagtcagcctgaggacactaatggtgatagtggaggacagtgtgttggattggcagatgcaggtctagatttcacaccagcagcaaattatctatctaatggttgtgattcctatggaatgcaagacccaggtgtttcttttgttccaaagactttaccctccaaagaagattcagtaacagaagaaaaagaaatagaggaaagcaagtcagaatgctactcaaatatttatgaacagagaggaaatgaggccacagaagggagtggactacttttaaacagcactggtgacctaatgaagaaaaattatttacataatttctgtagtcaagttccatcagtgcttgggcaatcttcccccaaggtagtagcaagcctgccatctatcagtgttccttttggtggtgcaagacccaagcaaccttctaatcttaaacttcaaattccaaagccattatcagaccatttacaaaatgactttcctgcaaacagtggaaataatactaaaaataaaaatgatattcttgggaaagcaaaattaggggaaaactcagcaaccaatgtatgcagtccatctttgggaaacatctctaatgtcgatacaaatggggaacatttagaaagttatgaggctgagatctccactagaccatgccttgcattagctccagatagcccagataatgatctcagagctggtcagtttggaatttctgccagaaagccattcaccactctgggtgaggtggctccagtatgggtaccggattctcaggctccaaattgcatgaaatgtgaagccaggtttacattcaccaaaaggaggcatcactgcagagcatgtgggaaggttttctgtgcttcctgctgtagcctgaaatgtaaactgttatacatggacagaaaggaagctagagtgtgtgtaatctgccattcagtgctaatgaatgctcaagcctgggagaacatgatgagtgcctcaagccagagccctaaccctaacaatcctgctgaatactgttctactatccctcccttgcagcaagctcaggcctcaggagctctgagctctccacctcccactgtgatggtacctgtgggagttttaaagcaccctggagcagaagtggctcagcccagagagcagaggcgagtttggtttgctgatgggatcttgcccaatggagaagttgctgatgcagccaaattaacaatgaatggaacttcctctgcaggaaccctggctgtgtcacacgacccagtcaagccagtaactaccagtcctctaccagcagagacggatatttgtctattctctgggagtataactcaggttggaagtcctgttggaagtgcaatgaatcttattcctgaagatggccttcctcccattctcatctccactggtgtaaaaggagactatgctgtggaagagaaaccatcacagatttcagtaatgcagcagttggaggatggtggccctgacccacttgtatttgttttaaatgcaaatttgttgtcaatggttaaaattgtaaattatgtgaacaggaagtgctggtgtttcacaaccaagggaatgcatgcagtgggtcagtctgagatagtcattcttctacagtgtttaccggatgaaaagtgtttgccaaaggatatctttaatcactttgtgcagctttatcgggatgctctggcagggaatgtggtgagcaacttgggacattccttcttcagtcaaagtttccttggcagtaaagaacatggtggattcttatatgtgacatctacctaccagtcactgcaagacctagtactcccaaccccaccttacttgtttgggattcttatccagaaatgggaaactccttgggctaaagtatttcctatccgtctgatgttgagacttggagctgaatatcgactttatccatgcccactattcagtgtcagatttcggaagccattgtttggagagacggggcataccatcatgaatcttcttgcagacttcagaaattaccagtataccttgccagtagttcaaggtttggtggttgatatggaagttcggaaaactagcatcaaaattcccagcaacagatacaatgagatgatgaaagccatgaacaagtccaatgagcatgtcctggcaggaggtgcctgcttcaatgaaaaggcagactctcatcttgtgtgtgtacagaatgatgatggaaactatcagacccaggctatcagtattcacaatcagcccagaaaagtgactggtgccagtttctttgtgttcagtggcgctctgaaatcctcttctggataccttgccaagtccagtattgtggaagatggtgttatggtccagattactgcagagaacatggattccttgaggcaggcactgcgagagatgaaggacttcaccatcacctgtgggaaggcggacgcggaggaaccccaggagcacatccacatccagtgggtggatgatgacaagaacgttagcaagggtgtcgtaagtcctatagatgggaagtccatggagactataacaaatgtgaagatattccatggatcagaatataaagcaaatggaaaagtaatcagatggacagaggtgtttttcctagaaaacgatgaccagcacaattgcctcagtgatcctgcagatcacagtagattgactgagcatgttgccaaagctttttgccttgctctctgtcctcacctgaaacttctgaaggaagatggaatgaccaaactgggactacgtgtgacacttgactcagatcaggttggctatcaagcagggagcaatggccagccccttccctcgcagtacatgaatgatctggacagcgccttggtgccggtgatccatggaggggcctgccagcttagtgagggccccgttgtcatggaactcatcttttatattctggaaaacatcgtataaacagagaagacttcatttttttctgttcagacttgttgcaacagcagtcatacccaaatcatttgcactttaaaactggaagattaagcttttgttaacactattaatggggtggggaatagggtgggagtgggggtttgggagacgggtgggaaagggtggttggggggaccgatgttccataattctaagtcttctatgcattgtccaccaagaagatctgggcagcttctgttcctgcacaacagttatgctatccttgcagctaatccccttctgttactgtttagacaagaattccgctcctctctcaagatttacttatggtcatgtgctcagaaatgctcaaatgggtacaaccatcaccaagggtgggatgggagggcagaggggaaataaaatataaagcatcagttcttgcac

SEQ ID NO: 110038 - DNA, 3628 bp, Homo sapiens
atgctgaagcggaggcggccgctgctcgaggatcaaacagagcatactgaatcagcaggactggctggtggtgcagcagacatcatgagtaagcaccgagaagtctgttccttatcacgtgtgtaaggggaaaaaggtttaaacaagtctcttaagtggtgtttcctcaccgatggagaattacttccaagcagaagcttacaacctggacaaggtgttagatgaatttgaacaaaacgaagatgaaacagtttcttctactttattggatacaaagtggaataagattctagatcccccttctcaccggctgtcatttaaccctactttggccagtgtgaatgaatctgcagtttctaatgagtcacaaccacaactgaaagtcttctccctggctcattcagctcccctgaccacagaggaagaggatcactgtgctaatggacaggactgtaatctaaatccagagattgccacaatgtggattgatgaaaatgctgttgcagaagaccagttaattaagagaaactatagttgggatgatcaatgcagtgctgttgaagtgggagagaagaaatgtggaaacctggcttgtctgccagatgagaagaatgttcttgttgtagccgtcatgcataactgtgataaaaggacattacaaaacgatttacaggattgtaataattataatagtcaatcccttatggatgcttttagctgttcactggataatgaaaacagacaaactgatcaatttagttttagtataaatgagtccactgaaaaagatatgaattcagagaaacaaatggatccattgaatagaccgaaaacagaggggagatctgttaaccatctgtgtcctacttcatctgatagtctagccagtgtctgttccccttcacaattaaaggatgacggaagtataggtagagacccctccatgtctgcgattacaagtttaacggttgattcagtaatctcatcccagggaacagatggatgtcctgctgttaaaaagcaagagaactatataccagatgaggacctcactggcaaaatcagctctcctaggacagatctagggagtccaaattccttttcccacatgagtgaggggattttgatgaaaaaagagccagcagaggagagcaccactgaagaatccctccggtctggtttacctttgcttctcaaaccagacatgcctaatgggtctggaaggaataatgactgtgaacggtgttcagattgccttgtgcctaatgaagttagggctgatgaaaatgaaggttatgaacatgaagaaactcttggcactacagaattccttaatatgacagagcatttctctgaatctcaggacatgactaattggaagttgactaaactaaatgagatgaatgatagccaagtaaacgaagaaaaggaaaagtttctacagattagtcagcctgaggacactaatggtgatagtggaggacagtgtgttggattggcagatgcaggtctagatttaaaaggaacttgcattagtgaaagtgaagaatgtgatttctccactgttatagacacaccagcagcaaattatctatctaatggttgtgattcctatggaatgcaagacccaggtgtttcttttgttccaaagactttaccctccaaagaagattcagtaacagaagaaaaagaaatagaggaaagcaagtcagaatgctactcaaatatttatgaacagagaggaaatgaggccacagaagggagtggactacttttaaacagcactggtgacctaatgaagaaaaattatttacataatttctgtagtcaagttccatcagtgcttgggcaatcttcccccaaggtagtagcaagcctgccatctatcagtgttccttttggtggtgcaagacccaagcaaccttctaatcttaaacttcaaattccaaagccattatcagaccatttacaaaatgactttcctgcaaacagtggaaataatactaaaaataaaaatgatattcttgggaaagcaaaattaggggaaaactcagcaaccaatgtatgcagtccatctttgggaaacatctctaatgtcgatacaaatggggaacatttagaaagttatgaggctgagatctccactagaccatgccttgcattagctccagatagcccagataatgatctcagagctggtcagtttggaatttctgccagaaagccattcaccactctgggtgaggtggctccagtatgggtaccggattctcaggctccaaattgcatgaaatgtgaagccaggtttacattcaccaaaaggaggcatcactgcagagcatgtgggaaggttttctgtgcttcctgctgtagcctgaaatgtaaactgttatacatggacagaaaggaagctagagtgtgtgtaatctgccattcagtgctaatgaatgctcaagcctgggagaacatgatgagtgcctcaagccagagccctaaccctaacaatcctgctgaatactgttctactatccctcccttgcagcaagctcaggcctcaggagctctgagctctccacctcccactgtgatggtacctgtgggagttttaaagcaccctggagcagaagtggctcagcccagagagcagaggcgagtttggtttgctgatgggatcttgcccaatggagaagttgctgatgcagccaaattaacaatgaatggaacttcctctgcaggaaccctggctgtgtcacacgacccagtcaagccagtaactaccagtcctctaccagcagagacggatatttgtctattctctgggagtataactcaggttggaagtcctgttggaagtgcaatgaatcttattcctgaagatggccttcctcccattctcatctccactggtgtaaaaggagactatgctgtggaagagaaaccatcacagatttcagtaatgcagcagttggaggatggtggccctgacccacttgtatttgttttaaatgcaaatttgttgtcaatggttaaaattgtaaattatgtgaacaggaagtgctggtgtttcacaaccaagggaatgcatgcagtgggtcagtctgagatagtcattcttctacagtgtttaccggatgaaaagtgtttgccaaaggatatctttaatcactttgtgcagctttatcgggatgctctggcagggaatgtggtgagcaacttgggacattccttcttcagtcaaagtttccttggcagtaaagaacatggtggattcttatatgtgacatctacctaccagtcactgcaagacctagtactcccaaccccaccttacttgtttgggattcttatccagaaatgggaaaggtggttggggggaccgatgttccataattctaagtcttctatgcattgtccaccaagaagatctgggcagcttctgttcctgcacaacagttatgctatccttgcagctaatccccttctgttactgtttagacaagaattccgctcctctctcaagatttacttatggtcatgtgctcagaaatgctcaaatgggtacaaccatcaccaagggtgggatgggagggcagaggggaaataaaatataaagcatcagttcttgcac

SEQ ID NO: 110039 - DNA, 3049 bp, Homo sapiens
atgctgaagcggaggcggccgctgctcgaggatcaaacagagcatactgaatcagcaggactggctggtggtgcagcagacatcatgagtaagcaccgagaagtctgttccttatcacgtgtgtaaggggaaaaaggtttaaacaagtctcttaagtggtgtttcctcaccgatggagaattacttccaagcagaagcttacaacctggacaaggtgttagatgaatttgaacaaaacgaagatgaaacagtttcttctactttattggatacaaagtggaataagattctagatcccccttctcaccggctgtcatttaaccctactttggccagtgtgaatgaatctgcagtttctaatgagtcacaaccacaactgaaagtcttctccctggctcattcagctcccctgaccacagaggaagaggatcactgtgctaatggacaggactgtaatctaaatccagagattgccacaatgtggattgatgaaaatgctgttgcagaagaccagttaattaagagaaactatagttgggatgatcaatgcagtgctgttgaagtgggagagaagaaatgtggaaacctggcttgtctgccagatgagaagaatgttcttgttgtagccgtcatgcataactgtgataaaaggacattacaaaacgatttacaggattgtaataattataatagtcaatcccttatggatgcttttagctgttcactggataatgaaaacagacaaactgatcaatttagttttagtataaatgagtccactgaaaaagatatgaattcagagaaacaaatggatccattgaatagaccgaaaacagaggggagatctgttaaccatctgtgtcctacttcatctgatagtctagccagtgtctgttccccttcacaattaaaggatgacggaagtataggtagagacccctccatgtctgcgattacaagtttaacggttgattcagtaatctcatcccagggaacagatggatgtcctgctgttaaaaagcaagagaactatataccagatgaggacctcactggcaaaatcagctctcctaggacagatctagggagtccaaattccttttcccacatgagtgaggggattttgatgaaaaaagagccagcagaggagagcaccactgaagaatccctccggtctggtttacctttgcttctcaaaccagacatgcctaatgggtctggaaggaataatgactgtgaacggtgttcagattgccttgtgcctaatgaagttagggctgatgaaaatgaaggttatgaacatgaagaaactcttggcactacagaattccttaatatgacagagcatttctctgaatctcaggacatgactaattggaagttgactaaactaaatgagatgaatgatagccaagtaaacgaagaaaaggaaaagtttctacagattagtcagcctgaggacactaatggtgatagtggaggacagtgtgttggattggcagatgcaggtctagatttaaaaggaacttgcattagtgaaagtgaagaatgtgatttctccactgttatagacacaccagcagcaaattatctatctaatggttgtgattcctatggaatgcaagacccaggtgtttcttttgttccaaagactttaccctccaaagaagattcagtaacagaagaaaaagaaatagaggaaagcaagtcagaatgctactcaaatatttatgaacagagaggaaatgaggccacagaagggagtggactacttttcttcccccaaggtagtagcaagcctgccatctatcagtgttccttttggtggtgcaagacccaagcaaccttctaatcttaaacttcaaattccaaagccattatcagaccatttacaaaatgactttcctgcaaacagtggaaataatactaaaaataaaaatgatattcttgggaaagcaaaattagtggcgctctgaaatcctcttctggataccttgccaagtccagtattgtggaagatggtgttatggtccagattactgcagagaacatggattccttgaggcaggcactgcgagagatgaaggacttcaccatcacctgtgggaaggcggacgcggaggaaccccaggagcacatccacatccagtgggtggatgatgacaagaacgttagcaagggtgtcgtaagtcctatagatgggaagtccatggagactataacaaatgtgaagatattccatggatcagaatataaagcaaatggaaaagtaatcagatggacagaggtgtttttcctagaaaacgatgaccagcacaattgcctcagtgatcctgcagatcacagtagattgactgagcatgttgccaaagctttttgccttgctctctgtcctcacctgaaacttctgaaggaagatggaatgaccaaactgggactacgtgtgacacttgactcagatcaggttggctatcaagcagggagcaatggccagccccttccctcgcagtacatgaatgatctggacagcgccttggtgccggtgatccatggaggggcctgccagcttagtgagggccccgttgtcatggaactcatcttttatattctggaaaacatcgtataaacagagaagacttcatttttttctgttcagacttgttgcaacagcagtcatacccaaatcatttgcactttaaaactggaagattaagcttttgttaacactattaatggggtggggaatagggtgggagtgggggtttgggagacgggtgggaaagggtggttggggggaccgatgttccataattctaagtcttctatgcattgtccaccaagaagatctgggcagcttctgttcctgcacaacagttatgctatccttgcagctaatccccttctgttactgtttagacaagaattccgctcctctctcaagatttacttatggtcatgtgctcagaaatgctcaaatgggtacaaccatcaccaagggtgggatgggagggcagaggggaaataaaatataaagcatcagttcttgcac

SEQ ID NO: 110040 - DNA, 2466 bp, Homo sapiens
tcttgggtacagaatggggcagtttcagtgtctgcggagcaccacatttgtgagagcaccaaacctttaccatacacaagagataaagaaaaaggcaagaagtttggttttagtctcttatggcgcagcttatctagaaaggagaagcccaaaacagaacacagcagtttctctgctcagttcccacctgaagaatggcccgtccgagatgaagatgacttggacaatatccctcgagatgttgaacatgagataatcaaacgaattaaccccattttgactgttgacaatttaatcaaacacactgtcctaatgcaaaaatacgaagaacagaaaaaatataatagccagggcacttccactgacatgctgacaatcgggcataagtatccttcaaaagagggggttaagaaaaggcagggtctgtctgcaaaacctcaagggcagggccattctcgaagggatagacacaaagccaggaatcagggaagtgagtttcagccaggaagcattagactggagaaacaccccaagctccctgctacacagcccatccccagaattaaaagcccaaatgaaatggtaggtcagaaaccacttggtgagattacaacagtgctaggttcccatttgatttacaaaaagcgaatcagtaatcctttccagggtttgtctcaccgaggaagcacaatatccaaagggcacaaaattcagaagacgagtgatctgaaacccagccagactggaccaaaggaaaagcctttccaaaagcctaggtccttggattcctcaagaatctttgatggtaaagccaaagagccatatgctgaacaacctaatgataaaatggaagcagaatccatttacataaatgaccctactgtcaaacccatcaatgatgacttcagaggtcacctcttcagtcaccctcaacagagcatgttgcaaaatgatggtaaatgctgtccctttatggaaagcatgttgagatatgaagtgtatggtggagaaaatgaggtaattcctgaagtcttgaggaaaagtcattcccactttgacaaattaggggagaccaaacagactccgcatagtctgccatcacgaggtgcctccttttcagaccgaacaccctctgcttgtagattagtggataacacaatacaccagtttcaaaatcttggccttttggattacccagttggcgtgaaccctttaagacaagctgcaagacaagacaaagactcagaagaattattgagaaaaggatttgtccaggatgcagagactacaagcctagaaaatgaacagctttctaacgatgaccaggccttgtatcagaatgaagtggaagatgatgatggtgcctgtagttcattatatctagaggaggatgacatttctgagaatgacgacttacgtcaaatgctgcctggccacagtcagtattccttcacaggtggaagccagggaaatcatttaggaaaacaaaaagtgattgagagatctctgaccgagtacaacagcacaatggagagggttgagtctcaggtgcttaaaagaaatgaatgctacaaacccactgggctgcatgctaccccaggtgaaagccaagaacctaacctctctgctgaaagttgtggcctaaattcaggggcccagtttggttttaactacgaagaagaacccagtgttgctaaatgtgtacaggcctcagcacctgctgatgaaagaatctttgattactatagcgcaagaaaagccagttttgaagctgaagtcatacaagacactattggtgacacaggaaagaagccagctagctggagtcagagtcctcagaatcaggaaatgagaaaacatttcccacaaaagttccaacttttcaacacttcacatatgccagtgttggctcaggatgtccaatatgaacacagtcacttggaagggacagaaaatcacagcatggcaggagatagtggaatagattctccacggacacagagtctgggatctaataattcagtcattttggatggactaaaaagaagacagaattttctgcaaaatgtcgaaggcacaaagagcagtcaaccactcacatctaattccttactaccgctaactccagtcataaacgtttaattttcttttggaaacctacttttttctttataaaaaggtagagcattattacagaatctttcaatcatgtaagaattgagtatataagaattgtctaaaggcaagcatatctatactattaaccacattacacattttgttctaattactggctttttttcctcttttggtgtcttaaggctttttgaagcttattttactgtgagtttattgggagtatatagattattttcgattaaaaagtggaattattggtccccttccaattgtaattatcttgaatttttatacattagtttctcaaatatatagaatgccaattta

SEQ ID NO: 110041 - DNA, 814 bp, Homo sapiens
ccagtgcaaatgaatccaataactcaatctcagttcgtacctttgggtgaagttctttgctgtgctatatctgatatgaatacagctcagattgtagtaacgcaggaatcacttttggagcgtttgatgaaacattacccaggcattgcaattccatcggaagatattctttataccactctgggaacgctgattaaagaaaggaagatttatcacactggagaaggatacttcatagttactcctcagacttacttcattacaaatacaaccacccaggaaaataagagaatgctgccatcagatgaaagtcgcctgatgccagcttccatgacatatctggacacagagtctgggatctaataattcagtcattttggatggactaaaaagaagacagaattttctgcaaaatgtcgaaggcacaaagagcagtcaaccactcacatctaattccttactaccgctaactccagtcataaacgtttaattttcttttggaaacctacttttttctttataaaaaggtagagcattattacagaatctttcaatcatgtaagaattgagtatataagaattgtctaaaggcaagcatatctatactattaaccacattacacattttgttctaattactggctttttttcctcttttggtgtcttaaggctttttgaagcttattttactgtgagtttattgggagtatatagattattttcgattaaaaagtggaattattggtccccttccaattgtaattatcttgaatttttatacattagtttctcaaatatatagaatgccaattta

SEQ ID NO: 110042 - DNA, 467 bp, Homo sapiens
gggattacaggcgtgagccaccgcgcgcggtctccatgcttctaaatactttgaaatgctggattaaatgcaaccctcgtccctaaaatgaataactagttcacaggaaagagcagtacccagagtctaaaatctaagagtgaacaaaaaagccagagcagtgagcagaactgcaccatgggtgcaaggctaggggtcttgactgaggaccttgagttttaatgaccacatcgacttgagacaaggcctggggtctaagccatgtaggagttggaattaagtcaccagcataaagtcaagctgcttaaaaaaggactgaggcagacctgggaaaacccaactgacagcacaagaactagcagagaagttggaatgtctcagcctgtttttgggttgggataacagtcttcccttgagactgtgtaaccacaggtctgccctcatgtggattcagggccagtttaata

SEQ ID NO: 110043 - DNA, 433 bp, Homo sapiens
gagggagagccagatcctgcaaacctcactgaggccttaggcttgatcctagaaggagtgggaataaatgaaggtaggtgttggtgatgactgctaatacaaaccctcactgctttctaatgatagaagcatcacattccagaacatgtaggagataaaggttttaaagaaaataaaaattacactaatgcccatcaccatttgttctttttttatttccagtatttaaaaatgtatacatttaaaatagctgagatgctgtatatatagctcttaatcttttacctcacttcttctatcatgagcatttttctgtaacacattttttgagacattttgatgactgtatattatcctactttgtgaatttttataatttatataatatccatttctaagatttttgttcttatggataaaattgttttactta

SEQ ID NO: 110044 - DNA, 595 bp, Homo sapiens
cccaagatggcgctgaacaaggctctcaggatgcctataagatgtgcaaggaatgaccatttcacaaaacaactcacgctttcctacctctggctgtaaaattgactttcctttctttccatcttaagagattctgcttcatttcaaaagcaagtaagataaggattagaaataccagccattgtcctgtcttgataaggacagactgaaggacacgttacgtgggttcccgttccttggctttaccacttagagccactgaccttggatcatggactcaaggccaatgactggcctcctgtggtccataaccaggtccctgttcaatatcaatgtcatcttttcagatattctgaaaagctgaattattttgttttccattttccttggtctatttgagaaatgatactgtatcagttttagatatttattttttaactatgacacagtccactcataggatgaaggatggcgtgccaaggctgtgcccaaaactgatcccacattcccatcacggatgtgattctaccccaggtctatgtcctgagaacttgtctcatcagagacatataaacaattcctagaacaaactttg

SEQ ID NO: 110045 - DNA, 213 bp, Homo sapiens
atagtacaggggagacagaaattggagataggagcctgtaaggaagagtcaccctgataagcatcttggtttacctgttgagaacggctatgccccaggggtaagagtaaaccagaaatagaccagtcttcatgaaaagtgaaacacagctgcagttagaacaaagtaatgtgccacttctgtacctgctcatcaggagacaaccggtcctct

SEQ ID NO: 110046 - DNA, 673 bp, Homo sapiens
actaggaacattcgtccggtgcgcgcagctagtcaggaggtgaacgtgggcataatctgttcacctcacgagatgctcggggtgcttgcactagatgcctgtggattgctcacacatgtaactcaaggcctggggttgacaaagagagacggattctgatacaataatcaaattgaatgagaatgattcatgtagaggtcaattaatatggtgtcgtagcgaacaaggatgtcaatgcggagtgctgttatcaaaaatattcaggggtgaatatttattatcaaaagttattaagttttttttatcccgatttaatgattttacttcttgaaatttatcctcaggctaaaataattcagttttaaaaaactgatttccataatgatgtctgtcagatttaggtataatatatcagcccctcaaataggaaagtgtgggatgggagttagaggccacatggccactactaaactataattataattaatatagtccttagaatacacttaccacagccagaaataatactttctataagtaaaactctaacaaatctaccactgttctagatggtatgtagcaaaaataagcaaaaacaaaacaggcaactttcaatagtgtaaacaacatgaaaaaatgctgattgtataaaatgttatgtctcttagtaact

SEQ ID NO: 110047 - DNA, 244 bp, Homo sapiens
aagcggtgttcagggagaggaggctgttatggctgtccaggcaagggatgggcagagcaggtaaatgtcagggtcaggggtgggagaggtgggagatgcacataggaggggtcggagaggtgtctttggcaggagctggccggggagtgattcctagtcaggggttttgggcatgtgtagaaggacagagtggtggcagcttctttattgtcatcttcttttttttgagatagagtcccactct

SEQ ID NO: 110048 - DNA, 531 bp, Homo sapiens
gaacctttcaaaacgatgcggggggtatacgtcgcctctaagctccttgaagatggaacttgacagtatcttgacagaaatcctcgagacgtcgcatagttcgtcctagagctactgcatcagttagtaatacgcccagagtgtgagaacagacagacgcaactggatgcatattcacgtagagggaacgagtgagtcttaagtatggttacgataatagctaatataagcactttatatggataatttcatttaatactgcagctcagtgagatggtagtggctattcccatttctgtgaatcggacaacattgcagtaattaaaaagaaggcagttctacagatattgacaattcagggaactcacttaccttggaatttcttgagcagtctgttaactgttgcattctttaatttttaattatattttaaaatcataaatgttatacacacatgttgtatataaaaattttgaaagaattctgaaataaagtaacagtatgctacatatatttctatagcttctttcc

SEQ ID NO: 110049 - DNA, 362 bp, Homo sapiens
tggttttcaaggtgtggtctgcagagaaccttataggaaatatctggtgtcaaaactatttttataataatgctaagatattatttacacttttcactgtcttgacatttgcaccgatagtataaaatcaatgtctgataaaactgctggctgcttagtacaaatcagctgcttagttgagaacaataaatggactcaagaaaataacgtggaagttgtacacatccttccatctacttacattccattggtaagaacttgtccaaatggtgaggctaagaccttgacatggaggaaggagtccatttaaaagggaaattcagggaatggtttctggggaaacactggcaatatctgccctg

SEQ ID NO: 110050 - DNA, 361 bp, Homo sapiens
ctagaatgtagtggttaagaagagtgtggcctggccgggtgtggtggctcatgcctctcacttttgagaggctgaggtggaggatcacttgagcctaggagttcgagaccagcctgggctacagggcgagaccccatctctatttaaaaaaaaaaagtggccttggatctagatagacatggattctagtcctgcttcatcacctgtgaacgagtgatgatgacaaatgagttaagttctgtaaactctcatttcctcattggtggaaatagaataataataaagctactactgtcttaatgagattgtaagaaaacaaagtgcttagcactgtatttgctaaaaggacttaataaacaca

SEQ ID NO: 110051 - DNA, 220 bp, Homo sapiens
tagggctacagggcgtgtctcctgttaacctgagtgttctttttttgatgaaagcaataagaggactgcggaagagctccctgtcaatgtaccgctctacaccagtgtattacgacagttcgtacacaacagtctgtagaggccacctgtctctccctgctgcgttaggaattcaggggagcaggtggtggcagtaagggattttgagggaacggaaatc

SEQ ID NO: 110052 - DNA, 128 bp, Homo sapiens
tttgctattgagttgtaggatatccttacacattctgctcatatagtttgaatattaaccaaaccatgagatagatggtgtgcaaatagtttctcccatttcatatgatgtctttttcattcttgatc

SEQ ID NO: 110053 - DNA, 191 bp, Homo sapiens
attctttgtgatgggtatacatttgttaaataataataaggttaggatgctgatgtatagtatatacacaagcacttactattctacacaatttatttatttatttattttaattgagatagggtctcatcctgttgtccaggctctggcgcagtggtgtgatcacagctcactgtagcctcgacctctca

SEQ ID NO: 110054 - DNA, 764 bp, Homo sapiens
gagtaagcactggatcgtaacacaggaagggtgagggaagtgtctgggagtgttttttgtttgtttggggctgggatttttagatccagaaggttttcaacatatttcttagtttagcagaacgaaacagaggaatggaagagattgaagatgtaaaagagtgaaggaataattgtctgaaagcttggcatgagatcaagaataaaagggcggagactcttcctgtgatggaaggccaggggccaagaacagacaagcaagtctacaaaggagctttagatagagggttccccaggattggctttgagattctcagtgtggggggatctggagtaatctgctgagattaagtgttggaggaataggaacaggttaggggagagttttataggaatttttagagacagccattatgagaaatgtgacagggagggaactaatgatggataaaaggattcttgagtaacattaagtgcccagtcaagattagacagcaggcatttgaagtggagccaactcaacttcctctggctgtgcttggtacagctaaatcaagaggcagcaagatgtttcatgtggaaaaataaatttttaacactctattattctttaacggagggcaggaattgaagcatccttatatgaagataattcaaagacatccaatagaggtggcataaataccaaaaatttgaaaagtatgttgttccgcagccttgtttttaggctcaaataaacaccccattaagtagaatgtatacccc

SEQ ID NO: 110055 - DNA, 1197 bp, Homo sapiens
cagaagcagcaggagtgagctgtgggcacagctgtggggcagccaggcgcgtcaggcctcacatgtctgggagatgtaggctgcctgggctggtggcccctgagccgcatggcctccctgggccccaggacaccggccccgagcaggtcacgaggacggagggccatgtgttgggtcagcaccatcagctcctgcccatgttaactcagccgacaccgcagcagcatggtgacaggtccccccagggtgtctgcctctacagaggaagggactgaagcacccagagagctggcagcttcatggcggctgaagagatgcattggcctgtccctatgaaggccattggtgcccagaacctgctaaccatgcctgggggcgtggccaaggctggctacctgcacaagaagggcggtacccagcttcagctgctgaaatggcccctgcgctttgtcatcatccacaaacgctgcgtctactacttcaagagtagcacctctgcctccccgcagggcgccttctccctgagtggctataaccgggtgatgcgggcggctgaggagaccacgtccaacaacgttttccccttcaagatcatccacatcagcaagaagcaccgcacgtggttcttctcggcctcctccgaggaggagcgcaagagctggatggccttgctgcgcagggagattggccacttccacgaaaagaaagacctgcccttggacaccagcgactccagctcggacacagacagcttctacggcgcagttgagcggcctgtggatatcagcctttccccgtaccccacggacaatgaagactatgagcacgacgatgaggatgactcctacctggagcctgactccccggagcccggaaggcttgaggatgccctgatgcacccaccggcttacccaccacccccagtgcccacgcccaggaagccagccttctctgacatgccccgggcccactcctttacctccaagggccccggtcccctactgccacccccgccccctaagcacggcctcccagatgttggcctggcggctgaggactccaagagggaaccactgtgcccgaggcgggctgagccttgccccagggtacctgctaccccccgaaggatgagcgatcccctctgagcaccatgcccaccgcacccggcctccggaaacccccttgcttccgggagag

SEQ ID NO: 110056 - DNA, 1090 bp, Homo sapiens
cagaagcagcaggagtgagctgtgggcacagctgtggggcagccaggcgcgtcaggcctcacatgtctgggagatgtaggctgcctgggctggtggcccctgagccgcatggcctccctgggccccaggacaccggccccgagcaggtcacgaggacggagggccatgtgttgggtcagcaccatcagcttcatggcggctgaagagatgcattggcctgtccctatgaaggccattggtgcccagaacctgctaaccatgcctgggggcgtggccaaggctggctacctgcacaagaagggcggtacccagcttcagctgctgaaatggcccctgcgctttgtcatcatccacaaacgctgcgtctactacttcaagagtagcacctctgcctccccgcagggcgccttctccctgagtggctataaccgggtgatgcgggcggctgaggagaccacgtccaacaacgttttccccttcaagatcatccacatcagcaagaagcaccgcacgtggttcttctcggcctcctccgaggaggagcgcaagagctggatggccttgctgcgcagggagattggccacttccacgaaaagaaagacctgcccttggacaccagcgactccagctcggacacagacagcttctacggcgcagttgagcggcctgtggatatcagcctttccccgtaccccacggacaatgaagactatgagcacgacgatgaggatgactcctacctggagcctgactccccggagcccggaaggcttgaggatgccctgatgcacccaccggcttacccaccacccccagtgcccacgcccaggaagccagccttctctgacatgccccgggcccactcctttacctccaagggccccggtcccctactgccacccccgccccctaagcacggcctcccagatgttggcctggcggctgaggactccaagagggaaccactgtgcccgaggcgggctgagccttgccccagggtacctgctaccccccgaaggatgagcgatcccctctgagcaccatgcccaccgcacccggcctccggaaacccccttgcttccgggagag

SEQ ID NO: 110057 - DNA, 1172 bp, Homo sapiens
cgaggcctccgggctgattaggactaatggcgctcaggggtgcagcctcagcctccacccgccacccgtacccgccctgcctcaggacttcgttcctgctgtacccctgctggctgcctgtccccacaggtggctccttcctccccaccggaggagctgctcccaggcgggaccctgggggtggaatctctgaaatgccttcccctcgggaccctcaccgcgactggacttcgctcagcttcagaccctgggctgcagctgcctaatgagcttcatggcggctgaagagatgcattggcctgtccctatgaaggccattggtgcccagaacctgctaaccatgcctgggggcgtggccaaggctggctacctgcacaagaagggcggtacccagcttcagctgctgaaatggcccctgcgctttgtcatcatccacaaacgctgcgtctactacttcaagagtagcacctctgcctccccgcagggcgccttctccctgagtggctataaccgggtgatgcgggcggctgaggagaccacgtccaacaacgttttccccttcaagatcatccacatcagcaagaagcaccgcacgtggttcttctcggcctcctccgaggaggagcgcaagagctggatggccttgctgcgcagggagattggccacttccacgaaaagaaagacctgcccttggacaccagcgactccagctcggacacagacagcttctacggcgcagttgagcggcctgtggatatcagcctttccccgtaccccacggacaatgaagactatgagcacgacgatgaggatgactcctacctggagcctgactccccggagcccggaaggcttgaggatgccctgatgcacccaccggcttacccaccacccccagtgcccacgcccaggaagccagccttctctgacatgccccgggcccactcctttacctccaagggccccggtcccctactgccacccccgccccctaagcacggcctcccagatgttggcctggcggctgaggactccaagagggaaccactgtgcccgaggcgggctgagccttgccccagggtacctgctaccccccgaaggatgagcgatcccctctgagcaccatgcccaccgcacccggcctccggaaacccccttgcttccgggagag

SEQ ID NO: 110058 - DNA, 1644 bp, Homo sapiens
tgtggttgggggtcctgcggctgggacccgcccctgacccctccctgcccagaggggctgtctttgggtgcagaaggagctggtggggtccagccgggtgacccaggccgaggccggcagaagacagcctgatgccttgaagacttcctcttgcacttttgttggagggtgctggtttgctaaaagcagagagtatttttctttttatttattttgtttttaattttttaattttagctccagctcagttgcccagactggagagcagtggccaatcatagcttactgcctcctggaactcctggctcaatcgatcctcctggataagcctcctccgggtactatagcttcatggcggctgaagagatgcattggcctgtccctatgaaggccattggtgcccagaacctgctaaccatgcctgggggcgtggccaaggctggctacctgcacaagaagggcggtacccagcttcagctgctgaaatggcccctgcgctttgtcatcatccacaaacgctgcgtctactacttcaagagtagcacctctgcctccccgcagggcgccttctccctgagtggctataaccgggtgatgcgggcggctgaggagaccacgtccaacaacgttttccccttcaagatcatccacatcagcaagaagcaccgcacgtggttcttctcggcctcctccgaggaggagcgcaaggtgactgggggtccgaggacgagtgcaaggtgactgggggtgtgggcctgcaggcaccaggctggacctgccttgggggctcgctggtcctggggcgctggcctctcagccccgggcaaagagaaggtgtggctgggacacaggcagctgggtgggtgctgccccagctccatccccatgcccagagcctggtgccagcgcccacacaaggaacatgctgtcctgggaggtgcccctgtgggctgaggggagccacacagccatgttgtatccagccgggtcgcctcctctgaccttgggagtcacagcagagcaggcagggcagtgaaggtggaggggtgcggtggggcccaccctggtggcaccgtgcccaccacagccccgctgacctgcagagctggatggccttgctgcgcagggagattggccacttccacgaaaagaaagacctgcccttggacaccagcgactccagctcggacacagacagcttctacggcgcagttgagcggcctgtggatatcagcctttccccgtaccccacggacaatgaagactatgagcacgacgatgaggatgactcctacctggagcctgactccccggagcccggaaggcttgaggatgccctgatgcacccaccggcttacccaccacccccagtgcccacgcccaggaagccagccttctctgacatgccccgggcccactcctttacctccaagggccccggtcccctactgccacccccgccccctaagcacggcctcccagatgttggcctggcggctgaggactccaagagggaaccactgtgcccgaggcgggctgagccttgccccagggtacctgctaccccccgaaggatgagcgatcccctctgagcaccatgcccaccgcacccggcctccggaaacccccttgcttccgggagag

SEQ ID NO: 110059 - DNA, 736 bp, Homo sapiens
cagaagcagcaggagtgagctgtgggcacagctgtggggcagccaggcgcgtcaggcctcacatgtctgggagatgtaggctgcctgggctggtggcccctgagccgcatggcctccctgggccccaggacaccggccccgagcaggtcacgaggacggagggccatgtgttgggtcagcaccatcagcttcatggcggctgaagagatgcattggcctgtccctatgaaggccattggtgcccagaacctgctaaccatgcctgggggcgtggccaaggctggctacctgcacaagaagggcggtacccagcttcagctgctgaaatggcccctgcgctttgtcatcatccacaaacgctgcgtctactacttcaagagtagcacctctgcctccccgcagggcgccttctccctgagtggctataaccgggtgatgcgggcggctgaggagaccacgtccaacaacgttttccccttcaagatcatccacatcagcaagaagcaccgcacgtggttcttctcggcctcctccgaggaggagcgcaagagctggatggccttgctgcgcagggagattggccacttccacgaaaagaaagacctgcccttggacaccagcgactccagctcggacacagacagcttctacggcgcagttgagcggcctgtggatatcagcctttccccgtaccccacggacaatgaaggtcttctatgcccgtcatccactgccc

SEQ ID NO: 110060 - DNA, 1226 bp, Homo sapiens
tgtggttgggggtcctgcggctgggacccgcccctgacccctccctgcccagaggggctgtctttgggtgcagaaggagctggtggggtccagccgggtgacccaggccgaggccggcagaagacagcctgatgccttgaagacttcctcttgcacttttgttggagggtgctggtttgctaaaagcagagagtatttttctttttatttattttgtttttaattttttaattttagctccagctcagttgcccagactggagagcagtggccaatcatagcttactgcctcctggaactcctggctcaatcgatcctcctggataagcctcctccgggtactatagcttcatggcggctgaagagatgcattggcctgtccctatgaaggccattggtgcccagaacctgctaaccatgcctgggggcgtggccaaggctggctacctgcacaagaagggcggtacccagcttcagctgctgaaatggcccctgcgctttgtcatcatccacaaacgctgcgtctactacttcaagagtagcacctctgcctccccgcagggcgccttctccctgagtggctataaccgggtgatgcgggcggctgaggagaccacgtccaacaacgttttccccttcaagatcatccacatcagcaagaagcaccgcacgtggttcttctcggcctcctccgaggaggagcgcaagggagattggccacttccacgaaaagaaagacctgcccttggacaccagcgactccagctcggacacagacagcttctacggcgcagttgagcggcctgtggatatcagcctttccccgtaccccacggacaatgaagactatgagcacgacgatgaggatgactcctacctggagcctgactccccggagcccggaaggcttgaggatgccctgatgcacccaccggcttacccaccacccccagtgcccacgcccaggaagccagccttctctgacatgccccgggcccactcctttacctccaagggccccggtcccctactgccacccccgccccctaagcacggcctcccagatgttggcctggcggctgaggactccaagagggaaccactgtgcccgaggcgggctgagccttgccccagggtacctgctaccccccgaaggatgagcgatcccctctgagcaccatgcccaccgcacccggcctccggaaacccccttgcttccgggagag

SEQ ID NO: 110061 - DNA, 702 bp, Homo sapiens
cagaagcagcaggagtgagctgtgggcacagctgtggggcagccaggcgcgtcaggcctcacatgtctgggagatgtaggctgcctgggctggtggcccctgagccgcatggcctccctgggccccaggacaccggccccgagcaggtcacgaggacggagggccatgtgttgggtcagcaccatcagctcctgcccatgttaactcagccgacaccgcagcagcatggtgacaggtccccccagggtgtctgcctctacagaggaagggactgaagcacccagagagctggcaggtgccgttttgcagaggccactttcccgagggagctggttgcaagggcccggcgggatgggacctgggcggggcctcagagccgaggctcccgcgccggccgtggatttccaaccaagctgtgtggactggcaggtgttgggggagtggagcgggaggcctcgtttgcatcgaaggcttcttgattccaggctgcaccaacagatgtgggcctcctgtcccaagcgcccaccaacctccttgcagcgtggggaaactgaggcccgcagggggctcacgtgcctcccgcgcacggtgacgcggcagggggcggggccgggaggggcgcgccgggatcctcacctgcccgcccagtcccccgccgagaggggaggagccggcggctgccaggccagggccggcgggcat

SEQ ID NO: 110062 - DNA, 1014 bp, Homo sapiens
gcgggcgggacggagctgcggcggcggcgggtcccgcgggcgggagcgcctggcggccgagtcaagccgccgcctcgacccagggcccgcgggccaggagagcgctcggcggcttcatggcggctgaagagatgcattggcctgtccctatgaaggccattggtgcccagaacctgctaaccatgcctgggggcgtggccaaggctggctacctgcacaagaagggcggtacccagcttcagctgctgaaatggcccctgcgctttgtcatcatccacaaacgctgcgtctactacttcaagagtagcacctctgcctccccgcagggcgccttctccctgagtggctataaccgggtgatgcgggcggctgaggagaccacgtccaacaacgttttccccttcaagatcatccacatcagcaagaagcaccgcacgtggttcttctcggcctcctccgaggaggagcgcaagagctggatggccttgctgcgcagggagattggccacttccacgaaaagaaagacctgcccttggacaccagcgactccagctcggacacagacagcttctacggcgcagttgagcggcctgtggatatcagcctttccccgtaccccacggacaatgaagactatgagcacgacgatgaggatgactcctacctggagcctgactccccggagcccggaaggcttgaggatgccctgatgcacccaccggcttacccaccacccccagtgcccacgcccaggaagccagccttctctgacatgccccgggcccactcctttacctccaagggccccggtcccctactgccacccccgccccctaagcacggcctcccagatgttggcctggcggctgaggactccaagagggaaccactgtgcccgaggcgggctgagccttgccccagggtacctgctaccccccgaaggatgagcgatcccctctgagcaccatgcccaccgcacccggcctccggaaacccccttgcttccgggagag

SEQ ID NO: 110063 - DNA, 620 bp, Homo sapiens
catgtgtgcatgtgtttgtcagtgtatccgtgtgtgcatctgtgtatctgtccatgtatccgcgtgtgcctgtgtgtacctttgtgtgagcatcaagggacctcccaggcctggtgctcaccgtccgccccaacgcaccctgcattgcagcgactccagctcggacacagacagcttctacggcgcagttgagcggcctgtggatatcagcctttccccgtaccccacggacaatgaagactatgagcacgacgatgaggatgactcctacctggagcctgactccccggagcccggaaggcttgaggatgccctgatgcacccaccggcttacccaccacccccagtgcccacgcccaggaagccagccttctctgacatgccccgggcccactcctttacctccaagggccccggtcccctactgccacccccgccccctaagcacggcctcccagatgttggcctggcggctgaggactccaagagggaaccactgtgcccgaggcgggctgagccttgccccagggtacctgctaccccccgaaggatgagcgatcccctctgagcaccatgcccaccgcacccggcctccggaaacccccttgcttccgggagag

SEQ ID NO: 110064 - DNA, 1249 bp, Homo sapiens
tgtggttgggggtcctgcggctgggacccgcccctgacccctccctgcccagaggggctgtctttgggtgcagaaggagctggtggggtccagccgggtgacccaggccgaggccggcagaagacagcctgatgccttgaagacttcctcttgcacttttgttggagggtgctggtttgctaaaagcagagagtatttttctttttatttattttgtttttaattttttaattttagctccagctcagttgcccagactggagagcagtggccaatcatagcttactgcctcctggaactcctggctcaatcgatcctcctggataagcctcctccgggtactatagcttcatggcggctgaagagatgcattggcctgtccctatgaaggccattggtgcccagaacctgctaaccatgcctgggggcgtggccaaggctggctacctgcacaagaagggcggtacccagcttcagctgctgaaatggcccctgcgctttgtcatcatccacaaacgctgcgtctactacttcaagagtagcacctctgcctccccgcagggcgccttctccctgagtggctataaccgggtgatgcgggcggctgaggagaccacgtccaacaacgttttccccttcaagatcatccacatcagcaagaagcaccgcacgtggttcttctcggcctcctccgaggaggagcgcaagagctggatggccttgctgcgcagggagattggccacttccacgaaaagaaagacctgcccttggacaccagcgactccagctcggacacagacagcttctacggcgcagttgagcggcctgtggatatcagcctttccccgtaccccacggacaatgaagactatgagcacgacgatgaggatgactcctacctggagcctgactccccggagcccggaaggcttgaggatgccctgatgcacccaccggcttacccaccacccccagtgcccacgcccaggaagccagccttctctgacatgccccgggcccactcctttacctccaagggccccggtcccctactgccacccccgccccctaagcacggcctcccagatgttggcctggcggctgaggactccaagagggaaccactgtgcccgaggcgggctgagccttgccccagggtacctgctaccccccgaaggatgagcgatcccctctgagcaccatgcccaccgcacccggcctccggaaacccccttgcttccgggagag

SEQ ID NO: 110065 - DNA, 1485 bp, Homo sapiens
cagaagcagcaggagtgagctgtgggcacagctgtggggcagccaggcgcgtcaggcctcacatgtctgggagatgtaggctgcctgggctggtggcccctgagccgcatggcctccctgggccccaggacaccggccccgagcaggtcacgaggacggagggccatgtgttgggtcagcaccatcagcttcatggcggctgaagagatgcattggcctgtccctatgaaggccattggtgcccagaacctgctaaccatgcctgggggcgtggccaaggctggctacctgcacaagaagggcggtacccagcttcagctgctgaaatggcccctgcgctttgtcatcatccacaaacgctgcgtctactacttcaagagtagcacctctgcctccccgcagggcgccttctccctgagtggctataaccgggtgatgcgggcggctgaggagaccacgtccaacaacgttttccccttcaagatcatccacatcagcaagaagcaccgcacgtggttcttctcggcctcctccgaggaggagcgcaaggtgactgggggtccgaggacgagtgcaaggtgactgggggtgtgggcctgcaggcaccaggctggacctgccttgggggctcgctggtcctggggcgctggcctctcagccccgggcaaagagaaggtgtggctgggacacaggcagctgggtgggtgctgccccagctccatccccatgcccagagcctggtgccagcgcccacacaaggaacatgctgtcctgggaggtgcccctgtgggctgaggggagccacacagccatgttgtatccagccgggtcgcctcctctgaccttgggagtcacagcagagcaggcagggcagtgaaggtggaggggtgcggtggggcccaccctggtggcaccgtgcccaccacagccccgctgacctgcagagctggatggccttgctgcgcagggagattggccacttccacgaaaagaaagacctgcccttggacaccagcgactccagctcggacacagacagcttctacggcgcagttgagcggcctgtggatatcagcctttccccgtaccccacggacaatgaagactatgagcacgacgatgaggatgactcctacctggagcctgactccccggagcccggaaggcttgaggatgccctgatgcacccaccggcttacccaccacccccagtgcccacgcccaggaagccagccttctctgacatgccccgggcccactcctttacctccaagggccccggtcccctactgccacccccgccccctaagcacggcctcccagatgttggcctggcggctgaggactccaagagggaaccactgtgcccgaggcgggctgagccttgccccagggtacctgctaccccccgaaggatgagcgatcccctctgagcaccatgcccaccgcacccggcctccggaaacccccttgcttccgggagag

SEQ ID NO: 110066 - DNA, 781 bp, Homo sapiens
cagaagcagcaggagtgagctgtgggcacagctgtggggcagccaggcgcgtcaggcctcacatgtctgggagatgtaggctgcctgggctggtggcccctgagccgcatggcctccctgggccccaggacaccggccccgagcaggtcacgaggacggagggccatgtgttgggtcagcaccatcagcttcatggcggctgaagagatgcattggcctgtccctatgaaggccattggtgcccagaacctgctaaccatgcctgggggcgtggccaaggctggctacctgcacaagaagggcggtacccagcttcagctgctgaaatggcccctgcgctttgtcatcatccacaaacgctgcgtctactacttcaagagtagcacctctgcctccccgcagggcgccttctccctgagtggctataaccgggtgatgcgggcggctgaggagaccacgtccaacaacgttttccccttcaagatcatccacatcagcaagaagcaccgcacgtggttcttctcggcctcctccgaggaggagcgcaagagctggatggccttgctgcgcagggagattggccacttccacgaaaagaaagacctgcccttggacaccagcgactccagctcggacacagacagcttctacggcgcagttgagcggcctgtggatatcagcctttccccgtaccccacggacaatgaagactatgagcacgacgatgaggatgactccagtaggggctgttgcctccaataaagcagcagtgagctttgca

SEQ ID NO: 110067 - DNA, 727 bp, Homo sapiens
tgggcgtgggcatgggggtggtgggtaagccggtgggtgcatcagggcatctcaagccttccgggctccggggagtcaggctccaggtaggagtcatcctcatcgtcgtgctcatagtcttcattgtgggtgcggtggggcccaccctggtggcaccgtgcccaccacagccccgctgacctgcagagctggatggccttgctgcgcagggagattggccacttccacgaaaagaaagacctgcccttggacaccagcgactccagctcggacacagacagcttctacggcgcagttgagcggcctgtggatatcagcctttccccgtaccccacggacaatgaagactatgagcacgacgatgaggatgactcctacctggagcctgactccccggagcccggaaggcttgaggatgccctgatgcacccaccggcttacccaccacccccagtgcccacgcccaggaagccagccttctctgacatgccccgggcccactcctttacctccaagggccccggtcccctactgccacccccgccccctaagcacggcctcccagatgttggcctggcggctgaggactccaagagggaaccactgtgcccgaggcgggctgagccttgccccagggtacctgctaccccccgaaggatgagcgatcccctctgagcaccatgcccaccgcacccggcctccggaaacccccttgcttccgggagag

SEQ ID NO: 110068 - DNA, 678 bp, Homo sapiens
gcaggggccagggacaacttggggagagggaaagaccccttcccgtttcccgtctgcaccttggagcccctgtccaacacacgcacccaacacacaccctgcacacacacaccccaggatgcaaatgataaccgccgcgccatcgcttgtgaagcttgacagaaaataatgagaaacactaaatcttttataaggtcaacacttgccttagccgagcagctgtcaaacaagaaaagaatttagcgccggagccacgaaacttccatcggctcattaaacccaacagggcccgggcctggcgtggcgaaggagacgcggggccttccgttttgtgtcagtaatttgcggtggaggaggcggaagaaacagccagcgccaaaggggcctgggggctggctggggaatcgttagcgcgccaggagcggcctcggctcctaattggaagcattgggcattatcaacggaggatttgcctcagttccctgacagctcgtgggcccaaaatgatcgcccacttgtcagtgtaaaagaccattaaaaacaaaccattttgatttaattggaggcggtgcaccgcggggccaggtgaggggctcgtcagcccggctcccccaagctgccacccccctctccctctgtgtgatggggctcggggggtggggtgggagagagtgtgtg

SEQ ID NO: 110069 - DNA, 390 bp, Homo sapiens
tgtctgcccattcactgaatgtcctgcacctttggtattttcccaaacaggagacagctaggctcagcaccatcctggtcctaagaaactgcctagaccttactttaaaaatacatgcttagggtggcctccaggcaaaagataaaaatttaaaaataaaaaatgaaataaaataaaaatacatgtttagatcctcttgcatttgccttaccatatgatgagaacctaatgcaaacaattattttggcaaacaagtatgttcaaaaaatgcatataaaattgtgagtagaataaagctatatatgtatgccatatcaaaaaccctggttgactcaacaaaactagcgcaatacctgaaatatttattgagaggaaaattgaaataaatta

SEQ ID NO: 110070 - DNA, 290 bp, Homo sapiens
aagattctgtttcaaatatagccacagaaataaagaagggacaacaatctgggacagtgtctcctcagaaacaatcggcctggaaggttatatttaaaaagaaagtttctcttttgaatattgccacaagaataatgggtggtgggaaatctggaacagtgtcttctcagaaacaaccagcctcaaaggctacaagtgacaagacagattctgctttgaatatagctacagaaataaaggatggactacagtgtgggacaggtaattttgcaaaacacatttaatgtcat

SEQ ID NO: 110071 - DNA, 519 bp, Homo sapiens
tgcatgatcacagtgaatcttatataaagtgaaaaataccactattactgaattataatatgctagaaaagctgttgatggtaatgtggtctatttttaatttacttcatttggaccatcaccatgaaaataaatctcaggatggtttgaacaaatgaataacccacttgcccagcctatcctccaagaaaatatattgtggcaaattccattcttcagcttttgctgaccctgttgtgttattctccccattccctccctcctgccagtcaaatatttgtgtacccgatgttacgtgccagactccgggaagaataccagcagtttaagacaaaagccccttccttcaggaaatgtgtgatccaattggcttgttataaaatgttgttttgtaatgttgaaatttctgagtgtaagccatccttactgttaatatgtgtttgaaaaccctaatgtgtgcaaacatttaaaaagatatgaataatcagcctgggcaacatggcaagactgtctgtacaa

SEQ ID NO: 110072 - DNA, 879 bp, Homo sapiens
attcctcttatttttcttttcttttccttctcttcctcctcctcccctcaagttttgaaaaaagtgatgacagacaatatattttttttcatttttcgagattgcaagctaattgaggaccaagtttgtgttttttattacttgtatttctggaaatttgcacaaaaagtacctggggcctgatcaagtttcttgattaatattcagaacacttgagttgacatttgggtactgctgctttgcaaatacaggctcaactccataatcatagggaaagaatttgatgcattttataaaatcgtcatgggttatcttactttttaaaacctctatatggtaaaggagcagggaaaatttgaatacatatttagaagtataaaaagctaacagcaaagctacaacttccattaggtggatggctcatttttaacaggatattcgtccttgggataggcctgagacctgaagctaatcttagtatgtctctctcctcctacgcagtgttttaattcagttccttctttttaacattttatttagaaaataaaattaaccattttaaagtgaacaatttggtgacatttaatgcattcacaatgttgtacaaccactatttctatctagttccaaaatatttctatcactccaaactaaaacctcttactcattaagcagtttcttcccattccctcctactcccagcccctggcaaccaccgatctgcattctgtttccatggatttctctattctggatatttcatataaatggagtcatacgatgcttcttttacttagcataatgtttttgaggttcatccttgccaacaccttgccgactgtactcatttcagagctatgactattcatttcaaataag

SEQ ID NO: 110073 - DNA, 778 bp, Homo sapiens
atcagtatttttcctgcctttcttacgtcatggagaagtgttggactccccttgctacctcccactgccatggaggaagcaaaggatgctggtgtagaatttgcagttcatgttttcagcttgtgctaatgaatggaggatctgagcatacatgctggacaggtacttcacattattctaggtagattacaaacatctgtgcttctcttggatgtaaactcatctcgagtctccttttcttgccttcttccttttctccctactatagctgacttctctttgcagagtcatacaaatgtaactgagttttggccctgttgagtcaaactctgttgagttttgctggttaccataaaaaaaaggcgggcaggttgggggagctttaagacactttggttagtccaagcctggctcattttcagatttagcgaattctttatcccagcaagctgtgaaaggcaatgtggggaagacattgtcagcctttctgggctcagtgggaaccttgtaagtgagcaagggcttgttctagaggagaactgaacttttctagcttcctgagatcaggcttgccataaacaggtgaccagaaaaatctgtttgcaaggagagagtggcacatggactagcgtttagcagtggaggttgctgaaatctgtgttagaaatcaaggtgctctgaagatctagtttctctttttcctttccctgctgccatagaagacaaagaatattcttgtctccttttaacatagtataagtgataataccattctatt

SEQ ID NO: 110074 - DNA, 199 bp, Homo sapiens
aatttggcatgagaactcagttcttcagattcttaatttactatgtccacacagtactaaagagagtgttatgcaaatactgaaacaatccatggaaagtcaggaaagattccatgactctagcctaggtcttaggatgcccattctgatctccactaccttaacttgggctttctctacgctaatcttatttatggac

SEQ ID NO: 110075 - DNA, 226 bp, Homo sapiens
caagcagctacccttactattacagagtcttcataacctaacttcaaattgttctataatattctatttaataaatggctcagagttaagtaaatgttttctttttggtgaaatgtagtgttttaataactgaaaaaaagatcaatttcttcaatttgtagtggataaataaatgaattattatctgccatctcctgggtactctgtgtaaaataaaataaaataa

SEQ ID NO: 110076 - DNA, 676 bp, Homo sapiens
aaggagggagggagggggcattcgtagcagggtctctggcaaagggggagccatgaaagcctgaagcgaggtgggttgtaagcagaggtaccttatctctcaggtttaagtcaaccccagcaatgaggagcatatctgctatgtcctgccaggcgtgctctgcagccaggtgaaggggcgtctgctgcctctaggggagaagccaagggaataggtaagtgtatatttcttctagtcttttctttaatgcagaatgttttcagtttgttggttttacatacatgagatcatcttatatgtacattttacatcttattttttttaccccaacatgacactttttgtgtactataaactctgataaacgccatttttgataactccatactagcctatttttgtctgtgccataatttacctaaccacttccctattattaaatatttaggccattttcaaattgaagactgataaataatactgcagtaaatatctctgtgcatgagcttttaatatgtttctcaaggctgagttcccagcagtgctcacacatatcatttaaaggtatatgacatattctgccaaattgctttcagctcccagtggctctgtgagccatgcccttgctggtactgagaattatatggttggtgggtagattgtggggacaggattt

SEQ ID NO: 110077 - DNA, 730 bp, Homo sapiens
aaggagggagggagggggcattcgtagcagggtctctggcaaagggggagccatgaaagcctgaagcgaggtgggttgtaagcagaggtaccttatctctcaggtttaagtcaaccccagcaatgaggagcatatctgctatgtcctgccaggcgtgctctgcagccaggtgaaggggcgtctgctgcctctaggggagaagccaagggaataggtaagtgaaaagcatgtaggggtggcccactaccctaagtcagcccccacaatgatcctagtatatttcttctagtcttttctttaatgcagaatgttttcagtttgttggttttacatacatgagatcatcttatatgtacattttacatcttattttttttaccccaacatgacactttttgtgtactataaactctgataaacgccatttttgataactccatactagcctatttttgtctgtgccataatttacctaaccacttccctattattaaatatttaggccattttcaaattgaagactgataaataatactgcagtaaatatctctgtgcatgagcttttaatatgtttctcaaggctgagttcccagcagtgctcacacatatcatttaaaggtatatgacatattctgccaaattgctttcagctcccagtggctctgtgagccatgcccttgctggtactgagaattatatggttggtgggtagattgtggggacaggattt

SEQ ID NO: 110078 - DNA, 134 bp, Homo sapiens
ctcagaagctgtttcagagctgcttcaggaaccaaggataagaggccaactacttcaacaaaagatattctttctgctctagtcacttaagaaatgatgaggcttacaagacctgtgttgagccaggaaccacc

SEQ ID NO: 110079 - DNA, 495 bp, Homo sapiens
ctttccccacgggagtaaagaggctgcaccagatggcattgcccctgcttccccaaggtccacaggctgtgccaggtgaacgtcctgcttgcctgtgggacctgggcaggcagcttcccggtcagtgcctgtacagagtgtgaaagggtcagaatccagtgcccaccctgccccagccccaacacactgtgaacagtttgcagagtctggccttgtggtcactgacttgggagtacgtttgacagcctccgtctgctgccttgggtccagggagcaaggcgagctctgggccttcaagcagctgcctgcacctgctttcttgggtattggggaccatgcgtctatgagccagaatacggctttaagtattttggggaattatgaaaacccttgaattgttgccaccctgggtggctgtaaaaccaagttctgcatcgttttcctcatctctaagatggagataatgttactttcttcaaagttgccttgagaaaa

SEQ ID NO: 110080 - DNA, 245 bp, Homo sapiens
cagatacttggcctcaggctctattgaattccaggtcaaggttttactgactccacacccccaccttgttcctccgggtagcaaagaagcacacagcctctggtttaccaacgggctttcctgggagattggaaatgccccaggtgggatccagatcgccagcgctcaccccacccccaatacgtgggccactgagtcaggccaggatgaggctcttgctccccgggcatgttctcctgccccag

SEQ ID NO: 110081 - DNA, 437 bp, Homo sapiens
caagggattggctgccttatacaaagaggaataattttgtattttacctcaaggtgcttatcaagaaagccaaaatcataaaaagacagacttgtggaattttggcggcttcctcttgaaactagaacaaaaactctgttctaggtacttgagtaggttgttctgaggggcatgtgggtatacatgtaagttcctggtgttcccatattagatattactgactctcagtccagttctgtttgcatcccattctgcggcatcccacagttatatggtgctgtgaattattgcactggggttgttagggtagagaaaactgaaacaatgagtcatccttgcctttcactttcctaaattgcccacaagctaatgtcccaaactcagtatttttcccttacagatcattctgagtattgctgctgtaacaattttcctaa

SEQ ID NO: 110082 - DNA, 471 bp, Homo sapiens
gccaagaaatgccaagagccaccagaagctcagaatgcctgcaggggcaatgtgtccctgccaacactttgagttcagtccagaaatactaatttcagacttccgaccctcaggatagtgagggaataaatttctgctgttttaaagctatccagtttcgcaattttttacagcagccacaggaaactactgtactatattcacacaaaaacctatatatgaatgtttatagaaagcttattcataattgccaaaaactgaaaccaaatgtccctcaataggggaagagataaacaaactatggtgtacctaccacaccatggagtactactcagcaacaaaaaggaacaaactattgacaactacatggatgaatcccaaatgcatgatgccaaatgaaataagccaaacttaaaaaactatacttgattccatttatatgacagtctggaaaatgtaatattataggga

SEQ ID NO: 110083 - DNA, 594 bp, Homo sapiens
tggggctcttgcatgggtcgggactctggttgattgcagcatcgtagagcctaactgctgggaggtggggcaaccccagcgagaaactcctaggaggaagcacctccctgtggtggttggggcaacttgtggagcagggtgcttgagaaaagagcacagggcttagaggaaggagtaaggctcctatctctgtctgctactcgctccccacctgcctgagatggtgtgcaggtcaccccctctttggacttggacttttcttcctgtgtaaaaaccaccaccaagaccgcttttcaagcacttactgccaggcactcactatcccaggtgatttacatatattaactcacttaaaacagtgcttgaaatggctacctcacagggtgattttgaagattatataacacagtgtgtgaaagtagaagtgttaaaaggaaaaataagggagccacagtgttaatgaagttattttccagtaaaaaaaatcatgtttaaactttgtatatgaatatatacatacgtatatatacactgaagtaaatagtactgaaaacagcaacaacagctttttaagcaacattccagcaggttcct

SEQ ID NO: 110084 - DNA, 364 bp, Homo sapiens
gagaaggaccaagataaatcatcatgtttaaataaggtttaacaacttcatagcatggggatgttctcataaaagtagactatgtttggctgggtgcggtggctcatgcctgtaatcccagcactttgggaggccgagatgggtggatcacgaggtcaagagatcaagaccatcctggccaacatgaggaaaccctgtctctactaaaagtacaaaaattagccgggtgtagtggcatgtgcctgtagtcccagctaccttggacgctgaggcaggagaatagcttgaacctgggaggcagaggttgcagtgagccgagattgcaccactgcactccagtctggcaatagagcgagaccccgtc

SEQ ID NO: 110085 - DNA, 795 bp, Homo sapiens
aaaacaaaaaaaaaccacaaacatctccccaggaaatagaactaatatgcaggtctttaaaagttcagtttatcaatgagaaaaagataaaccaactcacgagataaatgggcagagtacaggagcagtcacagaagaggagacacggctggccagtaagcacaaagagaaatgaaatggttttgattcccttacacatcttagcccccttcctctgtctacatggcccgtaaaagccacagaactgaacagttttccagttccctcagtgagcctgctttgtgcagtggtatgttactgtcagaagggatcctcttcgaagctgtggtatttgagaatgactgctcctcccaccgcttttctgagggtgttagcaggagtgcaacagagccttacttcaaggcccccagcgggctggctggaaccctgcttcagctcctccaagcacgtgcggccaagttctgggagccacgtcgatgtgggttgatgggtcccctgagacgccctctctgctcagaacacagccagtaagccatgggcagatcacaacaaacagcaccctgccttctgctccgcctccctccatctaccacactgccaagttcctaagaagcttaggggagaaggaactgctgtggtgcttagaatgcagtgtcttgcctgaaagtattttctcagtctttgagaaaacagtggaactgactcatctggtcagagctttacagaaatgtgattgcagatctcttgcaatttcattctgctttagtgtcagaattcatccgacaacgtgccaaa

SEQ ID NO: 110086 - DNA, 396 bp, Homo sapiens
gatcgcgccattgcactccagcctgggaaacaagagcgaaacattgtcacacaaaaaaaaaaaaagaaaaaagaaaaagaaaaaaggactcgggccaggcgcggtggctcacccttgtaatcccagcactttgggaggccaaggcgagtggatcacttgagctcaggagttcaagatcagcctgagccacagagggaaaccccatctctattaaaacaacaacaacaacaattgataagactcctgatataagttaataacatacacccagattattgataatctttcaaaagctctcacacccatttcattagctagtgatttatgcactctccctactatgtgcacagttttgcaacatgagcccagccaacatctatctaccttccaaacacc

SEQ ID NO: 110087 - DNA, 134 bp, Homo sapiens
agcgaaaagcatgtacttattaagggatgacaaggtgaagccaaggagaagacaagaaaggaggtaaggatgaagaggggtagttagggcaggaaatgcattatctcagaggatggctccacaagaaccctgag

SEQ ID NO: 110088 - DNA, 754 bp, Homo sapiens
tggccagtgcctggaggctggggcaggagaatcgtttgagcctgggaggcggaagttgcagtgagctgagatggtaccactgcactccagcctggaggatagattgagactctgtctcaaaaaaaataaaaagaaaaagaaaaccctcaccttctataatcaaataggtttttaagtgttttcctaagcttgatagcacttcagtctctcagaggaattctgcagtcctgcagttgtcttgggtcaaccagccaaaagttaactaatttgcataatggcagccccataaaatgcgcaaaattattatcttttatatgaatgcttattaatatatatatatatatatatctccttttacatctatctagaaaacgttttaagggaagaatcatatagcttcaaacatttttgttaattacaatatggaagaaaagagagttcaattccttaatctatcatgtgtgagttaggggactttaagcaagttattttcttaggaatcctgtttcctgacctatcaaatgaatgtaagaatagctacctcacataagtgtgaggacatagataatttctataaaatcatttagttagagtcttggcacatagtaggagccctgctctcagtacaagtttaaaatgtctgttgaatgctaaaagattactccattgagctttttcaaactttaaagtgagtatagtgtttcactgtaggattccaaaagctgtttgatgctatgatttctttctcaacatc

SEQ ID NO: 110089 - DNA, 393 bp, Homo sapiens
gtatttcagatttgcaagaagcaaaagctctggggattggttgcacagccatctgaatgcacttactactgaacagtactcttaacagtggttaaaaaggtaagtgtgatgttctgtgtattttaccataattaaaagaataaaaaagtaagttttggccaggcgaggtggctcacgcctgtaatcccagcactttgggaggccgaggcgggcggatcacctgaggtcatgagttcgagaccagcctggccaatatagcaagacccctgtctctaaacagatagatgatagatagacagacagaacagatagatagaagaaaagaaaagggtcacttggcactaggtcttcacaggtaaagattcagagtgtgataggaagcacaggctcagg

SEQ ID NO: 110090 - DNA, 854 bp, Homo sapiens
atcaccatatccctgagaggccagtttgacctttgcattcttacccaagccccaaatctagcatcagtgagtcaagagataaagagcttctagaatacaaagagcctgacattccttccaacacttagatcactcttttccccagcactccagtctccctccaaaggagtccctttccatgacttgcccttcccttctccagaaggggggccttggaaaaagaaaccatgcttgatataatgcagccattatagctccttggcccttctggccctctccccggggagactgatgcaagaggagaaaacgtggagactgccagttttctgcaaggaggaaaggggggaagtgagacacatgggagccatggaagaggctggaaaagagccacaagtacagaagtcataaagaccccatttctccttcaaccggctgaggaaagtccggcccagctccacctactcaatgatatcattgttttcaacaaaagccggtttcagaatccctagagaggtccccaatgaagcctcagctgctggaatgggcagaggtctcaccagttcctaagagaccaagtgcttagaattttagataaggaggagaaaacagagaaaaccaggggaggcacagattttgcttctgctgggcctgtcagcgttatggaaagagtacaggacactgcttttcacacaggttttattattgcatccccatgatgatcctgccaaggtggtgactaggaattattacctagtctaattagtccattgagtctaattacctatctaatgagaaacctaaagatccaaggaaagaggtggcttgtccaaggtcccaccacaagctaaggaaaa

SEQ ID NO: 110091 - DNA, 418 bp, Homo sapiens
gtgtatgaaatttgatgataactgactcagcactaacattctagtttagtttttttttttaaagagcgtgtctcattacagattattgtaaaataactataaaaacttgattttttacagtattgtcttttagaaactacttgaaaactaggtacaacatacatcatcagtaacagtacatttatataattgaggaatgcattttgagatgagaatatgtactgtgatgtgtaactatcaaatttgtgtttaatcacttgtttccatgggccaaatagctaaattttggctttactttgaatgattgtattttagaagttggtaatgcaactaaatttgaggaatttttttctgcattttagtaccattagattaaaagctgaaattggtgttttaaagtaagctccttttacctttg

SEQ ID NO: 110092 - DNA, 667 bp, Homo sapiens
aagcagcagacctggcacaagaaatgaagagagagctcagtgtattaaagatgaaaacaagaaaaccgaatatattgaaaggagcagagaggcaatgaaaacaagacaactgaaatgaggactttgccaaaagcttcaagaagtagccaacataactcaacatccaaaatgtctcctgccatttcccttaacactacagcctcagctggcacgtgattggaatctcaaggcatgacaagcaagagtccaacgcaaatgtcttgccgccacccagcaagtgttacagacatccagcctattctagctggaccctcactgctctctgccctgccacctcaactcagccattctgtattttcagatattatctgtgctgctctatttactgcaactaaattcaaaggaatgtgtttggctacaagtaacagaggataggtcaataaaaaggattttatttagtctacaagaaatctggacaaaggtggttccaggagtgggaggaggacaaaggcggagagcgatttggagcacagccagacagcagcgtttgccatgggatcatgcctattgatcttagttttccaacctccaacttggaaatagataaaccatctgtcttcccttcctggggagtagcaggttatgaataaattatgctgccagagcc

SEQ ID NO: 110093 - DNA, 759 bp, Homo sapiens
tgccaaaagcttcaagaagtagccaacataactcaacatccaaaatgtctcctgccatttcccttaacactacagcctcagctggcacgtgattggaatctcaaggcatgacaagcaagagtccaacgcaaatgtcttgccgccacccagcaagtgttacagacatccagcctattctagctggaccctcactgctctctgccctgccacctcaactcagccattctgtattttcagatattatctgtgctgctctatttactgcaactaaattcaaaggaatgtgtttggctacaagtaacagaggataggtcaataaaaaggattttatttagtctacaagaaatctggacaaaggtggttccagggtaagtttagcacttccatgacatcaaggcaccaggttgttatcttagccagtctctggccttcccctcatggccacaagatggctgccacagcttccagggttatcctcacctaacaacatccaaaggcagaaaggagggtcacagaagagtgttatctttgcatgcctccctcctgtgatcagagaagagaaatccttcccagaggcctactggcatagttctgttatactgccttcagttgcaaaggaagcttgtaacatgaatctctggcattttcattctttagagtgggaggaggacaaaggcggagagcgatttggagcacagccagacagcagcgtttgccatgggatcatgcctattgatcttagttttccaacctccaact

SEQ ID NO: 110094 - DNA, 447 bp, Homo sapiens
aacagacttgagcgagactggctcaatgacaagttactcagtctcttggggcccctgtttgatctgtaaaatggggatcatgatcagatcaatgtgaggattaagcgagggatgtaggaaaatgctaggtcagtgcattttcctggcgcgaagtaaatgttacttctctttaactgttgcctttcggtgtttgtggtatgtaattaccttttttgctactcaaaattcagatttagagtttgtagtactttaaaaatttttcccatttaaattttatgtcagaaattataatgggttctgcatgggatattttaagaaactcagcattgttatgaagcaaatgaattctgtgtccttgtgtctgtgctattggattgcacatttgacaccaacaaatatcagtgttctgtacaggcgatgtctttaaaagccatttttcatttgttc

SEQ ID NO: 110095 - DNA, 337 bp, Homo sapiens
taccacctgggcctgcagacacttgatcatctctgggcctgcctgcagagaaaaaaggacctcagttcctgtatctttagatacttttctaaatggcagtgggtataaataaccaaagaatttgaagtagacaagctttagtgaatactcttcagatatgatgtttatatttgtgtacatattctaactacctgttggattgtattattcttaagggtaggaaataattctctctctgtttctgtcacctctattggtatattatggatacaaacacttactagcaagtgctttctagtggtggggaaggcttatagttgttctaaaggcgtatagg

SEQ ID NO: 110096 - DNA, 454 bp, Homo sapiens
catctgtcaaagattggctcagccaggaagcacctctggcctcccaaactgcagtcacctcgctctgccctgaacttgctatctgtgtgggtgacttacagtagcagagccggcctcttgcagttctcacttctatttcctgtagtgacctctctcccacaggagatagcgggcccttgatggcagggaccccctaggtcccccagagctggaagctcagtgctcctgacatatactgcaagagattttcaccatcttctttaaacatgcgttttctttttgcctcaataaactgtgtgacctcggcaaagtcacttcaccagtctggacttcagattcttcatatttaaataaagagatcccagaatgaaataccatgccctgtagatgggctccttctgactggcatgcgtgctgctaccatcccctctcctgccagcggcagatatcacta

SEQ ID NO: 110097 - DNA, 280 bp, Homo sapiens
acaatgaagaacacagactttacaaaaatagttttaaaagactcattaaacaaccaccagaacaagcagcaataacaatccccagggagggggaaacattggctctccagctacaatattcaaaatatccaatttccaacaaaaacatctgaggcatgcaaataaagatcaaactatatcctggtcacaagagaaaaagaaattaacagaaattgtcccagaggaaggccagacactgaatttactagacaaagactttaaatcaactgccttaaatatg

SEQ ID NO: 110098 - DNA, 239 bp, Homo sapiens
tctctcacactggttccaatacttactgattcttcaggacctttggcaagtgtcacctctgtgaagtctttcctaatttctcaacaacccaatatactttctcttcccctttctctccccttcctcttttgcactgattttcagcttttgctttttgttttgttttttgcatacatgtttctgttataacaccacatatttgttcctgaaaaacctcatattctataaaaacatgcact

SEQ ID NO: 110099 - DNA, 791 bp, Homo sapiens
gggaggctgaggtgagaggatcacctgagcctggggaggtcgaggctgtactccagcctgggcgacacagtgagaccctgtctccaaaaaaacaatggtgaaatttatggtatgctaattgtatctcagttttttaaaaaaataaatgtaacaagaggcttaataattgatcttatatacaagtgaaataggcttaaatatggagatgagagccagaagaaaacttttaatcctgtaaaataggtcccagtttgttttttaaaaaataaaggacatttgtactttctggtgaggtagttcctagatttatggagagatcctcaaaaggatagttgatgaaaataattttgttatgagaccctttctggactttttctgatgagtcagaacttagcatttgttggggagaataaatgattaaatctgtctacatatcacattttatttaatcatgtctacccattgtagtattctccaattacaacaataaaaattttaatagcactttataattttcaaggtgcttttctgtgtgtataaataaagaggtatataaaaatatataggggtaggtatttattaataatgttaattgtatattggttgagaattagttaaataatggaggttttgttttttaccctggataaaacacttcaagctttgggtaagttttatatgtaagtgtaatggtttttgcaaccttagaatataaaaaaatacaaaaaattttgcaaatcagatttatttattgctgatatactgtttttcactgttacttgtgaagactg

SEQ ID NO: 110100 - DNA, 668 bp, Homo sapiens
tgtcaaagctagctctgaaagcataaccactagcaattacactcccagctagtactctgtagttagacacagattaacaattatgggtccatgaagtagccatatttgttttctttattgagataacatactttcttcttcaaaacaattgtatttcaattgtcatcctaaccacatgtcattatgagtctgtgtttactgagccatctcagccttaattccgtacctcctagtagtagcagatccctgctattactttccatgaatttattaacaattttgtgctcttactggcccactattttgttcaattgctgtatctcttttctattggttctcttttcctggacatgctctaaacctatgtcagttcttatcaaatagcctaaaagttgtgcaatacaaaatatattatttttataatagactgcagactctataagagaatggactaaacttgtttgtccaccattaaagtgccatcatctaatagacattgagtaattattttctaaagaatgaaatgaatgcatgaataaatgagaaacagatctgtgtttaattcatcaattatattatgtattttaaaattttatcatttagatttttcatattatattacaatttatacaaaatattatgaacatagtatttatattatatgatat

SEQ ID NO: 110101 - DNA, 525 bp, Homo sapiens
accatcacaaatgtaacttcatttcatcttagctctgaatgtgaaatccttttgagtgtccttgatattgctgaaggatttctaaatagtactactcaattcctaagcattcttttttttttttgaaattattttaaaccaagatgttctctaaaaggatttataacttaccattagaaatcctcttcattgctttttagccttttaggattttgtagggattactaagaggatttctttttatcactagggaaatatggctacagctactatatcttaaaaaaaataaatcttaggcatagcttgacagtgagaaatgcatttatattcccctccagaacagtttccttataacccaaagacactttttaaaagtattttaatttgacaaaaactataacaaaataaaacctagagcagttagatctacttttgtatatagtttactaatatagacattattgaactgaatatcaaaatatagtttagaactcacagtgcttaaaaagtcatgttttagcactc

SEQ ID NO: 110102 - DNA, 529 bp, Homo sapiens
tgagacagggtctcactctgtcacccaggctggagtacaatagcacgatcatggtcgctgcagcctcaacctcctaggctcaagagatactccttgtctcagcctccaaagtagctggtactacaggcatgcaccactacactgggctaatttttgtattttttgtagagatgggttttgccatgttgcccaggctgatctcgaactcctgggctcaagggatcccgcctcagcctcccaaaatgctgggatttcaggtatgaaccattgcacccagcccagactgttttggctgatcatttatgtccctagatactgtccactgtttcaccttccagtctgccttgcattaactttcaatgctctttccatcaaatcacactgggtcctatgtcaaaggctggcactgtttgtttcctcaaacctgaaagttgaaaggtcaagattcaacatcatgcaccaagagtttagtctgtggaggaggtctcaaaattgaggatggaataactaactccacaagatgggggca

SEQ ID NO: 110103 - DNA, 2609 bp, Homo sapiens
  misc_feature (1)..(1): n is a, c, g, or t
  misc_feature (29)..(29): n is a, c, g, or t
  misc_feature (1792)..(1792): n is a, c, g, or t
  misc_feature (1834)..(1835): n is a, c, g, or t
ntatgcatcttttgctttctagctcatanttctgagctgtaaatgtaaagtatttagatatatttatgtgagtggtgtttgaaagtctggaaaatgagaagtgtagcatggatgtgttatagcttctttcagtccacaacaggactgctttccaaattggctaatggctaatagaagggcagattttccatcaaaacaaaaagaattatttagggcaaaaagcaaatgacattttctgtgagtttgagtttttaactgaggtacttctcatgcaactagagtggttgggggtattgtcaagcacgagaatttttggtttttacaaaaggctaagtgaataggaagatgcctctggtgaagatgtgtgtcacatgcaggaccatgtgaaaagatcagagaggagatttattcagatgatgtttgaagagttttaggttaactgtgtacgaaagatttgaaacagccagaaagtatcaacatttgtggtatgcttcataaacagtagagtgagaattttttcttttgtctattatggaaagctgaataaaatattttctgaaggaaaaaataaaacactcagttgactttcaaaaatcttaacagtctagtgaccaggcacggtggctcatgcctgtaatcctagcagtctgggaggccgaggcagatggatcgggcagatcgcttgaactgggagttcgagaccagcctgggcaacgtggcgaaaccctgtctctgccaaaaatacacaaagtagctgagcatggtggtgcatgcctgtggtcctagcttctcgggaggctaaggcaggaggatcacttgagtctgggaggcagaggttgcagtgagccgagatcatgccactgcactccagcctgggtgacaaagtgagaccccatctcaaaaaaaaaaaaatcttaatagtctagatatagaaaaaaggtgaaaattatacatatataaaatgtttggggggggggttacgtgcattggaactttcacataagggggttagtgacaatcagatttatgtaagaatgatgaaatgtttgaaaaattctgtgatgacagataaacattataccataaatttgttgaaatcataacacagttctagcttttagtttatgttctgtggatttcttgtgtgtgtttacgggtgtttttatatatgtatgtatgtatgattgttcctccaaatcacccacctcattctggatatttactaatcagattaggtttagctctactagaaacttacccttagagtgaaaaactacttgatgccaatgatgatctgcgggataaaagcgaagcaatgagagactgcacaaaaggagaccgctccaaaaatattgcgcaatgatggagtcactgggaaaaaaaagactgtctactgcaggcagaaatgtacactcctaagctagaggctaattgtttgaataaatatagcatcttaaaatttcctttcataaataaaacatagtgatagaagaaagatgaagcccaggagtgctatgtgagcacttaatctgacacgaaggagaaaatcacagaaagaaagccttcttatagagaagtcacctcattctcccaagaagctaggaccacaggcatgtgccaccatgcccagctactttttgcatttttagtagagacagaattttgccgtgttgcccaggctggactcaaactcctgagctggagtgatctgcctgcctcagcctcccaaagcactaggattacaggcgtgttcttctggacactcatgccctctgtctgctctgtatgcctnttgggtgatttgctctacttgccagctttgctgtaaaaagannaaaaaaaaaaaaggggcagtaagtataactgcttatgcgagtgtgcattttggtggaggagttttataaatgatagacaaaattcccctttaggctctatttaatctttcagatagtaaatccagatttgcccccagatgtaagacgtcatgtgactagtagcttgtgactgtgtaagtcatcggtttcactttatgtatggataggattacacgcagaggtgaaaggtgaaacgctggttaagagtacaagtttcaagtttgctctgtgcttccatacaaatataatagaagcagcttctgtagaatttccttagcagtaaaccagacgtgttccaagagaataacagtaataaaaaaatttaggttaaaaatcttagagttaaggcttaaagtactgcctaaatgtcactaaggtacacttctgagctggcctgcagctaacttcagatctgacttttgcttgaattgcagtcatccgaatttcactaggaacataggcaaaagataacttttgcaaataaatttcatcatttcacctttatggcaaataatggatttctaatatgaaactttaataatattaacatatgggaattacattaacatgtgactagttacactatcattggaattttaaccaactgcttccaaatacagttagagaattttataattatttgatataatggggatagctgggactgaatgtcacttggacattcaaaagatcaatacttgaattaaagttaacacttatcttgggagtggaggt

SEQ ID NO: 110104 - DNA, 2702 bp, Homo sapiens
  misc_feature (1)..(1): n is a, c, g, or t
  misc_feature (29)..(29): n is a, c, g, or t
  misc_feature (1792)..(1792): n is a, c, g, or t
  misc_feature (1834)..(1835): n is a, c, g, or t
ntatgcatcttttgctttctagctcatanttctgagctgtaaatgtaaagtatttagatatatttatgtgagtggtgtttgaaagtctggaaaatgagaagtgtagcatggatgtgttatagcttctttcagtccacaacaggactgctttccaaattggctaatggctaatagaagggcagattttccatcaaaacaaaaagaattatttagggcaaaaagcaaatgacattttctgtgagtttgagtttttaactgaggtacttctcatgcaactagagtggttgggggtattgtcaagcacgagaatttttggtttttacaaaaggctaagtgaataggaagatgcctctggtgaagatgtgtgtcacatgcaggaccatgtgaaaagatcagagaggagatttattcagatgatgtttgaagagttttaggttaactgtgtacgaaagatttgaaacagccagaaagtatcaacatttgtggtatgcttcataaacagtagagtgagaattttttcttttgtctattatggaaagctgaataaaatattttctgaaggaaaaaataaaacactcagttgactttcaaaaatcttaacagtctagtgaccaggcacggtggctcatgcctgtaatcctagcagtctgggaggccgaggcagatggatcgggcagatcgcttgaactgggagttcgagaccagcctgggcaacgtggcgaaaccctgtctctgccaaaaatacacaaagtagctgagcatggtggtgcatgcctgtggtcctagcttctcgggaggctaaggcaggaggatcacttgagtctgggaggcagaggttgcagtgagccgagatcatgccactgcactccagcctgggtgacaaagtgagaccccatctcaaaaaaaaaaaaatcttaatagtctagatatagaaaaaaggtgaaaattatacatatataaaatgtttggggggggggttacgtgcattggaactttcacataagggggttagtgacaatcagatttatgtaagaatgatgaaatgtttgaaaaattctgtgatgacagataaacattataccataaatttgttgaaatcataacacagttctagcttttagtttatgttctgtggatttcttgtgtgtgtttacgggtgtttttatatatgtatgtatgtatgattgttcctccaaatcacccacctcattctggatatttactaatcagattaggtttagctctactagaaacttacccttagagtgaaaaactacttgatgccaatgatgatctgcgggataaaagcgaagcaatgagagactgcacaaaaggagaccgctccaaaaatattgcgcaatgatggagtcactgggaaaaaaaagactgtctactgcaggcagaaatgtacactcctaagctagaggctaattgtttgaataaatatagcatcttaaaatttcctttcataaataaaacatagtgatagaagaaagatgaagcccaggagtgctatgtgagcacttaatctgacacgaaggagaaaatcacagaaagaaagccttcttatagagaagtcacctcattctcccaagaagctaggaccacaggcatgtgccaccatgcccagctactttttgcatttttagtagagacagaattttgccgtgttgcccaggctggactcaaactcctgagctggagtgatctgcctgcctcagcctcccaaagcactaggattacaggcgtgttcttctggacactcatgccctctgtctgctctgtatgcctnttgggtgatttgctctacttgccagctttgctgtaaaaagannaaaaaaaaaaaaggggcagtaagtataactgcttatgcgagtgtgcattttggtggaggagttttataaatgatagacaaaattcccctttaggctctatttaatctttcagatagtaaatccagatttgcccccagatgtaagacgtcatgtgactagtagcttgtgactgtgtaagtcatcggtttcactttatgtatggataggattacacgcagaggtgaaaggtgaaacgctggttaagagtacaagtttcaagtttgctctgtgcttccatacaaatataatagaagcagcttctgtagaatttccttagcagtaaaccagacgtgttccaagagaataacagtaataaaaaaatttaggttaaaaatcttagagttaaggcttaaagtactgcctaaatgtcactaaggtacacttctgagctggcctgcagctaacttcagatctgacttttgcttgaattgcagtcatccgaatttcactaggaacataggcaaaagataacttttgcaaataaatttcatcatttcacctttatggcaaataatggatttctaatatgaaactttaataatattaacatatgggaattacattaacatgtgactagttacactatcattggaattttaaccaactgcttccaaatacagttagagaattttataattatttgatataatggggatagctgggactgaatgtcacttggacattcaaaagatcaatacttgaattaaagttaacacttatcttgggagtggaggtaaaaaataaataaaaagcttgtttcagtgctatgaaagatgcctgtaaatagcacagctgttttaggtttcttgttgtctgagaaagggttta

SEQ ID NO: 110105 - DNA, 405 bp, Homo sapiens
ttggtaattggcgtgggaaccaattcttttcaactagtatttacagtgaggcattgagacaagaactcttcctgccttgtcgttggtgctgtgtcttttcctagtattagtctcagcatataagagcaagtgtttgtaggtatcttctagttcactaccagtgggggtgacttgcccaaggttgtagagtgagttcatggcttaatgagggctatagcccagagatcctgatgccctgctttgtgttctttctagtgtaccacactgtctgtcttgtataggttaatacagcatgggcagaaggtatggtttccagaagccccctgttttatatgtatgtatatatgtatgtgggtatacatgtacacacatgatgtgtgtgtgtgtgtagtgcttaggacagtg

SEQ ID NO: 110106 - DNA, 799 bp, Homo sapiens
catcaagaccaaatgaattaattcatagaaagtacttaacactgtgcctagcacatagtgctgcatgagggttgttaaatgttattactttgattaaagtaaaccctgtttgctttcaaagtcagccactcattaggaaatgggagcttaggtatagattgagggttggtttgggtaatcaattgttagagctgtaactatttggaccataaagctttgtcttatttcatctctaacctggagacttacgaaggagccttctgaaatgattgacatgatctattctttcccatgctaaataatttcttctgtaatttgaaccttactttacctacattttttctgccttttacttttcttggcatattcttaaacagaagagagacaagacagtcaaaatgaataaaagaagtagtcataagaaaagaagggacctgttaagtaaggaaagcaaataagcttatgcatttttctctgataattgacttagaattatatctcataagttttcatatataatgttccattataattaatatctcaatagtctgcaattgcagtttttatttcctctttgaccctagagttacataaacttacttaagtacatttcatttctctttttctttccctccttccctccttccctcccttccttctttccttccctttcttaatttccaactaattggagattcttgtggtttctttatgattatctctaatttttttcatgtggttagatatggtctgaactatttcaacattttgaaattgttgagacttacattgctaccca

SEQ ID NO: 110107 - DNA, 339 bp, Homo sapiens
tgggcagcagtgctaacaagatgttccaggagtttttacagtgctcatatattttaatcctctcctggaagtctagcttaataaaatcatttgaaaataagcaaaaaccaatgcaaaaggatgccttcccaacccagatacttattctgggagaactgtgaaaaattggatgcaacataaatagtcaacaatagggtgtctccatatgatgggaaatcgagcagccattaaaaatggtatttgtgaataattttcatgacatggcagaaatgccattaagaagtatagcttcaggccgggcgtgtggctcatgcctgtaatcccagcactttgggaggc

SEQ ID NO: 110108 - DNA, 136 bp, Homo sapiens
gggcctaatgtccacctaaaacctggtgttcacctggggtctgatgttcagctgaagaccggatgtccacctggagccgaggaatccacccagggactggtgttgaactggggcctgatgaccacccggggacaag

SEQ ID NO: 110109 - DNA, 393 bp, Homo sapiens
gaggtcttctggaccacattttgaaaactcttaacagataactgacacatcgagttgttaacaaactggtaagttacatttctctaaatgtgtccttcatttccagaagttgttattggtttttatttatgctgtctatttcactgaagatttttccattcatatcctgtatgatttttttttaatttctttaagttggacttcacctttccctggtgcctccttgattagcttaataattgaccttctgagttctttttctggcaattcagagattttgtcttggtttggatccattgctggtgaactagtgttatctttggggggtgttaaagaactttattttgtcatattaccagaattaataaactagtaagttaacaaactcaaaat

SEQ ID NO: 110110 - DNA, 603 bp, Homo sapiens
gtagccttgtcctcaaatcaagtgggacttctggttctttctctgaccatctgcttgaccttcagtctggtgtctccaaggagtgtgtctctatggcagtttaaaaaattctgttacactgagaaagagacaaaatgtaaatcttaaaggaatcagtagatttttaaccccactgctggtgttgagaagacagtttgagtcttaatctctttccttaagtttcaaaacatgtaggatttatgttattgacatgtcaaactttttgtacttattcattagggaaggtttcaatacacacaaaaatagagtattataagatgcgctactatgtattcattatccagtttcaacagacgtcaccattttcccagtcttttgttatatagtatccccttcactttatgttcctgaaatattttaaggcaaagccttgacagcatattatttcacctataaatatttcagaagcatctctaacaaataagccccctcctttgttttacatagccatggtgccatatcacagctagcaagactattaggaattcttaatagcattaagaactgacgttcctcagttgtctcacaaatgcctttttacag

SEQ ID NO: 110111 - DNA, 263 bp, Homo sapiens
ggaggtagcactgaaccaagatccagcctggccaagagagtaagactccgtctcaaaaccaaaccaaaccaaaccaaaaaaagaagtgagttggcactttcaacattctgcctggaaatctccttaccaaacctataagatcattaggtatattttctgcactttgtattgtgacaggtgacagtgttaccaaactttttaccaggacataatagggtctgcctttcttctagttgctaacaatttcccccaagtccatcttg

SEQ ID NO: 110112 - DNA, 658 bp, Homo sapiens
ctgattgacattttctaaatagactaggtagtgtcaaggataaggaagctgcagtgtatcaaaagatgtgcccaatgttcccatgagcctgaaaatttatagatcagggagatgtcacctttagacaacttgtctaactgtcacattattaaaggaacttaattaactattaagcaatgttctcttctaattattgattcctgtgaccatcagataaataaaaattattaaatgaaatgctagcatctattgaaatattactattggccattaaaaacatgtattgccattcacatggaattatagaactctctagaaagcacatataggacaaggcaaactttactcttttggagtttaaaatttgtgttctgccatctcctattcattctatttatgatcattggtcataattttgttcataatcaaccaacatgcaaaagccctaatttcctgtacctctttcataacaaagaccttaacagagtcaattctccacacatgggctatgacctttactttgtattcaaaagggtgggattacaagcatgaaccaccggccccgcctaaaattctaaattaataatggtaatatgttggcacaaaagtttaaacccaaaccaagttaggaaaccttttttgccgggaagccctctga

SEQ ID NO: 110113 - DNA, 1919 bp, Homo sapiens
cagatatatctcatggcaaatttggtatcctgttacagccttggctcttaaacaactcaaaatattgggataggctgtcagtatgttaaggatagttgctcctgagtcaattcttcacttactccctctgttgttcttggctggatcctaacgctgatttccactctgctgtcacaaacatttttccccccgtaaaatgtcttaatgctgtcctaccattattttaccaactgtgaaagctggctttaatttttaggaggaaaagaaaagcctgcatgtgttctttattggtatcatttaaaatatacttttttttttttttttggtaaaggtaggcgtattttaagatattttcttaacttgagcagtagccaacaggaaggataccagtgtctctctctcttagcgacacactccttggtcttgcttaccaactggaggacactaggtagaataaccgagtatgacaattcttaattgtttacattttataacttcctgtccttcaaaagagtttgaaatgtcattttgggaaaagagagccagtcaagctagtaggctgattgtgaagaaaatctaataccttatctttatctcaaacctctgtacaactttattttcattgatgggatactttaacaaaaatgaaattttttttggtttttaaaatatgagtgattatgacctctttggggatcatgcttcaaaaagtcagaaacctagagacaaaactgtcattgatttttaagaagaaacacactaggtcaaaagaagatgtcctggaaatacgaagtactctttaaaaaccatgcatttggagaaagtaattgtttccttgaaaaacatgattaaaaactaaaactgggatgttcctgtgtgtacacagtgccaaatggttttccctttttatgttgtgttttagaaacagcacgaaagttttttccattttaaagtgagaaaacattatatttagacttccataattccaaaatcagaagctatttttaaaattagcattttcttgcatcaccaaatggtattcaattgtttgaagctcaaaatttttaccattccataaatgtttgtgaatttttagacagtgccaatttaaaagtagagatagccaatctgaatacggtgaaattatggggatctctggtgattgggatgaaaactctggccttaaaaggtccacttttagtatataattgcctaattagcaatcatttttattttttgctcactccctggtctgaatctatctgtctattcagatattttttggtaggtttggaaaatggagaagtgagcctaattggtgcctaattgtctggtgtatcattcactttattcagtttgttctatcaatatgatttacccctcaaggttaacctagcaggttgctcagttattatctctcaaggtcacagtactagaaatacttggcttgcatctttcagatgccattcatgttatcaagctcaaattatagttggtcacaggattctaaagtctttatttgacttctcctttttgaactggctcaaatggaaaagtgtagttgcttttaaatgttaaaaataagtttaaactttatatttcccattggtttcccctattttgtcctttctttgtgtgcttgaaatattttatttttcagtttgtcctcatagggaatcaagtattttagctaggtgatgtcttgcaagtacgttccactttgttacaatctactatctgtatatactatttgtatcttaattcttttatgagatgttctgtaacatttttctcactttgacaaatgtttttagactgtacagtcaagatctggcgcttgggggtaagtggaatgatttgctaatattgagaatctgttgtatcaaacataataaactttttttgagatgtgaaaaaaa

SEQ ID NO: 110114 - DNA, 265 bp, Homo sapiens
aaaaggctatcaaaacatatgaactacaaatacccaatttgatttatctttttgtatgtttgcagttattgtaagatgtcactgttatttgatcaggtatcttagcgaatgacaagcaaatgaatgtttgcagtgattttagtgaattacaagagcagaattaataattccagtattttcttaaaaagtggtcagagattatagttttatataatataatactaaattcctactcttccctatccagctgtgacaagacaaaagg

SEQ ID NO: 110115 - DNA, 286 bp, Homo sapiens
ctgccaagaaaaaactgcctaaattgaatttcttttgaggaaaaaaattaagtaaatcattattttttaaaataaatattgtaataatgttagctaatatttactatttttaaactcagtgttatttttactgttttttaataaattaacttggcaagctgtggtaaatattcctctttattatattggtttctttatttttagggagttctaatacatctgacattcataaagtatgagatacttaaaatcacttttcatatgataaatttgacttagtgtgctt

SEQ ID NO: 110116 - DNA, 345 bp, Homo sapiens
ttacttcaaacatgtttaattcagtgcaagttatttttatgttttgctcaattttattaacattcaaaaaataaatttccattgtcttttggcataaagagagagcttaaatattcagggttcagttacaagttggaactccctggagcagaactcttacagttatgtatactaaatagcagtctagatatcttgaaggcaatttacttaaaaattggtctaagacatagaaatatgagacaaaaggagaatatgtgcttaattcccttaagggagtttgggattgtctgaaaacacagtcctccattgctttctaagtgggaaacatttggggcagctcatatc

SEQ ID NO: 110117 - DNA, 445 bp, Homo sapiens
ggagacggaaagcagtgaacctctgtaaaagcttagagtctcctaagcaagggcagggcacacaccgggacagaacagcaaatcgatgactttagtcgctaaactaaagcttcattctccttaagaatgactctcctccatcgccacccctcaccccacttgaggacttatctggaatttcaaatgtttgttcctgcaaatgcatcttccatcctgggtgacaggaagtgtctggttccatgacgatgaagcagccacaaggcctctctgtgtcagtgctggagagagagagcttccttcctcctgtcctggacccctcctggagggacgctcccaaggctgagatgacacagtcatttcccgcatgctgtctagcactgacccacccatcgcccttgtcctggtgctggtctgcagcagcagtgagggggacccctttgtgtga

SEQ ID NO: 110118 - DNA, 327 bp, Homo sapiens
ttgtcaggatttttaaagtgtgacttccacccccagagagcaggaatgaatagacaggcaggaacgaatggatatggacagacataacaactgatttgttttgacaaatttgtggtttaataaaagcacatgtggccagacgcagtggctcatgcctgtaatcccagcactttgggaggccaaggcgagcagatcacttgagctcaggaattcgagaccagcctggccaacccggcaaaaccctgtctctactaaaaatacaaaaattagccattcatggtggtgcacacctgtaatcccagctactcgggaggctgacgtaggaga

SEQ ID NO: 110119 - DNA, 426 bp, Homo sapiens
attgggaataaaaacattaagatagaagcattcattatctggtggaaaacaggggaagtggagaaggggaagcacatatttcctgaaaccgacctatttgtcaggctcgatgaataatggcatcattgatactgatcaggactctcaaagccgctctcaaaactggggggtagcagggagagagacagagaaagataagtgcatggattgagaaagcaaagagaagcaagggctcttaagttttgtgtggtgtgtcaaaatgttaaattctcaatcatgtcttgctatttattaaaagctataggaagagcctccacgctcccactttctgatttagaaacacgtaattctctagtgggggtataatggcattgtagtgggttggtggagcagttgaagaatatggctcttaagtcagacttggtt

SEQ ID NO: 110120 - DNA, 436 bp, Homo sapiens
actgtttgtatgtataagaattacttaatatggagattaataccaagggccttaattatcttaaaatgataactgaaagaaccatgatttaaaaaaaatctttatgtgttgtaatttattaatgtaaataaatagattttacttattatgtctggtgtagagaacaattccgttgtgttggggactaagccctctttcagatctagcagtctttcatgccgtcatagtaatcaggactgctaaatttcatacgcccttgacagtcactgcagtcccatgttcttcatactgtccaatgtagtgtagaacatttggtaggctttcaatcatgagaattttagtatgcagaggcagattgtcaacctggggtttggacaaggtaccaaaagcagcacagagtctttcattattggtaaatatcaaggtcctatgatga

SEQ ID NO: 110121 - DNA, 411 bp, Homo sapiens
tctctgggaaaggagatgggagataggaatgagaaacgtctgtgtgctgtatgccctctttaatctttctaaatacctatcttatacatgtgtaagtattcagaaatcagtaaatatttaataatagaaaagtatgtatttctatgctgtatattacaaaaccaactctaatttatatgtaattcttggtatctgaaatttttatcaaacaatcagtggtgggttcaatgatacatatcagtattatcattttatggcttcatagaattaaaaaatatggatctttcataatttatgtaatcaacctcctctgatggatgtttagcttttttccaactttcagtgtaataataatatttcaaaggagcaaacttctaataaatgtctgcattgttctactacttcggtaaa

SEQ ID NO: 110122 - DNA, 520 bp, Homo sapiens
ggggctccacaaagattaaagacctaattatacaatccctaacactgtgcctcctaaagagtagaattcattgtgttaaatatattcattcatacttttattattttacacaattgtttagcagtggtcaaaaacttagccaacatttcttatggttttaattcagcttatccttttagaatttcaccagtttcagattattagaattaaagtttttgttcctttgcttggttatcatattcatatcagtttttgataccaattattccactggaaatacagagaagagtgctgtgatgctggaaaacaggcttatttccaggctatacttcactgtcagtgaccttgtattaatatttaatagcaagtgggtctgaatccagatattgctcaaggagatggatgtgacacctgggtcaggtcccaaatcattaactctgatatgtattggtagacttgcaatgatgactagatcttgtgtatgatggcttctgccctcctgggacaaccctcccaagaa

SEQ ID NO: 110123 - DNA, 335 bp, Homo sapiens
aaaattttcaggttgaattttttttctgattctttaatagcaattcaattaatccagataaacaggagcatctgtctcaccagtccatcctggccagattatccagtgccagtccatcatgtaggttccttctcttcttcctgttgccactgtctctgtctggtctaaactagttggggtcagagatttgaagcagaatgaaatgagagctatttaacaatctgctgtcaggtagccattgctgtcctgggaggagggacagcttatgctaccgctggagaatagcaggcaggtgcataatccactttgccaggcagtcacctgtcctgacctat

SEQ ID NO: 110124 - DNA, 321 bp, Homo sapiens
ttttaatattagcacctcttcaacctcttcttgactctaccaccaaaattatcttcctaatctctcttaccctgtaaatttctgtgtgtgtgtgagtgtgtgtgtgtgtgtgtgtgagagagagatagagacagggaaagagtggatttaccaaaaaataagataggaaggttgtcataacatcttcccttttatttctcaattctgaagtccccattttcatccctgggagagttgttctaggatagggtagctaaaggaacagagaaaatcagagtaatggaattagctaaaagggaaagtggcgacctgaagaccaaa

SEQ ID NO: 110125 - DNA, 358 bp, Homo sapiens
ctcagtagagttggcagatatacttgttgcaaaagactttgtagattttatttatgtaaacattctgtaccatcattattgacatttcttttctgagtctcactgaatttcagtaagtttaggagtggttgctgttgcattagggatggactagatgaatattgcataatactaatatgtttatgattgaagatgaactttaatagtccacaatgatttgctgagaaatgttgtgtctgagtcataatcttgagttttaattattgtaactacagctaggtggcaacatgttatactaggaaaaaaatctacacttctgatttcaggatctataagtttgccactgaataaaatgaaa

SEQ ID NO: 110126 - DNA, 280 bp, Homo sapiens
tgggctactaaggcgtgcttgagaacaacagaacacacagaatctcccaaagcagcctccttcctaaagcctccccagcagtcatcctcctgtgcccaggttacaaatgctatgcttggtgcagaagagagtcgacttcactgattaaaagcactaatgatactaagatttgtgtagagaaatgcaaatgtatagcagtccagattgacagttagtgagcttgggaacttccaaagtcagcccctcctcccctgtggtgtgagggtgtgtgggtttgggg

SEQ ID NO: 110127 - DNA, 324 bp, Homo sapiens
ggataacagcatcataaataacatgacctctctcaaactactgccttctcctactagttataataatagcaacagcttatatttgtatctatttttatagtctgtgagacgctttatcttttttcagcttatttgagctcagagcagccttgtaaaataggtacaagtattatacccattttgtaggtgaggaaactgaggttcacagaggttaaacaactgtggatcacacagcaactgactaggactgtttgggattctaaggtataatagtgccaatttgttgaaagggaatagcaacaaaaaaacttggactctaacccc

SEQ ID NO: 110128 - DNA, 177 bp, Homo sapiens
tcctttggttacctgtacccattgtcctcccgaaactgcacgtcccacatgctccaccactggacctcacgtccccctcccttccatatttagaaaaatatatacaagtggccattcgggtcagctcagattgtgcagtccacagcccatgggggaagaacacagagatacagatca

SEQ ID NO: 110129 - DNA, 365 bp, Homo sapiens
tcctcctgtgttctgtgtcctctccctcttctccctccaccggcaaccattagtttcttatactccagtgtttcattatgtaaacaagcaaaaatgaaatatattcttattttttatttttttcccctttcctactcaaaaggtagctttttgaatatacttttctatgtcgttttttcacttgttcttttttttgaaacctcttaaatgtaattaattgcatctgtgttccttgttactcatatatatttgttacttatgtgatttttgtcatataacatgcgtgtaggagtgtattaatgaatctgtcctctcccttagactataagcatcactctggagattttgttcttctctagtcgtga

SEQ ID NO: 110130 - DNA, 305 bp, Homo sapiens
gatttttaggagtgggtaaggaattaaaaacgggatgttactatctagaaactgtgactgtgggacaactaaccatgcctttgagcccatcgcctgttgctgttattctttgacagcagagagacttaccattttctatacatttgaaacatcttttctcacctttctttgtatctcccaacatttgacccaaccacttcaattcatttttgtctcttcatgtttaatacctcgcttctcatgaaactattattcttttagtcttgctggtacttagggtttacacttaagcttagtctaatgaa

SEQ ID NO: 110131 - DNA, 378 bp, Homo sapiens
agagagctggctctctctgtgcacatatagaggaaagtccatatgaggacaaagtggctgtctgcaagccaggaagagaggcttccctggaaactcaccctgttggaccttgatctggaacttttagcctccagaacagtgtccattgtataggccaacccgtctgttatggtttgtttgtttttgttttttttttttgagagacggagtctcactctgtcgcccaagctggaatgcagtggcacaatctcggctcactgcaatctccgctcactgcaatctccgcctcctggttctagcaattctcctgcctcagcctcccaagtagctgggactacaggtgcacaccgccacgcctggctaattttttgtatttta

SEQ ID NO: 110132 - DNA, 230 bp, Homo sapiens
cccaaagtgctgggattacaggcgtgagccactgtgcccggccgaggctagggtcagaggcctagagaatggggaatgctgttgggacagggttgaaatcacaggaagttgagctatctttttgccctaaataagttcatgggatcataagacctgttgagccacttcttggtatgggtttccattccaggtggtgctagccgttttatcagaatcagggtctgaaaagt

SEQ ID NO: 110133 - DNA, 1406 bp, Homo sapiens
agacatctacagcctgggggccacgctcatccacatgcagacgggcaccccaccctgggtgaagcgctaccctcgctcagcctatccctcctacctgtacataatccacaagcaagcacctccactggaagacattgcagatgactgcagtccagggatgagagagctgatagaagcttccctggagagaaaccccaatcaccgcccaagagccgcagacctactaaaacatgaggccctgaacccgcccagagaggatcagccacgctgtcagagtctggactctgccctcttggagcgcaagaggctgctgagtaggaaggagctggaacttcctgagaacattgctgattcttcgtgcacaggaagcaccgaggaatctgagatgctcaagaggcaacgctctctctacatcgacctcggcgctctggctggctacttcaatcttgttcggggaccaccaacgcttgaatatggctgaaggatgccatgtttgctctaaattaagacagcattgatctcctggaggctggttctgctgcctctacacaggggccctgtacagtgaatggtgccattttcgaaggagcagtgtgacctcctgtgacccatgaatgtgcctccaagcggccctgtgtgtttgacatgtgaagctatttgatatgcaccaggtctcaaggttctcatttctcaggtgacgtgattctaaggcaggaatttgagagttcacagaaggatcgtgtctgctgactgtttcattcactgtgcactttgctcaaaattttaaaaataccaatcacaaggataatagagtagcctaaaattactattcttggttcttatttaagtatggaatattcattttactcagaatagctgttttgtgtatattggtgtatattatataactctttgagcctttattggtaaattctggtatacattgaattcattataatttgggtgactagaacaacttgaagattgtagcaataagctggactagtgtcctaaaaatggctaactgatgaattagaagccatctgacagcaggccactagtgacagtttcttttgtgttcctatggaaacattttatactgtacatgctatgctgaagacattcaaaacgtgatgttttgaatgtggataaaactgtgtaaaccacataatttttgtacatcccaaaggatgagaatgtgacctttaagaaaaatgaaaacttttgtaaattattgatgattttgtaattcttatgactaaattttcttttaagcatttgtatattaaaatagcatactgtgtatgttttatatcaaatgccttcatgaatctttcatacatatatatatttgtaacattgtaaagtatgtgagtagtcttatgtaaagtatgtttttacattat

SEQ ID NO: 110134 - DNA, 426 bp, Homo sapiens
aggtgggattggagaggcagtaaaggtccctattggctgttgctgggcttgtagttgctctgggatgttctctgctgtccctgccccaggccttttctgcccacatatcatcactgccattgcccctctgaggtgccagctctttggagatcctagacttgaagcaggtcagaatctaaaagggctttggtcactaagaagccgtctggtcacttcttttacagaaaaccaagtctgtattttgaccaaagtctctcaggtggcaccaggggggatcacagtgcctgcattaggatttgtaggctttgtttccttgaggaaagaaacagttgaaactcagtaatttcagggaaaaaaagaaaaacaggaggccctttgaatgcggatttttagggggaacaggatttagggggaacagggaccgag

SEQ ID NO: 110135 - DNA, 2209 bp, Homo sapiens
aattctgcatttcagtgcactgcaggatggcgtcatctctgccctggctgtgcattattctgtggctagaaaatgccctagggaaactcgaagttgaaggcaacttctactcagaaaacgtcagtcggatcctggacaacttgcttgaaggctatgacaatcggctgcggccgggatttggaggtgctgtcactgaagtcaaaacagacatttatgtgaccagttttgggcccgtgtcagatgtggagatggagtatacgatggatgttttttttcgccagacctggactgatgagaggttgaagtttggggggccaactgagattctgagtctgaataatttgatggtcagtaaaatctggacgcctgacacctttttcagaaatggtaaaaagtccattgctcacaacatgacaactcctaataaactcttcagaataatgcagaatggaaccattttatacaccatgaggcttaccatcaatgctgactgtcccatgaggctggttaactttcctatggatgggcatgcttgtccactcaagtttgggagctatgcttatcccaaaagtgaaatcatatatacgtggaaaaaaggaccactttactcagtagaagtcccagaagaatcttcaagccttctccagtatgatctgattggacaaacagtatctagtgagacaattaaatctaacacaggtgaatacgttataatgacagtttacttccacttgcaaaggaagatgggctacttcatgatacagatatacactccttgcattatgacagtcattctttcccaggtgtctttctggattaataaggagtccgtcccagcaagaactgtttttgggatcaccactgttttaactatgaccactttgagcatcagtgcccggcactctttgccaaaagtgtcatatgccactgccatggattggttcatagctgtttgctttgcattcgtcttctctgctcttatcgagttcgcagctgtcaactactttaccaatcttcagacacagaaggcgaaaaggaaggcacagtttgcagccccacccacagtgacaatatcaaaagctactgaacctttggaagctgagattgttttgcatcctgactccaaatatcatctgaagaaaaggatcacttctctgtctttgccaatagtttcatcttccgaggccaataaagtgctcacgagagcgcccatcttacaatcaacacctgtcacacccccaccactctcgccagcctttggaggcaccagtaaaatagaccagtattctcgaattctcttcccagttgcatttgcaggattcaaccttgtgtactgggtagtttatctttccaaagatacaatggaagtgagtagcagtgttgaatagcttgcggccaggacaacctgaattctataagttcttgttttctgtttcctatgttttcttaaaaaatagcattgagacttgtgtagatgcttctcagaacatgaaatcaaattggaaatctgtaacgcagcttctgtaagcatgtgtgggcaaaaaagcaataatcctactcctcaaaatagaaagttgaagattgctgaaaaatatgacttttctgtatgttagagaaaaactttatgaggatgaaatgggttcaagatgaatttgtcaacttttgtcttccattgttcagtatttttaattgtcactgtaaataacatttaccacaaggcaaataaaataagaaatgctgacacttccaaaggttgccttaaaatatgtttattttggcttagttcccgagagggcaaaatataaatacagtctaaatatttatcagtaggttaataccagcatgttggaggcctttatgctagtaaaatgggctttcaggggcattgtaaagcctacattgagcttagccatttgtttttaacctcgctgtgctcttttacctcaataaaatgtggtgtttgtatacatataaattatacatagctcataaattatgtatgcatatgtacatagctgtagttggactaaaattcagtgtgttttatcctactaaattctccttttaaaataatacacttaccataattctatgaggttgtagaaaaaagtactcattataaggaagccttgtatattatgactatggttatctcttgtgttttccacatttccaattataacactaaataaaacaacaataaacatgg

SEQ ID NO: 110136 - DNA, 459 bp, Homo sapiens
ttccatataaaagtttattgagtatgtctataaaacctaaagcataattgtcttttgtggcaacatcattatcagtatattttattaaaacagtaaagaggtcatttggaaaggctgatgctctccaccttttacattgaggatggaccagtaggtgttctggggactctgttccaggtacagatggctgtagcattcataagagggtatttatagtaagtagcaatgaaaacttgaactcatcttttagaacaaagtgtatcatggtattcttttacggttctcaggtggcatttctctgcttaccatcaatgctgactgtcccatgaggctggttaactttcctatggatgggcatgcttgtccactcaagtttgggagctgtaagttacaacaggcttctgagagtcaaataatacatccaaaatatataattacttggttttagttgatactgga

SEQ ID NO: 110137 - DNA, 1755 bp, Homo sapiens
gcgacgcgcgatgcactctacactcgcataaatactgtcgcaagtagcacactctcacttaccctcagctcagactttgtcactggcctttggcatacataggctaattttatttattttttaaatccttaaatcatagctgattcaagcttatgagtgtgcaaagatgagaatgtaggctgggaatgtgtacagaagaatggcgtcaataaaccaggctgtaatttttttgtactaattgtccacatattccaaattggaattcacccctcctcccaatacacactattgcccaaacccattgccctacagactaatgcacaaccaggagtggctaggcctctgcaacctggctcgtctttccctaaggatacaatgcttaccgtagttctatgacatgaaacatgctttgtgttgtttgctgatgtattgagtaatagaatgtcagatggaagcaagtaaattattttacaatgtattttaagccttacttggaaaagtaacaccaacaaatactattaagaattcattgatgtttgaccttacatagaaagtaagtcgtcaataaatatttgtcaatggtgaaagagtgaataaataagcaattaagcaatatctattctttcatttgggcttaatatttgtcttttttccacagcatcctgactccaaatatcatctgaagaaaaggatcacttctctgtctttgccaatagtttcatcttccgaggccaataaagtgctcacgagagcgcccatcttacaatcaacacctgtcacacccccaccactctcgccagcctttggaggcaccagtaaaatagaccagtattctcgaattctcttcccagttgcatttgcaggattcaaccttgtgtactgggtagtttatctttccaaagatacaatggaagtgagtagcagtgttgaatagcttgcggccaggacaacctgaattctataagttcttgttttctgtttcctatgttttcttaaaaaatagcattgagacttgtgtagatgcttctcagaacatgaaatcaaattggaaatctgtaacgcagcttctgtaagcatgtgtgggcaaaaaagcaataatcctactcctcaaaatagaaagttgaagattgctgaaaaatatgacttttctgtatgttagagaaaaactttatgaggatgaaatgggttcaagatgaatttgtcaacttttgtcttccattgttcagtatttttaattgtcactgtaaataacatttaccacaaggcaaataaaataagaaatgctgacacttccaaaggttgccttaaaatatgtttattttggcttagttcccgagagggcaaaatataaatacagtctaaatatttatcagtaggttaataccagcatgttggaggcctttatgctagtaaaatgggctttcaggggcattgtaaagcctacattgagcttagccatttgtttttaacctcgctgtgctcttttacctcaataaaatgtggtgtttgtatacatataaattatacatagctcataaattatgtatgcatatgtacatagctgtagttggactaaaattcagtgtgttttatcctactaaattctccttttaaaataatacacttaccataattctatgaggttgtagaaaaaagtactcattataaggaagccttgtatattatgactatggttatctcttgtgttttccacatttccaattataacactaaataaaacaacaataaacatgg

SEQ ID NO: 110138 - DNA, 855 bp, Homo sapiens
aatgtcttaagaggtcttggctctggactaagtcacaaatgcatatatttaagttgcctcttggtctaaggatctaaagtttaacggaagcctatggagccctcaaggagtccttcctcaaaggtctagtctcaaatggggtccatgaccacggtgtgtgacagtaacctggtgtgagtctggagaaagagtccaggtaaacatttggcaaagtggtccctccgctatggacattcaggatttggcatttcagatagtagtgaaatggataactcgatggcttcctataattcccagatgccaggttttgtgctaaatcagactctccacattctgaatccttacagtgatcacatgaggaaagtccttttcttattttcatttttatgagaaaaccaaggttcagagaggttaagtaatttggccaaggtcacctggcttacatgtgtttaaaaacatgaatatgtatcatgtgaattatttatatggctaactcatttgcaaaagctattaggtataattaaacaacagggacagtgggttgacgaggataaaaatgtcttggcagccggacgcggtggctcacacctgtaatcccaacactttgggaggctgaggcaggaggatccctgaggccaggagttcatgaccagcctgggcaacatagtgagactgtgtctctacaaaaaaagcaataaattagcccggtgtggtggcacacacatgtagtcccagctactcgggaggctgaggtgggaggatctcttgagcccaggaggtccaggctgcagtgagctgtgatgacaccactgcactccagtctgggcgacagagcgagatcctgtctcagaaaaa

SEQ ID NO: 110139 - DNA, 653 bp, Homo sapiens
gtaaataactgaactaacaaatgagtgaacaaaagaacaaatgaataaaaaacctcagatctagcccctaacaagaataccttaaaaaaaagttttagtgtctcaattgtctgtatagacaatgatttcacaagttcacgtgaaatacactaccaatatcaacaatcatgttaaatcaaatgaaatctatatcctctgggaatgcttgtggtatggcttagggacaagctttacttatgaacaatgatactgagacttcacaatagtcagctgtgcagatgtcagactttgcatttcacacatgcttttaacctagagctcaaataggcagttttaagccctggacctcaagtcaatgtggttcatgttttgtcacttcaagatctacaattgaacttcattacgatagtcttagatggtttttcataaattttgagtcatgaaaaactgacaacatatgagtctccaagtaccttttaatatatgcaatattttacctacttaatgaatacatgtgtttatttgataactaaaaagtttataaagtctagaaataaagaaaagtccatgtcctttttcttttttgttttcttttaaatgaaaactcatgagaaataagagggcagaatgcattaaattatttcttctgtaac

SEQ ID NO: 110140 - DNA, 294 bp, Homo sapiens
gggattacaggcatgggccactgcgcccagcctgtgctgtttttttgtttgttttttaagaaatgggtcttaactgtgttgaccatgttgatcttgaactcctggcctcaagcagtccacctgccttggcgtcccaaactgctaggattacaggcatgagccaccatgcctggccaaagcatcctgtgctatttgcactaagtatgaaagtgctgttctgggaattatagcggcctggaccagttatgcaaggaagacagggaagcaccttctctccattaacctagatttgtg

SEQ ID NO: 110141 - DNA, 268 bp, Homo sapiens
cacaggagagcccggggtcctgcggtggggacctcgccaccaggcagtgagttggggaggtgtgtggccccattcgctgacacctgctccgtgatggccatcccttcttgtcagttcccagcccccacccccacctatgggccacaccccaggggcaccacaaacctagtgccttcacgaggccacagcaacccggggctgtgccctgcctccaccacatccctgatggcgccctgacctgtgctggcacacttcttacatctccccc

SEQ ID NO: 110142 - DNA, 347 bp, Homo sapiens
ctattgcaaattttttgaagaatagtatttatttaagtgcctattgttaaccactttcattttagtttttataaaaatgggctagacacaatggctcgtgcctggaatcccagcatggtgggaggatggcttgaggccaagagtttgagaccagcctgagcagcatagcaacaccctgtctctacagaaataaaaaaaaaaatagccagatgtggtggcacatgcctgtagtcctatttgggaggctgaggcagatggattgcctgaacttcagaattcaaggcagtagtgagctatgttcacaccactgtacttactccagcctgagtgacagggccagaccctgt

SEQ ID NO: 110143 - DNA, 321 bp, Homo sapiens
atagcttcggaaattaccatttcattgctgtcttatctactagaattcaataaactctggaaggcagtaaagctttgtcttataccccaatgtacacccattactgaaaatagtgagtggcacacgggtcttcaataaatatttgttgactgcatggctgaagagagtctcaatgttcaatcaagcgtccagggcatgaaaacaaaacagttgctccaactcatctatactttgcaatagcaacctctcctcccgtcccccacaaataaccagctacctcccacaaaaattccaccccaaacctctttagaatatactatt

SEQ ID NO: 110144 - DNA, 1168 bp, Homo sapiens
  misc_feature (1044)..(1044): n is a, c, g, or t
  misc_feature (1159)..(1159): n is a, c, g, or t
cactggtgtatataaaaacagtttaacaaggatgtacaaatgtttttaaattaacataaaaaagaaggccacagagtggctctacccagcactttgggaggccagggcgggcggatcacttgaggccagaagttcgagaccagtctggccaacatggtgaaaccccatctttactaaaaatatgaaaattagccaggcatggtggtgtgttcctgtagtcccagctactcgggaggctgagcaggagaatcgctggaacctggcaggcagaacttgcagtgagctgagatcgtgccactgcactccagcctaggcgacagagtgagactccgtctcaaacaacaacaacaacaaaagctcctcgatggaaccatttgatagtgacaaggattgaagtaagtatctgaagaggctacttagaaactcagaattggttacaggaagtgactgcccactttccatgtgttcttcagatgctctggttattctaacagcctagttaaccacccagactttggttctcattgcctttatccatttgtttggtgtatatactaatgttcaacgatgcacacataatgcatgtgatgttttttggataccgtcttatcacttgtagaattgccatgataggcattttttggagctactttaagtacttgctggcctagtaattatgcaagtaagtaattaagtgtttattcatatgtgaaagcccaatgtaagcattatttatgtctttcagtgaagtgtggtgtgcctttcatttttctgagtggtctttattttatggaatattaaatggatctttgaataaactcaagagggtagattataaaaggaagaactgttaaattagtcaaaaacaactttataacacaattagctgcataagccagtgcgtgcgtaagcaggtagtataaatgcttaggttgagatactaaaattattattagagaaaattacggaagtactatgctcccactatgttttgtacttggttaatttttctcctctgaacttctggcaggtttactggggaantttccattaggaatattctggtccttaagtttcattttgaatgtataatataatcatgcagattacgaacccacaatctaaaatcaaggcattcttttttaaagtttcagatgangctgggtgt

SEQ ID NO: 110145 - DNA, 438 bp, Homo sapiens
ggtcagggagggcttcctggatgaggctggatgatgatttgagctggtcttatggggcagccaaggtgaggctgctggagaaggagcctcatgcatcctgggtgtagaagtggtaggaactggggtttagaaagccccacagatggcctttgtggtccctcttggagcaccatctcccattatcaaaagccctcagaagtcctgcggctaacatttgacaccagatttcccaagtgtgtttgaccactcatagctgatgaacatggaggtcttgaatgggtttccacatggcttctgtctctctgactaatgcttcagctcatctgggctaccacctcacttctgtaaaacagggattggcaactttaaaagttcagcctcttgggagcaccaaaaaattatttgaagttcacctcttatctttttccaggcattgct

SEQ ID NO: 110146 - DNA, 296 bp, Homo sapiens
caaaggagagatgaaagtgtcaattccaatccaataagcatatttttatattcactataagtgcattggaaactgtgttgtgttcttctgttaaaaagtttaacttaattgttatcatcatagtgtccagtagaataatggcaaatgcattatgagatgccctttaagttcctggagaatgatgtggctatgaagtttaagctctctaggtcctttctcagaaccagatatgataaaacaacagatctacagttttttttctccagatggtacttaaagacctgttagaaaaagct

SEQ ID NO: 110147 - DNA, 1295 bp, Homo sapiens
  misc_feature (1196)..(1196): n is a, c, g, or t
  misc_feature (1206)..(1206): n is a, c, g, or t
  misc_feature (1223)..(1223): n is a, c, g, or t
  misc_feature (1295)..(1295): n is a, c, g, or t
ggaggtttccagaagcgctgccgccaccgcatcgcgcagctctttgccgtcggagcgcttgtttgctgcctcgtactcctccatttatccgccatgataagtgccagccgagctgcagcagcccgtctcgtgggcgccgcagcctcccggggcctacggccgcccgccaccaggatagctggaatggccttagtcatgaggcttttagacttgtttcaaggcgggattatgcatcagaagcaatcaagggagcagttgttggtattgatttgggtactaccaactcctgcgtggcagttatggaaggtaaacaagcaaaggtgctggagaatgccgaaggtgccagaaccaccccttcagttgtggcctttacagcagatggtgagcgacttgttggaatgccggccaagcgacaggctgtcaccaacccaaacaatacattttatgctaccaagcgtctcattggccggcgatatgatgatcctgaagtacagaaagacattaaaaatgttccctttaaaattgtccgtgcctccaatggtgatgcctgggttgaggctcatgggaaattgtattctccgagtcagattggagcatttgtgttgatgaagatgaaagagactgcagaaaattacttggggcacacagcaaaaaatgctgtgatcacagtcccagcttatttcaatgactcgcagagacaggccactaaagatgctggccagatatctggactgaatgtgcttcgggtgattaatgagcccacagctgctgctcttgcctatggtctagacaaatcagaagacaaagtcattgctgtatatgatttaggtggtggaacttttgatatttctatcctggaaattcagaaaggagtatttgaggtgaaatccacaaatggggataccttcttaggtggggaagactttgaccaggccttgctacggcacattgtgaaggagttcaagagagagacaggggttgatttgactaaagacaacatggcacttcagagggtacgggaagctgctgaaaaggctaaatgtgaactctcctcatctgtgcagactgacatcaatttgccctatcttacaatggattcttctggacccaagcatttgaatatgaagttgacccgtgctcaatttgaagggattgtcactgatctaattcagaaggactatcgctccatgccaaanagctatgcangatgcagaagtcagcangagtgacataggagaagtgattcttgtgcgtggcatgactaggatgcccaagctcagcagactgtacagatn

SEQ ID NO: 110148 - DNA, 1295 bp, Homo sapiens
  misc_feature (1196)..(1196): n is a, c, g, or t
  misc_feature (1206)..(1206): n is a, c, g, or t
  misc_feature (1223)..(1223): n is a, c, g, or t
  misc_feature (1295)..(1295): n is a, c, g, or t
ccgcgcgccctttagggtttgaattctccagtataggtcaggcgggaaggaaggtaacgggccttccatagttagcgctgccgggtcaagattttgcccaaggttttgcctccggcttgggccctgctgagtcacacccctcgcgatctagagtgtcatttcaaaattaccaggatagctggaatggccttagtcatgaggcttttagacttgtttcaaggcgggattatgcatcagaagcaatcaagggagcagttgttggtattgatttgggtactaccaactcctgcgtggcagttatggaaggtaaacaagcaaaggtgctggagaatgccgaaggtgccagaaccaccccttcagttgtggcctttacagcagatggtgagcgacttgttggaatgccggccaagcgacaggctgtcaccaacccaaacaatacattttatgctaccaagcgtctcattggccggcgatatgatgatcctgaagtacagaaagacattaaaaatgttccctttaaaattgtccgtgcctccaatggtgatgcctgggttgaggctcatgggaaattgtattctccgagtcagattggagcatttgtgttgatgaagatgaaagagactgcagaaaattacttggggcacacagcaaaaaatgctgtgatcacagtcccagcttatttcaatgactcgcagagacaggccactaaagatgctggccagatatctggactgaatgtgcttcgggtgattaatgagcccacagctgctgctcttgcctatggtctagacaaatcagaagacaaagtcattgctgtatatgatttaggtggtggaacttttgatatttctatcctggaaattcagaaaggagtatttgaggtgaaatccacaaatggggataccttcttaggtggggaagactttgaccaggccttgctacggcacattgtgaaggagttcaagagagagacaggggttgatttgactaaagacaacatggcacttcagagggtacgggaagctgctgaaaaggctaaatgtgaactctcctcatctgtgcagactgacatcaatttgccctatcttacaatggattcttctggacccaagcatttgaatatgaagttgacccgtgctcaatttgaagggattgtcactgatctaattcagaaggactatcgctccatgccaaanagctatgcangatgcagaagtcagcangagtgacataggagaagtgattcttgtgcgtggcatgactaggatgcccaagctcagcagactgtacagatn

SEQ ID NO: 110149 - DNA, 1241 bp, Homo sapiens
  misc_feature (1142)..(1142): n is a, c, g, or t
  misc_feature (1152)..(1152): n is a, c, g, or t
  misc_feature (1169)..(1169): n is a, c, g, or t
  misc_feature (1241)..(1241): n is a, c, g, or t
ggaggtttccagaagcgctgccgccaccgcatcgcgcagctctttgccgtcggagcgcttgtttgctgcctcgtactcctccatttatccgccatgataagtgccagccgagctgcagcagcccgtctcgtgggcgccgcagcctcccggggcctacggccgcccgccaccaggatagctggaatggccttagtcatgaggcttttagacttgtttcaaggcgggattatgcatcagaagcaatcaagggagcagttgttggtattgatttgggtactaccaactcctgcgtggcagttatggaaggtaaacaagcaaaggtgctggagaatgccgaaggtgccagaaccaccccttcagttgtggcctttacagcagatggtgagcgacttgttggaatgccggccaagcgacaggctgtcaccaacccaaacaatacattttatgctaccaagcgtctcattggccggcgatatgatgatcctgaagtacagaaagacattaaaaatgttccctttaaaattgtccgtgcctccaatggtgatgcctgggttgaggctcatgggaaattgtattctccgagtcagattggagcatttgtgttgatgaagatgaaagagactgcagaaaattacttggggcacacagcaaaaaatgctgtgatcacagtcccagcttatttcaatgactcgcagagacaggccactaaagatgctggccagatatctggactgaatgtgcttcgggtgattaatgagcccacagctgctgctcttgcctatggtctagacaaatcagaagacaaagtcattgctgtatatgatttaggtggtggaacttttgatatttctatcctggaaattcagaaaggagtatttgaggtgaaatccacaaatggggataccttcttaggtggggaagactttgaccaggccttgctacggcacattgtgaaggagttcaagagagagacaggggttgatttgactaaagacaacatggcacttcagagggtacgggaagctgctgatcttacaatggattcttctggacccaagcatttgaatatgaagttgacccgtgctcaatttgaagggattgtcactgatctaattcagaaggactatcgctccatgccaaanagctatgcangatgcagaagtcagcangagtgacataggagaagtgattcttgtgcgtggcatgactaggatgcccaagctcagcagactgtacagatn

SEQ ID NO: 110150 - DNA, 1434 bp, Homo sapiens
ggaggtttccagaagcgctgccgccaccgcatcgcgcagctctttgccgtcggagcgcttgtttgctgcctcgtactcctccatttatccgccatgataagtgccagccgagctgcagcagcccgtctcgtgggcgccgcagcctcccggggcctacggccgcccgccaccaggatagctggaatggccttagtcatgaggcttttagacttgtttcaaggcgggattatgcatcagaagcaatcaagggagcagttgttggtattgatttgggtactaccaactcctgcgtggcagttatggaaggtaaacaagcaaaggtgctggagaatgccgaaggtgccagaaccaccccttcagttgtggcctttacagcagatggtgagcgacttgttggaatgccggccaagcgacaggctgtcaccaacccaaacaatacattttatgctaccaagcgtctcattggccggcgatatgatgatcctgaagtacagaaagacattaaaaatgttccctttaaaattgtccgtgcctccaatggtgatgcctgggttgaggctcatgggaaattgtattctccgagtcagattggagcatttgtgttgatgaagatgaaagagactgcagaaaattacttggggcacacagcaaaaaatgctgtgatcacagtcccagcttatttcaatgactcgcagagacaggccactaaagatgctggccagatatctggactgaatgtgcttcgggtgattaatgagcccacagctgctgctcttgcctatggtctagacaaatcagaagacaaagtcattgctgtatatgatttaggtggtggaacttttgatatttctatcctggaaattcagaaaggagtatttgaggtgaaatccacaaatggggataccttcttaggtggggaagactttgaccaggccttgctacggcacattgtgaaggagttcaagagagaggtgagttaccaatgtggttaatatgtagacgttgggatattgagaaattctttgttcagattgctctttgctttgtttacgagttcagttcaacccccttattctagacacagatactcttttcagaatattttttttccctacacattaagggtaataaaaagtaattcatgcttatatataaaggtatgactccattttgtgttgttccaccttattactgcagtttatttatcacctcactaatgctggtgtttggtgttcaatgtcttcactttatagacaggggttgatttgactaaagacaacatggcacttcagagggtacgggaagctgctgaaaaggctaaatgtgaactctcctcatctgtgcaggtgagacacggaaaattcgagcagtcttgatggatattttcagccggagcttatttaaaataaatagtattttctaattgaaaaaaag

SEQ ID NO: 110151 - DNA, 978 bp, Homo sapiens
  misc_feature (879)..(879): n is a, c, g, or t
  misc_feature (889)..(889): n is a, c, g, or t
  misc_feature (906)..(906): n is a, c, g, or t
  misc_feature (978)..(978): n is a, c, g, or t
ggccgaaggtgccacaactgaaggggtggttctggcccttcagttgtggcctttacagcagatggtgagcgacttgttggaatgccggccaagcgacaggctgtcaccaacccaaacaatacattttatgctaccaagcgtctcattggccggcgatatgatgatcctgaagtacagaaagacattaaaaatgttccctttaaaattgtccgtgcctccaatggtgatgcctgggttgaggctcatgggaaattgtattctccgagtcagattggagcatttgtgttgatgaagatgaaagagactgcagaaaattacttggggcacacagcaaaaaatgctgtgatcacagtcccagcttatttcaatgactcgcagagacaggccactaaagatgctggccagatatctggactgaatgtgcttcgggtgattaatgagcccacagctgctgctcttgcctatggtctagacaaatcagaagacaaagtcattgctgtatatgatttaggtggtggaacttttgatatttctatcctggaaattcagaaaggagtatttgaggtgaaatccacaaatggggataccttcttaggtggggaagactttgaccaggccttgctacggcacattgtgaaggagttcaagagagagacaggggttgatttgactaaagacaacatggcacttcagagggtacgggaagctgctgaaaaggctaaatgtgaactctcctcatctgtgcagactgacatcaatttgccctatcttacaatggattcttctggacccaagcatttgaatatgaagttgacccgtgctcaatttgaagggattgtcactgatctaattcagaaggactatcgctccatgccaaanagctatgcangatgcagaagtcagcangagtgacataggagaagtgattcttgtgcgtggcatgactaggatgcccaagctcagcagactgtacagatn

SEQ ID NO: 110152 - DNA, 1380 bp, Homo sapiens
ccgcgcgccctttagggtttgaattctccagtataggtcaggcgggaaggaaggtaacgggccttccatagttagcgctgccgggtcaagattttgcccaaggttttgcctccggcttgggccctgctgagtcacacccctcgcgatctagagtgtcatttcaaaattaccaggatagctggaatggccttagtcatgaggcttttagacttgtttcaaggcgggattatgcatcagaagcaatcaagggagcagttgttggtattgatttgggtactaccaactcctgcgtggcagttatggaaggtaaacaagcaaaggtgctggagaatgccgaaggtgccagaaccaccccttcagttgtggcctttacagcagatggtgagcgacttgttggaatgccggccaagcgacaggctgtcaccaacccaaacaatacattttatgctaccaagcgtctcattggccggcgatatgatgatcctgaagtacagaaagacattaaaaatgttccctttaaaattgtccgtgcctccaatggtgatgcctgggttgaggctcatgggaaattgtattctccgagtcagattggagcatttgtgttgatgaagatgaaagagactgcagaaaattacttggggcacacagccactaaagatgctggccagatatctggactgaatgtgcttcgggtgattaatgagcccacagctgctgctcttgcctatggtctagacaaatcagaagacaaagtcattgctgtatatgatttaggtggtggaacttttgatatttctatcctggaaattcagaaaggagtatttgaggtgaaatccacaaatggggataccttcttaggtggggaagactttgaccaggccttgctacggcacattgtgaaggagttcaagagagaggtgagttaccaatgtggttaatatgtagacgttgggatattgagaaattctttgttcagattgctctttgctttgtttacgagttcagttcaacccccttattctagacacagatactcttttcagaatattttttttccctacacattaagggtaataaaaagtaattcatgcttatatataaaggtatgactccattttgtgttgttccaccttattactgcagtttatttatcacctcactaatgctggtgtttggtgttcaatgtcttcactttatagacaggggttgatttgactaaagacaacatggcacttcagagggtacgggaagctgctgaaaaggctaaatgtgaactctcctcatctgtgcaggtgagacacggaaaattcgagcagtcttgatggatattttcagccggagcttatttaaaataaatagtattttctaattgaaaaaaag

SEQ ID NO: 110153 - DNA, 454 bp, Homo sapiens
ggaggtttccagaagcgctgccgccaccgcatcgcgcagctctttgccgtcggagcgcttgtttgctgcctcgtactcctccatttatccgccatgataagtgccagccgagctgcagcagcccgtctcgtgggcgccgcagcctcccggggcctacggccgcccgccaccaggatagctggaatggccttagtcatgaggcttttagacttgtttcaaggcgggattatgcatcagaagcaatcaagggagcagttgttggtattgatttgggtactaccaactcctgcgtggcagttatggaaggtaaacaagcaaaggtgctggagaatgccgaaggtgccagaaccaccccttcagttgtggcctttacagcagatggtgagcgacttgttggaatgccggccaatgagacgcttggtagcataaaatgtattgtttgggttggtgacag

SEQ ID NO: 110154 - DNA, 323 bp, Homo sapiens
atttgtgttgatgaagatgaaagagactgcaggtgagtgggtttagttcacatctgggaaagttctaagaacaatgattcctgtgagatcactagctccctgtgctccagctcctgtagatgaatctgtggtcccttttgtatagaaaaactaggaatggcaaaactgtgttatacttcatgctttccctgcagattgaattaatcttcaaatctcactaatggtggctggcttgtttctttttttccagtagggggtaatgttctatattgaaagccacaagactacacattaagcttttgtccctgttaggtataaattag

SEQ ID NO: 110155 - DNA, 345 bp, Homo sapiens
ctggattccagctgattaaggcacttattatttggagaaaataattagagagtatatgtgatttttttatttaaaaaaagaacagggactatgctaatttattgctaaagagcatttgtccttctcactttaaaatatctgcagccagttaattattagtaaagagtcgtttccctctactttgtggatggtctggtagcccgcctatgctgtagagaagatgggtctccattgctccttctgtgggaagaataacttctagcaaggaccaaggctcaagatgcatccctcattgagcagaagcttagagtccatggcatttcctgtgaatcactgttaaaaccc

SEQ ID NO: 110156 - DNA, 413 bp, Homo sapiens
aaaattacctattttcagagagggcaaaagaaattgcacttaatgtagcaaggccataatttacccagtcacagtacaaactttccttaagtattggttttagtttcctttgatacatatggtttcaggccgggcatggttgctcacacctgtaatcccagcactttgggaggccaaggcgggaggatcgcttgaggtcaggagttcgagaccagactgaccaacatggtgaaaccctgtctgtactaaaaatacaaaaaaattagctgggtgtgatggcacatgcctgtagtcacaactacttgggaggctgaggcagaagaattgcttgaacccgggaggcggaggttgcagtgagctgagatcgtgccacggcactccagcctgggtgagagagagagactccatctcaa

SEQ ID NO: 110157 - DNA, 248 bp, Homo sapiens
tcccagcccaaggaataggactcagcctgcttctgtgccacctggggctgcttgaactttgcgacttgtggcttgggaggagggaggtggccgtgacctttgggggtttttgttctgcctggctgtagccaccagcagagggggtggggcacaggccagaaaaaccccttttgtggggttgtgaggagtgacaattggctgcttctcctccccttccaggctcagagcagggctggggggcagttgtg

SEQ ID NO: 110158 - DNA, 969 bp, Homo sapiens
aagcaacccagacttcataccagctcccaacaccatgacctgctgccagaccagcttctgtggatatcccagctgctccaccagtgggacatgcggctccagctgctgccagccaagctgctgtgagaccagctgctgccagccaagctgctgccagaccagcttctgcggatttcctagcttctcaactagtgggacctgcagctccagttgctgccagccaagctgctgtgagaccagctgctgccagccaagctgctgccagaccagctcctgcggaactggctgtggcattggtggtggcattggctatggccaggagggcagcagtggagctgtgagcacccgtatcaggtggtgccgcccagactgccgtgtggagggtacctgcctgcccccctgctgtgtggtgagctgcacacccccaacctgctgccagctgcaccacgccgaggcctcctgctgccgcccatcctactgtggacagtcctgctgccgcccagtctgctgctgctactcctgtgagcccacctgctaaaagccagtttgctgattttcaacttgaaatttccactttcagttccattcatgaacgaattatttcttcaagcacttatggacaacgaacaaattcttcaacctttctttgtctttcttatgggggttaccaaatattttggcctcagaattatctgattcctttcaattccagaaagaccttactcttctctctgaggacgccaaaatacaaatttgacccaagaaatgaaaaagccgatttaccttgaaactgagcctttgcaagcattgaagcccacgctctgagtctcagcgccgacgagaccatggaagagccatctgtccttctcaggacactcacttcctgtatcccaccgtcctgcaaattgcaccccctatgaaagaggaataatataccaaggtctaataaattttaactattggtgcaac

SEQ ID NO: 110159 - DNA, 423 bp, Homo sapiens
ttcttctttcaagtcaacttttcccaattatattattcttgtcaaaaatacgttcaatagttgaggaatttggagattacctttcctacctgcattgatttgcaaactttgtgatgatttctgccttggaaaggtgttatttataggctcacttataaaaagacaattagaagtgtgaaaaataagtgagaaactttgactaccagacttctatcttaacgatgctatatgtcctttcaaaaatccacaaagcaaacccatgagaggatgaggctgcagtgtttcctttactgattagttgaggggttatagacttctctccatcacaataaatgtgcacagatgataacacacatactgatattagaaggaaaaatgagagatgagtcaaatttaaaaaaatatataaaaaataattgggac

SEQ ID NO: 110160 - DNA, 370 bp, Homo sapiens
aatcacagtagggcaaatttcgaaaagactcacccctacaacatctaggcaggtctgaggcatcatgcagatccttttagatccttagggatttcgtgatttattccttgggctctgcttgaggtttcttcaggctgctcacgtctgacctctcttaggaacatgggactatcccatggatcccacagataaggcaggcaagagaccactgccgacgcacctccaccaaggtgtccttctaagtcgagccacagggacttgtggctagggaacggaggcatttattgggatgttaaccacagctcacagctcaggccccgtgccctaagactagcgcatgcgcattcgcgatggaggcgcccacgctagg

SEQ ID NO: 110161 - DNA, 182 bp, Homo sapiens
tggacagatgcattattacagaaatctgaacatttctgaaatcattgctctagctatattgaattatttgtagtttcctgatatacttgactattgtattcaactcttccactttcctgtactactgtatactctctcctcaaaccactaatactctcagccaatgcttgcttattacttca

SEQ ID NO: 110162 - DNA, 381 bp, Homo sapiens
tgagttttatacagtggtgcagctggagtcctgaagcccatgcatcataccatcagagcaaatgattgataaaaacaacaacaaaaaaattaaagactgatacttccttgcaccatctaaaatgaacaaaatcccacactgaggaaagtattatcccaagatactttccatcaaaacagactgcttaagtaactgtggattttatttcacactccagagttcatgtccacacctattatgtcttacgttctgactaaactgcatttgacacagatgcaaataattttatgaaagtatgacttcttgtagcataacttccttccaagacagttaatattcaagcaatacaaaaggccaagtctttcttcttcacttaagatc

SEQ ID NO: 110163 - DNA, 253 bp, Homo sapiens
aaaaaaattaagcctttaaatcaagctataaaacatgataccattgtggcatcatgaattagagagattaacttttttaaagatcaataataatcctttgtgattttattccagtgcatttaaaaatctataaaatgataatttatattgatagctttcttctttttgtgaatatatccttatcagattattatgcttttgatagactacttaattctatttcttaacatttaattgtatctataatcatagg

SEQ ID NO: 110164 - DNA, 351 bp, Homo sapiens
gtgatttgcaactgacttcttcctcccacaaactaatatttttaaatggtttgcacttttttctgtccccaaagggatttgttaagtgtgattttcagcaggacatgtactttttttatttgttagccataatggaaatgcatagataaactgaatctgtgttaacataataagacaatcaaattttttgtttagttgtggggaagggacgggatagaggaagtagaaaaagctccctcaaacataagctgaatatttatgtggtttttgtttttatttaaaccaacctctttagaaaattactttcttaataagacattatacaatgaatttttccagtcattttgaggg

SEQ ID NO: 110165 - DNA, 323 bp, Homo sapiens
agagaccgtgtggttcataatcctaaagtatttattttctgaccctttatgaaaaagtttgctgaccttttgaagtagatggaaaatgtgacctaaggttttaatacaaattttaaaataaatttatataccacatcatacccattaagatagctgtaatcaaaaagacagataataacaagtgttggtaatgctgtgaaaaaattggaaccttctgtatactgctggtgggaatataaaatggtgcagccactttgaaatcagcctggcagtttctcagatgagcagacacagatttactggaagagcaagccattctactc

SEQ ID NO: 110166 - DNA, 479 bp, Homo sapiens
gcctgcaatgatacaggagaattggtgaactccccaaaggaaaagaaaggaaggaggggatgaaaccagctaactcatcccccaggccatgtaggaaggagccaggaagctctttttctatcatgtcatgctgtcgcatatcaaatattgttatgaatttctgtactatggagaaaataaagtgcagtggttaacagcagggactctggcatgtcagtgtctgggttgaaatcccaactttgcaacttactcgctgtgcgactcagcttcctcctgtgtgaaacggggagaccattggaccttccacaatgtgtgtcacaggaccccagtgtgggctaaagttaatacatgtaaaacactcggaggaacactgcaaggaagaagttctgttctaggtgcttcacatatattaacccttagtccacacaaagtcctactattattactatactgcagaaagcccagaagtagcctggact

SEQ ID NO: 110167 - DNA, 313 bp, Homo sapiens
gtctgaatcttgatttacccattcatttcctgagaaatagttcctcaatgttgtagaacattcttgtttgccaataactggcaatagagtccatacacacatatgctgcttattagggtgaactgatggtgagataacctggagaacagccccttataaccatctggaacatgtctccacagctgcaaagcccattgaaattttatttagctttaaaaagacatgctgtaaagaatctgaccatataaaaaagatgaattatgaagtgactatttcagttttgtttaaaagaataaacttcactttatcaaat

SEQ ID NO: 110168 - DNA, 225 bp, Homo sapiens
ttttaatgaagaggcaagacattgtctccaaatgtgcagtctctgaaaatgatcatcttctctttcttgagaggaagagaaatcttgagtagtattaactcaagttttatcccaagccactttaacacagcaagcagtcattgagatctaataagcatcaagttgatttgcttccaaatcaacatacttctggagctaaaaataatggggacaaaaagttattgt

SEQ ID NO: 110169 - DNA, 157 bp, Homo sapiens
  misc_feature (15)..(15): n is a, c, g, or t
  misc_feature (69)..(69): n is a, c, g, or t
  misc_feature (85)..(85): n is a, c, g, or t
  misc_feature (105)..(105): n is a, c, g, or t
aaaagacctaggtanaaggctagctatactatgttcataaactaaaaaatgttgttaagatgtcaattntctcaaaactgatacntaaattaaacttactcccanaaggattctagcgtttgtcgtaagaatttttaaataaaacgaacaaaaagaa

SEQ ID NO: 110170 - DNA, 319 bp, Homo sapiens
tcccaatcagcctttgtgtcatccagacaaattgtactctgagtccatgctttgaagaaatctagtaacacagagagttgtctgtgggaggtctgttccttgttgtttccaaataattattaagcagacatatggtgaattgaatttataccaacatttctgagcctattcaattttttaagtgtactaaaggaaggataacatcaacttgtaagtatttttaaaacttttccatattaggttttaattatcttaattttcatcatatgtattaagacttgggttaaaaaaaaaaaaagaaaaaaagatggatttttgc

SEQ ID NO: 110171 - DNA, 272 bp, Homo sapiens
ctgagatctgctaggccaactgaaaggtagatttggtccaaaactatgcacacttattaccaagtcccattagactccactctgactaaagaagtagattgaccttcagatccctctgagattactgtgtgagctcagaagatgatacaataatacccccaaatcaaggtattttgtttcccttggcacacatttacccggataaatggttgaaagtgcctttggagaaagctaggaggaagatttacaaaatataccggggtaataaacag

SEQ ID NO: 110172 - DNA, 729 bp, Homo sapiens
ctactctcctccacatagttcacaacacagatgaagggtgtactccttctctcctcctccaaatatggtctagttcttttctggagcatttctgtcccctatatctgaaatgaacgtaattggaaagattggaggagttaccgacccagcctgggaattacatttataaatgaaatgccagtcttcccagttgattctggaacatttttcctgtgtgtcaagaggaagcagtggggagatgttgctatgagaatccactgatgtctgatgttggttcttctgacatagcagggctgtgctatcccatttccttttctttgctgtaagaattcaccctgaagctgtgtgctcatttgcgacgcttttcccaaagaggggtagaacagcctgccgagtcagagctaccaaagtaccaaatgctggcttcactgcttactagttggtgaccttgggcaattcacttgatatctctgtgctcatctgtaaaacatgggtaataatatttaacctcatagaattgtggagatgattaaataagataatcaaagcatttagaactgtggcatttgggcaatagtaagtactatatgagtgttagctatagctcttgttcttaagtctaggctatataaatttattttttttatatggaacacttcgcgaatttgtgtattacccttgtgcgggggccatgctaatctctgcgtcattccaattttagtatatgtg

SEQ ID NO: 110173 - DNA, 315 bp, Homo sapiens
ccaaactgctgggattacaggcatgagccaccgtgcctggcctcatagaggagtttttaatacaacaggacaatgaaccatagtaaaatactatatgatggaaggttcttaggccttgtagaatttagccctggcttggaaaggattactgactgtggtatggaatggagttccattttttcatggctttcaggagggctgttttttattttcttttataggctggtaagtaggtgggaaagctgatgttcatgtctagtcatggtggcactctgcaagacactgtggaggttgggatgaatgagatatatggtt

SEQ ID NO: 110174 - DNA, 789 bp, Homo sapiens
gagatgggtctccctctgtcacccaggctggagagtgcagtgatcttggctcactgaaacctccacttcccgggttcaggtgattcttctgcctcagcctcctgagtagctgggattacaggtgcatgccaccacacctggctaagttttctatttttagtagagatggggttttactctgttggccaggctggtctcgaactcctgacctcaggtgacctgcccacctcgccctcccaaaatgctgggattacaggcatgagccaccacgcctggctgcaaagaccttttaatacacagttttaaagtctgttcaactgaatatagactacagacaaatatattttctcataactttagtgtatcacaacccagatttttaaaatatttttattacgtgatagtgataactagcaattatttgtcattgctgtttcttaattaaaaataattgcaatgttaagtaaaacttttttcaagtttttttcttctataactattactaggctttcattcagtagctttcacctgtaatgagttttactaagtatgtgaaagtaattttgataggagactacccagatcaaaacgatttcagctatagcccactagtataattcctggagctattatccatctttagaaaatttgagaattagccagagactttctaggaaataacgattagcctgaaacgttataggaaaactgtgtgtaattatctcattcaccttcagttaccataaaggagaagggaaaataaagttgagttgaaataagaaaaaattc

SEQ ID NO: 110175 - DNA, 139 bp, Homo sapiens
caccatagcactagaagtcctagccagagcaagtagtaaaggaaaagaaataaaaagcatcccaattggaaagaaaaacaataaaattatctctgtttacagatgacatgatcttagatgtaagaaaccctaaaaatgg

SEQ ID NO: 110176 - DNA, 333 bp, Homo sapiens
gtaacaggaagggtcccctggcctcttcagttgtgggtgggagacaggcctttctgtgcataggcagggttgagggcaaggagggtcccatgggctgtgcttggtaaggcgctggcagcatgccccagctgagtgagagtgtggggcatctctctccccagccctgcctgaaatagctggaaaaggggagtaccaacccagggatggattcctgatgcctcccagcttctgcagatgggggtatctggggccctcctgcgaagtcaggagatgtctgagcgctggcagcgggattcctaggaggggctcagcggggagctcctggtcctggct

SEQ ID NO: 110177 - DNA, 445 bp, Homo sapiens
gcagagtaattctttaaactgaaattttgatagtgcaagtttatgatttttaaaaagtcatcaaataaattagcttttgagactatagggtgaaaatatctgaaatgtataaaaattgcttggttttgtatagtaccttattatatatgattttctggttattttttaaataaaagatgtactggccgggcacagtggctcacgcctgtaatcccagaactttgggaggtcgaggcgggtggatcacaaggtcaagagatcgaggccatcctggccaacatggtgaaaccccgtctctactaaaaatacatggtggcgcacacctgtagtcccagctacatgggaggctgaggcaggagaatcgcttgaacccaggaggtgaaggttgcagtgagccgagatcatgccactgcactccagcctggcaacagagtgagactgtctc

SEQ ID NO: 110178 - DNA, 414 bp, Homo sapiens
gcttttcagggcttctcttctcgaaacctaaatgaagtgtgaatacaaattacagcagctagcagcctgcagtgggactgaaagtccttggtgaatctccatcaagctgggctgtttaatagaaccagtttagtgtcccattttacttgaaacattagattttgagcacctgcttggtacaagccattttgctaggccatgtggaatggatgatgagcacacacagaccagctaaccctagtggatgttaaaatctcttaggaaatagaagtcaaagaagtacaaagccatctgtgttgtaagaaatgtgaacacagaacctgcctccgagagtaagagggaacttctggattgatcagagaaggttccatggagagcatgacatttgaactagagccaaaagtgtgggtgggt

SEQ ID NO: 110179 - DNA, 612 bp, Homo sapiens
ctggaatgggaggctttcattagtgtggcttcatcccaactcctgcttgtaggtgctgtctgggtgtatctgtgtgattacagtattgtggtgatatgaattattgtagtgtatatataaaaatgagcagagactttttttttcttaagaaatgaagcataagaaatgtctgatggagaaaaaaagattatttttgaagtactgatagagaaaatagtgttggaaaccagatggcaattttttttttataattgcaaaatgttgaaatttgggaggaaaacagttttgttttgtttttgcattacactattaattgtgagctcttataatgaagatcaaagtacatctaagcttttcactagtgagcatatttattttcatgccttccgtacttaaaatttatttattattttattcatttaacaagtataaatggagtacatcattctaggccctggagataaatggcgtttgatcaagactaatctatcagatgggaataagtgttgtgcagaaagttcaaagagggtggtatgttcgagggtgacctggggtacattagaatagatgaccagggaaagttctgcttttagaaaggaatctgtcagttta

SEQ ID NO: 110180 - DNA, 702 bp, Homo sapiens
tcagcttcattcatgattcagagatagaggggtgggggcttaggtggatatcattccatccacacctattagacagcccagaggagggaaggaatgtgcctgtctgctgtgtagcagagtgtgttgtgcacagtggagctggggctagctttgggagaagtgtcccaagcagcaggaatgtgaacaggtgaggcttccagcccacaggagcctgcagagagtgtgcgagactgaattggaaggatgcccacagtgtggttttctgtgcctctgttgccttctcaagtctcctgagtgacattctgggcttagggcttggagccatgtgggtcatctatccaggagagaggtcacggttgagagctggaaaggtagcttcccaaagtcatcaaggatgcaggcttctgtattgctgtttcaccatcctgagttttggctttcaccctcctggatacttcatggtctctagtgagtgctgaaactatggaccctggacccactctgaagggagcagaaggagctggtctgcccccctttaacaagtcttctcatcagtctcattcagcatttctgattccatcccaaccaccacatgggagacacatggccacacctagctgcaagagaagccaggaaatatagcttatctgttacacatattgtccaggtttttgtccctgaggaagaaggggaggatggatt

SEQ ID NO: 110181 - DNA, 137 bp, Homo sapiens
aaaggcaaataatggtaaataaaataattcctgaggctatagaaattggggtaaatggcaagcagcattctatttccatctctccagataagggtccttaggagctgctattttagaccagggtgccaaacattcaa

SEQ ID NO: 110182 - DNA, 367 bp, Homo sapiens
taaataacctcaggactagtgtatgaaatgggctgggctaatactgactgctggactcttaagtcatcatcttgcttactgtcatagtttactggtgcctaccaggaaggtccttcttccccacctctgatcaccgtgtttctctttcaaatgtcttttgcagtggttgtctgacaactcaatggttggtgtaacacaggatttggcatcttccttaaagttatctgattgtgtttatttcacccttgggacataatgtgcaagaccctaggatgctggaaacatggctctatccaagccccgaaggcctgagaaccagggaaacggatggtgtaactgtcagtctaaggccaaaggcctgagaagc

SEQ ID NO: 110183 - DNA, 282 bp, Homo sapiens
taggcaatagagcaaggctgtgtctcaaaaaaagaaaaagaatgcggtagagacaaacgcagtggctcatgcctgtaatccccattactcaggaagctaaggcaggaggattgcttgaggccaggaataagtatgtatttttatacacatcaaagctatacatctacacacaagtattttaaaatatatgcaaaatataatatatttgtttctctgagtaagaaagatatctaaaccagtaatagttgatacctctaatgagtagaaaagtcaacttgggca

SEQ ID NO: 110184 - DNA, 326 bp, Homo sapiens
gtgtaattagacagtctcaaagcataagcaatttcaatgtgacgtgtgtattttaggggagagggacaggagaaggacttttggtggaatttattactacttcaaaaaagtaaacttggcaaatccatcccttcttggcattaaacagatattgtcttcatagtggtaaatggtctccatgactcagcctccagttgcaaggcagatgagaggtctctaaacctgtcagagagcccacagggttacttaagtcaactccctgccccagtcagctatctatctactccccacaataaatggctggtcagttccactttaaatatctc

SEQ ID NO: 110185 - DNA, 853 bp, Homo sapiens
gtagagctagaatttgtggcccattctgtccagctctaaagtttgcatctgtttttaacttttttcttaattaaaaagagataaatatgcacatagagaaaaacctactttttatttcaccatccagaggcaaacactactaatattctggcacattttcttcctgcctttcttggatattttttaaaattttatatttgagagataacagactttaaaggaaatgtgaaactcttccctcaccattcggtgaatggaatgatataaggaggtaagtggaattactctagtaggtaaataaataataaatgaataaataaataagagccttgatctcctgggatcaagcaattctcccacttcagcctcccatgtagctgggactacaggcacatgccaccacacccatataattattattattattttttgtatacacagggtcccactgagttgcccaaggctagtctcaaacttgtgcactcaagggatcctcctgcctcagcctcccaaagagctgggattacaagcataatccactgtacccagcctgtaatccactgtatttctttttttcagcatcctaaataatactgtagtggatatctttttgcagtaacttattaaatctatagaactttgcacatattaataattaatgagacattaattgctatgaaagtctcatgcaattaaagatgacaaaacacagaaagatatttagtgttacagttccaatagttaatcttgtgtgtttgagatgactgtgttaagggggtcataactgcaaaatgtcttcaatatgttgtaactgatatctcaattgctactgataagaacttatttctaaaac

SEQ ID NO: 110186 - DNA, 412 bp, Homo sapiens
tcctgacctcgtgatccgcccgcctcggcctcccaaagtactgggattacaggcgtgagccaccgcgcccggccgcctgtccctgctttctcacaacctcaccccaagctgagctgctctgttctgtgtagccagaggctgagtcctcagacctgacacccaacagcttgtgggccacatctcttccttccaatcgcgatgccttgtcttgtgtcctggccctcgctgtgtacaggctccctctggcttttggcatatagtccaagactcctgcccccaccacccccaggctgatcttcctgagtccaggtttggcgaaggtacagccctgctaagaagcctttgatgggctcttttgcataatgccccaactctcaggcagacatttccaccctttcccattcacacccca

SEQ ID NO: 110187 - DNA, 394 bp, Homo sapiens
tagctgagccctgacccacaaaatcttgagaaggaattaaattgctattgttcccagccagaaaagcaaggtagcttaaggtagtttgttccacagcagtaggtaactagaacagtcatgtccaaggatttgttcctgcactttccccttcgccacgtatggcagaaattctcaggaattctcatgagccagtgtcatgctagtgcttgttgcatctgctcctctccagccgccccagcccactgatccaagcactctgtgaaatgacttttgtgtgtcgacttcttcccacgaggaagacgtttctttcattgccatgtgctggaccccagtgcagagcccggggcattgtcagtgcttagtgtttgttgaatgagccaatggaactggtcac

SEQ ID NO: 110188 - DNA, 351 bp, Homo sapiens
attcagcttcatcactgcatcacacaccgggtagacgtgcattcaacactgggtagacgtgcattcagcttcatcactgcatcacacaccgggtagacgtgcattcaacactgggtagacgtgcattcagcttcatcactgcgtcacacaccgggcagacgtgcattcaacactgggtagacgtgcattcagcttcatcactgcatcacacaccgggcagacgtgcattcaacactgggtagacgggcattcagcttcatcactgcgtcacacaccgggcagacgtgcattcaacactgggtagacgtgcattcagcttcatcactgcgtcacacaccgggcagacgtgca

SEQ ID NO: 110189 - DNA, 398 bp, Homo sapiens
cttctaaccctacctattttctcctctttttgacaatgctttaaaagaaccactgctacatttgaaataagacacaaacctttacaaaaaaaacttttaaaagccttatcgattcttattttgaatgaggaaagaggaaaatagttcacacagtcacaactagtttcttcatactcccatacaaaaaaaaaaaacaaaaaaaaaccaaaagcaactaacaaaagaattaacacagtgtcaggacaaactgtaagatttggtagggcaaaccaagtagtatttgaagagccgtaaatagcagaaacgtctactacacgtatcagataatcaaaaaatcacatatggctttacgatgcattttaaaaagttttctgttcataagagtgtcaccatttaaa

SEQ ID NO: 110190 - DNA, 437 bp, Homo sapiens
cctctgagttgattaaggccatatcaccagaatagtgcttccagaccagagcattcaggttcatttaatttctctttgtaaacaaagcaaccaattttcagttctattgcaaatatctaactgtcctctttttcacagaggagagacaagtattaactgctcttcaaaagaaagttactctgatttacagagattgtaaacctctggcccccacaaacaaacaaacaaacaaacagaaagaaaacacagagcaacaagtctcttaaggacgtaagacacctaggagatagtgttcccactaaacaatgttgggactgggccctgtggctcatgcctgtaatctcagcactttggagggtgaggcaactggatcacttgagcccaggagttagcgaccgattgggcaacatagcaaaaccccgtctctacaaaaagtt

SEQ ID NO: 110191 - DNA, 497 bp, Homo sapiens
gtaggagggcaaaaaccaagagaaggcagtcaccgaggatgaaaggggagacaagtccaagataaggaatgttcaacaatgccacctgctgtgggactgtcaaggtaatggaaggactgtaaagtatccattaggttgagccctatgacgtagaaatcagagacctcagtgagaacggtgtcagaacaggtgacaagggttcgaaggatgggtggaaggtgaggaaacaaagataaaaagtatagagagcttaactatttggctgtgaagagagggagctggaatagctatacctggtggggcaggaggatgagaggtgggtggagagtttgttttgaaagtagattagagtatgtttaaatactggtggcaaaaagaggggttggtagacagtggataaagacacagaagggaatgagatcattaaggagccagcccttgaaaagggaggaggttggggtctagagaacaggtggtgagagacacattgacctagg

SEQ ID NO: 110192 - DNA, 718 bp, Homo sapiens
tgactgtggtcccagccccttgggaggctgaagttggaggattgcttgagcacagcaggtggaggctgcagtgagccgtaaccgcacatctgcactccagcctgggtgaccaagcaaaaccctgtctcaaaaaaaaaaaaaaaagaaaaagaagaagaaagaagatcagtaagcacaattgatggaaatgaattaagtgtttcccttaaaagattgtcagactagattaaaaagctgaatttaaatgtatgctgtatatcagagacatataaaatataagaacagaaatgctgaaaataaaaaaataaaaaagaagttaaaacatctaccaaaacacagaacaaagaaaactggttaaccacttccagttagaacacagaaatatgacactttgcataacaaggagaaaaggttagataagcaatgaaatcatactttttgttgggtggttggttggttagttgggtggttgtatacaagaaagctgagaactcaaagaacgtaaatgaactaaactccagagaaagagaagcccttgctaagagagaaaacactccaagcccttttcatccctgggtcacagtggaaagaagagtaaactgcatgctgaaagcagggcaagagaaaccaaaataatcttttagcaacctttcattggctgaagatatttgacttaattaattaaaacctgaggctctccagacctgttctgccaatt

SEQ ID NO: 110193 - DNA, 782 bp, Homo sapiens
gaaatttcaattactcaaatcagaaaattattaagttcacctttagcaatatataatatagatctttttccccactctgtttttcgaagagctgtactaccattttgtttcatcaagttctgcctccagtgatacttgacccccatttaaaacattcgagtttatttaacagcttattgagcccttggacatatcatagaaactactttgtttatccatctgtttcattgatcagagagaacagggtcagttttttctgccatcagaaaaatcttttattagttgttggttctgtgacccttctttctggacagcgtgggttctctcttgccaaaaacatatagccactattgggttttcctgtcactacacggggtactttttacccagtggacctctattatccttcagtcttgaagatccctagtcattctccttctctccccttccatctaacattaattgagcaccaactatgtgccagaccctgcgctaggtgcttggagtacagtagaaattaaactcttttctgtgtttaccaatctatgtgcctttcatctcagttttctacagaagttagtcgaagatatcagagttgatacccagaacttattaaatattttttcccttagccaggcattgtggtgtgcgcctgtagtcccaactacctgggaggctgaggtgggagggtcagctgagcccaggaggttgaggcagcagtgagccataattgtgccactgcactccagcctgggtgacgagcaaggccctgtctttaaaaa

SEQ ID NO: 110194 - DNA, 483 bp, Homo sapiens
cagctagtgtagacttaaatcctgtgccctctactcaactaaagccctgccccacctaatgtatattagataaggggtgggggatggtggtggtagtaatcaggactctgaccaatattctatgccaaaggatgctaaagatacaaagttttcagttctcagtagatttccatgaaaagtccttggccaccctggaagaggcatactgcctgtcctacctccacctccaacatgaatttgacttggagtatttatgttctaaaggactgaagaacctccactcctatcctgtcccaattcaggattgtctctttcttccttccaggtcacttgcaacagtactggtccagatgaaataaaactgtcaagggaatcctggagctattttgtcaaaaggcagccattggcagcaaacctcttgttggcattactcagtgcccctttgggaacaatcccagtgattaccctagccataacccagcc

SEQ ID NO: 110195 - DNA, 849 bp, Homo sapiens
caggctttaactctcccctctctcccctctcccctcctcaagggaaatttaaattaagtgggaaattactttttgtatagatgttcttttgtcttaaattcatgctcatgtgactttccacttgccatttagagtaacagttattcaaagagcattacctaaattccattcattaagaaaaaaacttatgcccctgctctgctccttcacccctcatcattatttttaaagctctctaaatgcctgtcttgcttaaagaatcataagactatggaagtggaatgcacttggcatgttgttcactattccatgaatttgtagactaaatatgttatttctgtggctcatccagaagatgttgtcatcctttaaaattgcaattagcattattgtaaaattcgttgatggaaaaagatctattaaggttacgtgtattttggatttaatgttgctttacctaaggatgttagggttcaccaaatcctgctttgcttgggatatgcaggcaggaaaattgagaagaaatctttttttttcccattaataaatgaaagaacttcaatgtgaagaatttaaaaaagtcccaagcacagatggttcacctgggtaatttgcaaggaaactggatgagcataatgtaggtggggaagacttagggaaattattcggatagttcagttcctttccttttatctgtctgagccagttagggggaaaaaaaaaaatgaggtttttggatgtcagaattacctgctggaatttttcatgcacttttcagaataaaaaacgtcaaaagagagaagttaaattttccagtatgttttaagaaaataaacaaaatgagacatg

SEQ ID NO: 110196 - DNA, 429 bp, Homo sapiens
tgaaaatccatagaactatacaacaaaagaataagttttactgttacataaaatttttgaaagtagctttagcacaacattttctagaagtcatctgaagtcacctctgtcgtgcataatccctctcagccctaaggtctgaggtcctactctactggaagcacctagaaggagagctctgctgttgtctctatcacagtctgttacaaaaagataattacttgttgactgcatgcatagtttaatctggaccataaggcatcacatttttataactcacattcccaataatttggcagtattaaatctcactaattgcacattatctgtatggacagatctaaataggaaaagcaaatagatggtttcagcaattatcctaggtaattaaacttaagcatacattgatccaaacatgtgttagcatct

SEQ ID NO: 110197 - DNA, 2117 bp, Homo sapiens
gttcctttaaagatcagtagtatttatactctgaaaagagtaccaagcttagttcagttatttattcatccattttttttctattgtttctcctctggggggaaatggtgttttgtttttgtttgagttttgtgttttagttttttggttttggttttgttttgtttttttgtcattcagattcactaaatttggggatggttttattaaagtatattaacttctttttaaccaaagctttctgaatatgaccagcctcaggtgctagcgcattaaagagcaactaaacctaattccagtgtcgatttgtgaaataataaaagctaattgaatttctctaagggtgagagagaacataatgatgaacttaaaaagaaattccttttcccagaagggattctgcatgtacctacaaacaatcatgctctaaccacagtaatagtcatgccatggtgacattgcttttacggtaaaccaagataggtaatatgatgcttcttcccaggtgtttctgaaagaaaagcagcggtggagcttaagagccaagtccactgattgacataataggatggaattgtagacagagacatgctccatgaaacaaggaaacaactgactactatttggatctaagttgggatctgatgttaaacaataaattcagtttaaaaaaaatatggagctcagaaaaggatgtgaaaaactttgcattttcctttcttcattattacaaaaacacctatgtgatgacataaaatacttgggtgatatcagaacaattatccttaatagtttttataattaaagtttcctaaacttcagtctccaatagtcttttaaggattggaaccacatcactgtcagccccgctgctacaatgcctttgtacaatttttttacataaggcaaataaggcttttgtacaaagcctgaataccttctgttccaatggtgtccaaatggttattatattgtgaaaaacctggccttggtcacaatgcaaacaaaagtacagatgaaagtgctttttggacagtttgcaaattgtgttaaagctacggattttttttaaagtgttcagcatcttaacgtgtattaaagctatggatttttttttaaagtcttcagcatcctaattcaccctttctaacttaagaaaaacatgacttaagacactgcttctaagtttggttgttctttatagtgtggatacccagttatctgtgagcgtatgggggtgggctgagggtcaggtgaggaaggagtgtgtgtgtgtgtgtgtgtgtgtgtgtgtgatttgcatgtgtatgatgtgtgtgcgtcggaccgcttctaggctactaagtgtcaatggaaaagaaaatgtattcaaaatacttaaatcaaaactagaagatggggaaaaaaagatttattctatacaaagccttgtctggaccactttagagagacttctatttttttaacccttctataaatatttgatggcacttgaaatattcctgcaataaaatgtgatttgtgtaaagaaaaaaagattttgtaatgtgaaacaaagaaagaaagtaatgtaattttctaaaaaaaaaaatacaaacaaacaaactttgtattattttcttgatggaatttgtctatctgtctttggaaaactttttatttcattgaatgtgccatagtagaaatgtgtgtttttagttttagactaaggaatagctagttgttgtgttccgacattccaaaatgcaaaacaacctagtagtatctttcatgaaaaggtttaagtagtatgtaagcttctctcattgttgcttttttgcacatgttcttcattcctctctagtgcaatatgtacatagagcacttgcgggtgtaccttgatccctcagggaaaaatacatatttgtacagttttttggggtttttttgttttttggttttttttgttttgccttttgtttttggctaaggaatgtcgatcgaatcacttgttattgttgaggggcagccagataataatcctaaagccactgtttccaacattgattgtttaaatcatatgtccttccaatgctattattttaagataataataaaaagttattttctgacaaaaa

SEQ ID NO: 110198 - DNA, 1979 bp, Homo sapiens
gttcctttaaagatcagtagtatttatactctgaaaagagtaccaagcttagttcagttatttattcatccattttttttctattgtttctcctctggggggaaatggtgttttgtttttgtttgagttttgtgttttagttttttggttttggttttgttttgtttttttgtcattcagattcactaaatttggggatggttttattaaagtatattaacttctttttaaccaaagctttctgaatatgaccagcctcaggtgctagcgcattaaagagcaactaaacctaattccagtgtcgatttgtgaaataataaaagctaattgaatttctctaagggtgagagagaacataatgatgaacttaaaaagaaattccttttcccagaagggattctgcatgtacctacaaacaatcatgctctaaccacagtaatagtcatgccatggtgacattgcttttacggtaaaccaagataggtaatatgatgcttcttcccaggtgtttctgaaagaaaagcagcggtggagcttaagagccaagtccactgattgacataataggatggaattgtagacagagacatgctccatgaaacaaggaaacaactgactactatttggatctaagttgggatctgatgttaaacaataaattcagtttaaaaaaaatatggagctcagaaaaggatgtgaaaaactttgcattttcctttcttcattattacaaaaacacctatgtgatgacataaaatacttgggtgatatcagaacaattatccttaatagtttttataattaaagtttcctaaacttcagtctccaatagtcttttaaggattggaaccacatcactgtcagccccgctgctacaatgcctttgtacaatttttttacataaggcaaataaggcttttgtacaaagcctgaataccttctgttccaatggtgtccaaatggttattatattgtgaaaaacctggccttggtcacaatgcaaacaaaagtacagatgaaagtgctttttggacagtttgcaaattgtgttaaagctacggattttttttaaagtgttcagcatcttaacgtgtattaaagctatggatttttttttaaagtcttcagcatcctaattcaccctttctaacttaagaaaaacatgacttaagacactgcttctaagtttggttgttctttatagtgtggatacccagttatctgtgagcgtatgggggtgggctgagggtcaggtgaggaaggagtgtgtgtgtgtgtgtgtgtgtgtgtgtgtgatttgcatgtgtatgatgtgtgtgcgtcggaccgcttctaggctactaagtgtcaatggaaaagaaaatgtattcaaaatacttaaatcaaaactagaagatggggaaaaaaagatttattctatacaaagccttgtctggaccactttagagagacttctatttttttaacccttctataaatatttgatggcacttgaaatattcctgcaataaaatgtgatttgtgtaaagaaaaaaagattttgtaatgtgaaacaaagaaagaaagtaatgtaattttctaaaaaaaaaaatacaaacaaacaaactttgtattattttcttgatggaatttgtctatctgtctttggaaaactttttatttcattgaatgtgccatagtagaaatgtgtgtttttagttttagactaaggaatagctagttgttgtgttccgacattccaaaatgcaaaacaacctagtagtatctttcatgaaaaggtttaagtagtatgtaagcttctctcattgttgcttttttgcacatgttcttcattcctctctagtgcaatatgtacatagagcacttgcgggtgtaccttgatccctcagggaaaaatacatatttgtacagtttttaagggcttccagtaatactagtatgattgtgtatggtatattttagtttgttaactacgtaca

SEQ ID NO: 110199 - DNA, 1603 bp, Homo sapiens
tttgtgaatgtttatgttcttggtataatctaggaaccctatgagtttatctcagagtgaactaattctagatttgttgtcaatagatgctataattcaagaatgttgctctccatatttgaaaaacgatggataggagggtgagggaagcatacaatgttgaaccagtttctcttatttaaatattaaatactttaagcctttaaagtgaagttgatgctagctgcaaacatttactcttgtatttatcttcactaggaaactgtggactgtaatttattttattaaatatttagaagattatttggcttgtgtgttcaggtgagaaatactgagttgtttttgtttaatttcatggtttttttttttaatgatccctagtgggggaaggggaaaggaatagtctgataaacagatgtgcatattttaaaaacaagtgaccttttgggaatgtaggcatttagacgatgattttagtcgcactaggggtgggattcaaactactggtcaaagaccatttggtacagaaaagggaacatctccgatgggtgttaaggtaggagtttccatgcagccctttatgtctgagaaatagtctcctctgccattggggtccctgcggaatcttctacaggaattgcagctcttcacgtcatgctaggttaccagcatgggcttcccagagcacttcactctgtttctaactccactgacttttctgacttgtttcttgagggacttggaaaaggggaaggtattattcacacagatgtgtgtatgaagcctaaataacatccaactttttttccaaaaacatagtaagagtttaaccataaatggaaaagaaaatgtattcaaaatacttaaatcaaaactagaagatggggaaaaaaagatttattctatacaaagccttgtctggaccactttagagagacttctatttttttaacccttctataaatatttgatggcacttgaaatattcctgcaataaaatgtgatttgtgtaaagaaaaaaagattttgtaatgtgaaacaaagaaagaaagtaatgtaattttctaaaaaaaaaaatacaaacaaacaaactttgtattattttcttgatggaatttgtctatctgtctttggaaaactttttatttcattgaatgtgccatagtagaaatgtgtgtttttagttttagactaaggaatagctagttgttgtgttccgacattccaaaatgcaaaacaacctagtagtatctttcatgaaaaggtttaagtagtatgtaagcttctctcattgttgcttttttgcacatgttcttcattcctctctagtgcaatatgtacatagagcacttgcgggtgtaccttgatccctcagggaaaaatacatatttgtacagttttttggggtttttttgttttttggttttttttgttttgccttttgtttttggctaaggaatgtcgatcgaatcacttgttattgttgaggggcagccagataataatcctaaagccactgtttccaacattgattgtttaaatcatatgtccttccaatgctattattttaagataataataaaaagttattttctgacaaaaa

SEQ ID NO: 110200 - DNA, 880 bp, Homo sapiens
cggtgtcttctgggtctctatcctgctttggtaggcttaaaaagtgtgtgtgtgtgtgatttgcatgtgtatgatgtgtgtgcgtcggaccgcttctaggctactaagtgtcaatggaaaagaaaatgtattcaaaatacttaaatcaaaactagaagatggggaaaaaaagatttattctatacaaagccttgtctggaccactttagagagacttctatttttttaacccttctataaatatttgatggcacttgaaatattcctgcaataaaatgtgatttgtgtaaagaaaaaaagattttgtaatgtgaaacaaagaaagaaagtaatgtaattttctaaaaaaaaaaatacaaacaaacaaactttgtattattttcttgatggaatttgtctatctgtctttggaaaactttttatttcattgaatgtgccatagtagaaatgtgtgtttttagttttagactaaggaatagctagttgttgtgttccgacattccaaaatgcaaaacaacctagtagtatctttcatgaaaaggtttaagtagtatgtaagcttctctcattgttgcttttttgcacatgttcttcattcctctctagtgcaatatgtacatagagcacttgcgggtgtaccttgatccctcagggaaaaatacatatttgtacagttttttggggtttttttgttttttggttttttttgttttgccttttgtttttggctaaggaatgtcgatcgaatcacttgttattgttgaggggcagccagataataatcctaaagccactgtttccaacattgattgtttaaatcatatgtccttccaatgctattattttaagataataataaaaagttattttctgacaaaaa

SEQ ID NO: 110201 - DNA, 393 bp, Homo sapiens
ctgcttagaagaaggtatgagctccccgtctctagaaatatttgagcagaagacagaaaccaactgccagggaacctgcagagtcctatttggggacccggtcagagtagtctggatgtccaagataatctcagaaggcactcagaaaacccaccagctccagggttctatagagcagcagttcccacgcctggttcatcctcagaacctcctgttttaaaaatacaggctatccccaaaagctgctgcttcagtacaggcagggcctgtgttccagggttcactgcgtcctccaaagaagattatgttgaagtcctaacccccggtacctcagaatgtgactttatttggaaataggatctttatggaggtaatcaagttaacatgaggtca

SEQ ID NO: 110202 - DNA, 240 bp, Homo sapiens
tcagagacttgctataggtcacacagcagggagagcagagctgggatctgactgagttctactcccagccctgtgttctttcgagagcttccaccactgctggacattgctgccccttccagcaaagggcagttgccagcacccgctccaagcaggggcacctacagatgccagtaccagtggggatcgcttggctggccgtcccaagcacggccactctgctgctcctgaatgagcaca

SEQ ID NO: 110203 - DNA, 180 bp, Homo sapiens
ggaagggttggagattcagtgtcacaataaatgcctggtcctacccagaagttgaccctgaaaatgttgagtatggaccctgaattgtcttagcaaagctgtgatgaaatgacaagcttagcttcaggactaagtggacttgttagaaaccagtttcctctatgaatggacttgatggaa

SEQ ID NO: 110204 - DNA, 633 bp, Homo sapiens
tgtaatcccagctactcgggaggctgaagcaggagaatcacttagaacctgggaggcagaagttgtagtgagccgagatggtgccattgcactccagcctgggtgacagagtgagactccgtctcaaaaaaaataaataaaaaaataaaaagtcagcaaagggaagtttcagggtttcaggattcattcatccattctaaaaaattttgagtgcatactatgtgtcaaattattgtctaggtgatggctatagcatgccgaggtagtaagtgctaagaagaaaataaagcagagtaaggaactgatagtgactggtgcaggaaaggggtgccagtttaaatagcatggtcagatggaaaagcctgtgataaggtaaaattgagcagagacctaaatgagagagagtgaaccatgcgaataattaagtgaataatgttttaattatagggaacaatatgtgtgtgtctatatatatatatacacacaaaggtactgaggcagcagtatacttggcatgtttgaggaataacaaggacactagtttggaacagtgtgtgggagggaaaaaatgatagaagatgacatcatagggagtaatggtgtggagccatggtaagatgttaagattttact

SEQ ID NO: 110205 - DNA, 739 bp, Homo sapiens
atttaaggtagttttcgttctgtggggtgggggagggaaggaggatagagttggagaggaatatacaggctggtttctggggtattggtaatattctatttcttgccttgatactactgttcattttaattttgttcattaaacaatacacattgttttacatgctttttatatgtgtgctatatttcatgaaaaataatttcaacctctctgacttctccccacttctccactctccctccttcttaccaaacaaattattccttattttaaaaccgcttcccacttttacctctgatctctttcttctggagtgtaatcctctgggtcgtgcaagagttttatgttcctttattaacaaacctgttaatctatcaccaatctcaggtcatccctttttctttgtcattgtcacttttgctcttctttctccattcttttccttaagcagacttttaaatttgcccttagaaagtaaataagaaagcgggtttcccttgctgttatctttattttattcttttagtttttcttttatgagtttactaggaaattattttaggtgtctccgtttcacttagccactgagtaagcagaaagtttaagtgaacttaatgaaatggggggaggccagggtgggaggatcacataaggccaagagtttgagacctgcctgggtaacataccaagaccctgtctgtacaaacaattttaaaaagtaactgggtatggtggtgtg

SEQ ID NO: 110206 - DNA, 148 bp, Homo sapiens
tccgagacccacacccttcagcaccatctgggcttttcgtgtcattaccgaaaatcttaggccatattttctttaaaaaaaatcctccaagactgctggggagcggtttccaatgaacactggcaacaaaggtgacctaagaggttaa

SEQ ID NO: 110207 - DNA, 503 bp, Homo sapiens
  misc_feature (503)..(503): n is a, c, g, or t
gccagttttttcatatctttttcattctcaatgtgttttaaagacgatcaatcatgattccacaattgcacatgtaagttgccttattttctcgagagagagttggattgtactcagagatttataatcatttaagatttctctttattttcatttttttcctttcatcctggagaaattttttctgctttagtcaacaccatagcctggcatctaacacactacccgattattgactgcttaagttttcgatcttttttccttcctgtttccttttttttttttgtgtggagaacgaggagtttctcgcctcttttgtcgcccgaggctgtggaagtgtgcgagttagccacgaactcctcagaggcttccacgtggcaaacctctccaaacctttcccgagggttttccagagggtgagatctatctttgtggcgcctcgaagcttaacttccaagagagggcttggaggccaaggggagaattaggcctgtgaaccccgn

SEQ ID NO: 110208 - DNA, 237 bp, Homo sapiens
ggaatattgttttcatgcctgttaacaaaacacccattctgctgccatagatagagattgctctgatgaatgtggcaaagtaaattgaacaccttcagaaaataatttgccttgctagatcccataaagaacgtttgtaattcatgaaaggaggtcaaaatatcaacattaacagaagcttggaagtctattccaactcttgaggggtttaagacttcaatggagaaagtaactgca

SEQ ID NO: 110209 - DNA, 370 bp, Homo sapiens
tgctctcctttccagggctttaagcccagcacatgatgttgtgcgtttcttgttccaccaactggctgctgtggaatgactacgaaacatcttggatgacagtttaatcctcgtggggtaccaggtggcatctgggcacaggtcaaactttccgagagcctttttaacctctttcactgcagccaggaatggctggatctctgctgctgcctatagggattacagttgtcccatccatacactggtctgtgttggcttttgtcacctgggcatgtgcggccaccatcttgactgctcagctagttctgtacctgggttctagaatgatgtcataatgatgccattatgacagatcagcccaaggctgcac

SEQ ID NO: 110210 - DNA, 295 bp, Homo sapiens
aaaaaatggaaaagtgaaaagaatgatcgtctaaaaataagcacgaggaagtctagaacacggtgcttaccagtcaagtttggagtcaggcagctggggtttgcatctctgctccacttctgattggctgtgcaacttaggaaagtggcttcagtccagggtctccattcctcctctgtacagtggggataattgtaggatctgcttcaggatgttgttctgaggattcacggagacaacatatgcaaagccctacagttgtgcctggcatatagtgagcaaacagtgcctatta

SEQ ID NO: 110211 - DNA, 415 bp, Homo sapiens
ccttactaacataggtgttagcccatggaagaattctcaattaatttcaaaggactaaactcatacaaagtactttctctgaccacagtggaatgaagctagaaatcaaatgtggaagaaaaactggaaaatttgcaaatatgtggaaagtaaaccacacactcttaaaccagcaagtcaaagaagaaaccactagggaaatataagatatttttagaccaatgaaaacataccaaaactgatgggatgtagtaaaggcagtactcagaggaaaatttatagctgtaaatgcctaaagatctcaaatcaacaacctagctttacaccttaaggaattagaaaaagaagagcaaacaaaacctaaacccagcagaaggatagaaacaataaagattagataacagataaatgatgt

SEQ ID NO: 110212 - DNA, 1307 bp, Homo sapiens
cagcgggagacggccacgagattcccccatctctttgaatataattttagattgagattcagattaaatccgaggggaaaacactttatgaggctgaaagctgtgtcgttgccagagacagggttatgagctatcaaatgcaattacattaagacagattatactgggcaaattgagccatttagaaggtgagaatcaaagaaacggctctgatcctcttttcccccttctctctccctctccctctctctctaaattgcagttcgtagttccttccaattcggaggcacaaaagtaggtgagactgcttttgtatctgcgaagtgcttcactcctgaatgtaattctagctgagtgcaatctaggttaagagccggacaagcgggtaattagagcccgctagctgcccgaggaccggccgccccgccaaagcgcgccccgagtcggcgcccttctcccggccgagcctagctgcggctggacacggagcgcccgagatgatggtgctggacaaggaggacggcgtgccgatgctctccgtccagcccaaagggaagcagaagggctgtgcgggctgtaaccgcaagatcaaggaccgctatctgctgaaggcattggacaagtactggcacgaagactgcctcaagtgtgcctgctgtgactgccgcctgggcgaggtgggctccaccctctacaccaaggccaacctcatcctgtgccgacgcgactacctgaggctctttggcaccacagggaactgtgctgcttgcagcaagctgatcccagccttcgagatggtgatgcgggcccgggacaacgtgtatcacctcgactgcttcgcctgccagctctgcaaccagagattttgtgtgggagacaaattcttcctgaagaacaacatgatcttgtgtcagatggactatgaggaagggcagctcaatggcacctttgaatcccaagttcagtaacgcccggcgcctggcctccaggcccgtctgtccatctgcccgcctgcccacctgcctggccggccagccagccactctaccagtgcaggctggccagccgctctcctgccacattagaacttctccgtcctcgatgggagggatggcccttcctcctccaccaccgcccgtctgtgtgtgacccctcctggggccaggccgggcctgtacagtctgtcttctgtatataaatgggaacatttattttatgagaaatgtaatgcgattttattactggcgtggattaaacttatgaatgtttccgggaggttactctgcgttgttcacatgactgacaca

SEQ ID NO: 110213 - DNA, 824 bp, Homo sapiens
gggcccatcctgcgttgctgtctgtctgtccgtctgcaggcgtgccgatgctctccgtccagcccaaagggaagcagaagggctgtgcgggctgtaaccgcaagatcaaggaccgctatctgctgaaggcattggacaagtactggcacgaagactgcctcaagtgtgcctgctgtgactgccgcctgggcgaggtgggctccaccctctacaccaaggccaacctcatcctgtgccgacgcgactacctgaggctctttggcaccacagggaactgtgctgcttgcagcaagctgatcccagccttcgagatggtgatgcgggcccgggacaacgtgtatcacctcgactgcttcgcctgccagctctgcaaccagagattttgtgtgggagacaaattcttcctgaagaacaacatgatcttgtgtcagatggactatgaggaagggcagctcaatggcacctttgaatcccaagttcagtaacgcccggcgcctggcctccaggcccgtctgtccatctgcccgcctgcccacctgcctggccggccagccagccactctaccagtgcaggctggccagccgctctcctgccacattagaacttctccgtcctcgatgggagggatggcccttcctcctccaccaccgcccgtctgtgtgtgacccctcctggggccaggccgggcctgtacagtctgtcttctgtatataaatgggaacatttattttatgagaaatgtaatgcgattttattactggcgtggattaaacttatgaatgtttccgggaggttactctgcgttgttcacatgactgacaca

SEQ ID NO: 110214 - DNA, 872 bp, Homo sapiens
gggcccatcctgcgttgctgtctgtctgtccgtctgcaggcgtgccgatgctctccgtccagcccaaagggaagcagaagggctgtgcgggctgtaaccgcaagatcaaggaccgctatctgctgaaggcattggacaagtactggcacgaagactgcctcaagtgtgcctgctgtgactgccgcctgggcgaggtgggctccaccctctacaccaaggccaacctcatcctgtgccgacgcgactacctgaggctctttggcaccacagggaactgtgctgcttgcagcaagctgatcccagccttcgagatggtgatgcgggcccgggacaacgtgtatcacctcgactgcttcgcctgccagctctgcaaccagagattttgtgtgggagacaaattcttcctgaagaacaacatgatcttgtgtcagatggactatgaggaagggcagctcaatggcacctttgaatcccaagttcagtaacgcccggcgcctggcctccaggcccgtctgtccatctgcccgcctgcccacctgcctggccggccagccagccactctaccagtgcaggctggccagccgctctcctgccacattagaacttctccgtcctcgatgggagggatggcccttcctcctccaccaccgcccgtctgtgtgtgacccctcctggggccaggccgggcctgtacagtctgtcttctgtatataaatgggaacatttattttatgagaaatgtaatgcgattttattactggcgtggattaaacttatgaatgtaaaaaaacccatatagatgacaccccatttaccattttaaccatttgaaagttcattggcattcacagtgtcgtgctcagagtccctg

SEQ ID NO: 110215 - DNA, 338 bp, Homo sapiens
tttgggctaaagccgttgggtttgggacaagagaaggggagagctggtacctcttcccttttttgcccaggaaagttgtttctccatcatttcatggctcaaagtcattaaatctgagtaattcttacaaaccagatccaggaagaatctaggagtgggctctctgtagattagaatgcttcaggctgcaggtaacagaagacttgactggaaatgccttcaacagagaagggatgtatcattttctagaaggagaaattctgcagctgggacggttccagggttggtttctttggaaactcagaacttcatcgaggctctggattcatttcttcttt

SEQ ID NO: 110216 - DNA, 306 bp, Homo sapiens
taggttacgtggcaaaggggcgaagggggaattaaggttgcagatagagtttaagttgccagtcaattgaccttgagatggggagaggatcctgaattttctgggtgggttcagtgcaatcagcgttctcataagtggaagagggaggcaggagaaagaatgtcagggggacgccatatgagaaggactcgactggccactgctggcttcaacaatgggagggggccaggagccaaagagtggtgacacctggaaaaggcaaggaaacagcttttcccccagactctccagaaaggaatgtagccc

SEQ ID NO: 110217 - DNA, 319 bp, Homo sapiens
gactctgagtgatccccctagcgcatcagggtggttcaaaaacatggataatattcttggagtaattagtggctaggtagttaaactcatttaggttaatctcagaaaaaaacaattataaaaaagtaaaactctggaagctagaatttaaaaaaaaaattagttttattactttagaattaatttgcattattttcttagattaatttaggtttttcttttggggtaaataggatcatgtgcatctgcaatgacatcatgagcaaattttgcttctcggaaatgctagattttcttttttctgacggagtttcgctct

SEQ ID NO: 110218 - DNA, 387 bp, Homo sapiens
gggttgtttgaagctgatacatttgtggtagtttgttacacagcagtagacagctaaattaacttctctatgaatctgtcaaaaaattaacgttgaaaaagttaaattcgctggccaggtgtggtggctcatgcctgtaatctcagcactttgggaggctgagacgggcagatcacgaggtcaggagttcaaaaccagcctggccaacatagtgaaaccccatctctactaaaaatacaaaaatgagccaggtgtggtggcacatgcctgtataatcccagctgctcaggaggctaaggtgggagaatcacttgaaccgagacgcagaggttgcagtgagctgagaccacgccaccgcactgcagtctgagtgacagagtgagactc

SEQ ID NO: 110219 - DNA, 185 bp, Homo sapiens
ctacattttacactgtgccatttctgtatttgtcctttttagcctacttctatcacagtctctctttgctaaaatacattagttgccatggaaacgatgtcatagtgtgtaaaaccatttactgtccttggaaaggcattcatgataaaattgaacagtagcacgttccacaaagagaagcaaca

SEQ ID NO: 110220 - DNA, 488 bp, Homo sapiens
ccaagttagggcacctgaagggcaggggatagaggtaggtgggctttggatcataatctcgacagacacagtcctgagcaccataatcccaaatgttgaaatcccaaaagatcaaagtccctaaggtcttggctggtccagaggtagtgagttatcttgattgttcagttacagatcaaactccatgttctactctttacccccttcttacttctacacttgactagtcaaggagaaaaatccttactgtctaaaatcccaaaaatcacaatctcaaaagattaaaatcctgaatgttgaaatcctaatgttgaattcatgttatgaattctagggaagggattagtgcattttccgctgtatgcaggatagtgcatcatattagttataccatgtaactaatatgatgcaaccattaccttgttattgtctttatttgaattaagtatggtttaaggagatgtgaatgggtgctaagttgacaagga

SEQ ID NO: 110221 - DNA, 584 bp, Homo sapiens
gttttgaagtcatgagcaaaagttgcaaagtaatttgtctagggatacataggaaaattagtctctttatcattatactttgtgtcgagatttaatactgaaataactatggaaagtgaagtagaagaggctcttttttcttaatgtgaaaaccttgtgaaaactatataagagaaggctagtttttgagtccaaagctagaatttgaatgttaaaaggtgcacagcctggtagctggtgagtagggcacattttatgtactggaacatagtgaataaaaccagtattcctaccaggtgagaaatccctaaattgtgtcttacacacctgctgaaagagaaggaaagcctatgggagcaggacatcgaggccatcctgattagaggaccaggactggtaaagaggatctcttactaatgaattagaaaagcagcagcagagaggaaatcatgaagaaaaagtgtaataggactagagatgttagtagacaaggaacagaaagggcatcaaaatgatcctcagtattttcatgttgagacacattcattcccctccctacctgactccgcatttcccacttttct

SEQ ID NO: 110222 - DNA, 448 bp, Homo sapiens
tgtagagacggggtttcaccatgttgcccaagctggtctcaaactcctggactcaagcaatcctcctgcctgggcctcccaaagtgatgggatttacaggcgtgagccactgtgcctgacctgaaatgccaacgtcttcatgcctaatgatgtgtgcaccatttgattccctcatcagccatcctaataccttcttctgaccacttaaactgttataaatgccctgtccttgagaaggcagcagagggagaggagcaggaacaagggggcctggtggcagaaggaggtgctggccagaacaggggggcagagaagtgtgggctctgaaagcccatcccagaccccagaatggaataagctgaatgcacatggcccctgctgacctgaacggacggttctgcagcctgagagaggagctgggtctgaagggagtgtggcggctggcggc

SEQ ID NO: 110223 - DNA, 959 bp, Homo sapiens
ctgtgtgcatcttaaaccggcagtctctgaactgggcaacatacatcctttacccttaaccttgagaggaacataaaggctttcccgggggggttatatagttaaggatagtttaagagtattaattctcaggttgtcaacttgcatgtattcattcctaagattgatcttcctcagagtgtactgaactagacatctttttgctttcctctttagcagttgtccctctctcactgacaaatatggggataccttatctgacctaaatcttgatagtggtgtttagaaagtaaatgactgtgatgaatgagtagttaactctttggcaaaattggtgagttacagttgctttagaaaataattgcagaaggaccaaattgacttatcagttgatcattaaaaataatttttgaagcatacccatgtgtgatttttggtatataacttatgagttcacacaaatgattattgctataaccagaaatcgttacacttgcaaatgtttggaatggaagaataaaacatataaaaatagaattaacctgaattctgtttctttctagcaataagtaatatttatttttgggtatatggcctaatgagggagggggcagaaggtcctgtccattttttttatgacatgcatttccaataaaagctttttatattttataggccaggcacagtggctcatgcctgtgatcccagcactttgggaggctgagatgggccaatcacctaaggtcaggagttaaagaccagcctggacaacatggcaaaactccatctctactaaaatacaaaaattatccagacatggtggctcactcctgtagtcccagccacctggggaggctcaggcacgagaattgcttgaactcaggaggcagaggccacagtgaactgagattgcaccactgcactccggcctgggtgacagaccaagactccgtctcaaa

SEQ ID NO: 110224 - DNA, 224 bp, Homo sapiens
aagctacaggcatttcaagtgatttaaacaactctcttttatctaattgcacctgtgtatgcaaggcagtgttgtttaacataacggtagaggagtaactgggaattattgatagctgttcaggctctttcagaggaaggcagagctgagcacttctccaacctgcagccttatctctgtgaagcagcagccgtgagaacatagctcactccatctgtgttata

SEQ ID NO: 110225 - DNA, 260 bp, Homo sapiens
caccatctccatcattacttgcagcgagcatctactaagcttactctatgttaagtactcagcattctctactaaatgctttacacgatcatattcagtctttgcaacaaccatactaacattatccccattttaaagatgagggaactgaggctcacagatgaagtaagtatttaagccaagaatcagggtcatgtattaatagttccaaagcctatgcatgtttttttccattctaccatgccattttcaagcttctt

SEQ ID NO: 110226 - DNA, 287 bp, Homo sapiens
tcagtgttgagtctgagtctttattagggtcatagcttgtatgtgcatttctgtttcttggaccctggctgtaaaaaatgggtcattgaaggtaatgagagtgtttctctggtctctgccctgtgtgtgctgctgacgaggcagctgggccacatttgctatgcccagatcctctgtgacctaacagcaatgttaggaactattcccgaaagtgataaacacaatttcagtttattagtgctcctctcattaacccattgtttttttctttctttctttctttcttt

SEQ ID NO: 110227 - DNA, 1050 bp, Homo sapiens
gagacaggagaataatgtggctgtgattatgaggctttctgcaacataataaaccaaaacagtaatgcagaaatgatttgaaaacaaatccctgggtttaaacctacgcaccagaagaaagaagagggtctggtgatctgaaaacaaaaatacccagcatagaaatatagaccacagacatatcccctaaagcaaagaactcaagaggacatttgcttggtggttacagctttggagccaaacggcctggatgtagatcctggggtcatcatttgctatctgtgcaacttgggaaaattgcttcacttctacaggccccaattttcccatcataacctgcctcataaagttgaaatgagggatgaaagagttaccatttgttaaaatctgagaacagtgctcagcaggtgtcactcaaatagtgggagcatgtacagatgctccttgacttacgatggggttatgcaccaatagacccattgtgagttgaaaatatggtaagtcaaaatgcacttaataacacctaatgtaccacctaatgtatcacagcttaacctagtctaccttaaacctggctcagaacacttacatttagcttgcagttaaacaaagttatctaacacaaagcctattttataataaagtgttgaatatctcatgtaattttaaaaatactgagctgaaggtgaaaaattgaatgattatatggtacttaaagtatgtgtatcacaaaagtgatgcatgttcagtagaaatgaatgtgtaaagtcatagaaatcataaagtcgaaaaattatgcatcaaaccatcatacatatgggactgtctgtaatgtatcatccaaagcagaacacttttaatagaaaaagggggtgctaaaagcattaaagtttatatgatattttgaaatgtttatttattgatcacaaaaggtctatgtataaactaatattagcttattcaaaaaatattttcaaaaggaaaactttttaaatataatatatattcataaccattaaaacaaaatattttatttattgaatattatga

SEQ ID NO: 110228 - DNA, 401 bp, Homo sapiens
tggggtagatgattattttatgtagttaggttttatttgcctctatattagaaagaaatataacctgcacttcgaagtcctggattcaaggaaatggttgcttagaatgaagctaaacctgaaaagggacacgttttatgaaagttttcgttgacgtggcaaaaacccatgctggtggcaggctggtaggaggtactgcaggctgtcattgggagtctcagaaccacggcaggcttggtgctgttattggtgcctttggctgctgctgaaacggagacagagggaggtgactagtccaaggcctctctactgctgctggcagagctgagatccagtgcaggatggtctgagtccccggtcctaaccaccgaaccacctggtgctctttgcaagggtcacac

SEQ ID NO: 110229 - DNA, 755 bp, Homo sapiens
ggttttctatgagtgaaactaagtggaggaaaagcacagatacacaaactgtcccattatgcagtgttatgggccttttcactctgcagtgttgaaactgccttggcctcactttgaaaaataggactatggtacccatggttgtgtcctggcctggggttcctcccatggcaggagccctgctccaagttaccctcctagccgctgcatgtgcggtgaaggggcttcccacagtgggtatgtggaagtctgatggaagtctgatgtgctcataaggagatctgatatgttcacgtgacaaggaacagctgtgttgaaaaatctgcagaacactttggtgccactcaagttatttatttctgggaataattcacaaggcactttaggcaatgccagttgggtggttggaatgcatttgagtattttaatcttttatgtttgattctatgaatgacttatcagaaatacatgtagtcattccttggtatctgtgggggattggttccagggcacactgaggatactaaaatccaaggaagctcatgtcccttgtataacatgaaatataaactatgcacgttctcccatatactttaaatcatctctagattacttgtaatacctaatacaaggtaaatgctatgcagatagttggttatacttcattggttgtggcagcagtccccaattcctttggcaccagggaccagttcgtggaagacaattttccatgggacggagggatcaggggagga

SEQ ID NO: 110230 - DNA, 391 bp, Homo sapiens
tggattgtatatttgcaggcaagtgtaaaaggacactctactttctattattccaaaaagctgagcatttatagactttttgaaaatatgttacatactttctgaaaggaattattcaaatgtcagtttaagcctataaagcaatacaactagatggcatttattattattccacttcacttcctttctcctttaggagcaagggatcgctttacatcaggttccaagctcagaaacatttggctacagtcctttctaatctttgagtcagaaattacaaagaacaaaacaaaagatgattctctcccatctctttcatgtattccaaattctcactgaaatccaggaaagagttattacagtgttttggttggatattcagttttaaaaa

SEQ ID NO: 110231 - DNA, 482 bp, Homo sapiens
tgagatgaagtcttgctctgtcatccaggctggagtacagtggcactatctcagctcactgcgacctatgcctcctgggttcaagagattcttctgcctcagcctcccgagtagctgggattacgggtgcccgccaccatgcccagctaatttttctatttttagtagagatggggtttcaccatattggccaggctagtcttgaacttctgaccgcaagtgatccacccatctcagcctcccaaagtgctgagattacaggcgtgagattactgcgcctggcctaaaacaagacaatattgttctgatcaatcaattgcctaacttctgattaaagaaaaaaatcagggtgattctcagtcctcagctacttttcagtctaaagaaaaagatctatattttatgcttaagaaaatcaagctgggctgggtgcggaatctactgagtattatattccaacaaatatttaccgaacacttact

SEQ ID NO: 110232 - DNA, 392 bp, Homo sapiens
catgaccccagctctcacgtgtccccggccctcacacacccccagctctcacacatccccggccctcacatgcccccagttctcacacgtccccagctctcacatatccccggccctcacgcatccctgactctcactcccacccagccacacccttcagagcatcaggcgtgccaacacagcagcacgccaagccatcagcctggcatgacccacagggcccgttcagactctcgtagctctgcatgccctggtgtgtgtgtgtgtgtgtgcgcgcgcgtgcactcacttcaggcaaggccattttatcacacgtgtagattcgtgtaactgccaccaccaccaaagcactaactgttcccctcatcacaggctgcctccagctgcccccc

SEQ ID NO: 110233 - DNA, 476 bp, Homo sapiens
gcacagggagtgatgaagtgggcctccctcaggaaggactgaaagctctgttccccagtcctctcgaccccaactttctggctccctgcatgacaggctccagcttggggaggtggacccgggccaccccgcctactgcaacttgctgggccaactgggcacagcccagggcgcaggtggccggggaaacaccctctggggctgggcccatccccagggtgagatagctcccccagtgccacccaggtaaccggacaaagatgtccaaaccactacgagggcctggggtggagcatctaagtatgaggctgtgtccttttatgacggccggggactttgcaatcctccacaccctcctgtattcacagtagcccagagtcagtcccattccaccccaccgccctccttctaggcaacccgtggagtaggaaacaggattgggaggtggaatctgttccttaaaagcttagatcccc

SEQ ID NO: 110234 - DNA, 824 bp, Homo sapiens
ggccaggaagctctagaggcgtttttttggccaagggagctgaggaactgcgtgtggagtcagcccagtctggatgcacaggaggatgctggcggcacagtgagtgaggcctggtgccagagctgtgcggaccccttgttggccatggagcagcaggcccagaggccctctccccagccctgcttgcctgcctcggagaggacagaggcctaggcccacgggggagggtgttggcagacagatgccctccaggccctggggcctccttaacggccccttaacgacacgcgtgccaagggtggaggatgccagccaaggggcgctacttcctcaacgagggcgaggagggccctgaccaagatgcgctctacgagaagtaccagctcaccagccagcatgggccgctgctgctcacgctcctgctggtggccgccactgcctgcgtggccctcatcatcattgccttcagccagggggacccctccagacaccaggccattctgggcatggcgttcctggtgctggcggtgtttgcggccctctctgtgctgatgtacgtcgagtgtctcctgcggcgctggctcagggccttggcgctgctcacctgggcctgcttggtggcgctgggctatgtgctggtgttcgacgcatggacaaaggcggcctgtgcgtgggagcaggtgcccttcttcctgttcattgtcttcgtggtgtacacactactgcccttcagcatgcggggcgctgtcgccgttggggccgtctccactgcctcccacctcctggtgctcggttctttgatgggaggcttcacgacacccagt

SEQ ID NO: 110235 - DNA, 966 bp, Homo sapiens
agtcagttgataaacactgttgcctgaacacccgctgtgtgcagagacctagcagataccctggttggggcagtgctaaggattctgccttctgggagctcatttcctgagcagaattccctcttggtacctggcctggcacctggtgcacagaaggcatgagtgcacatctgctgaagagctgaggaactgcgtgtggagtcagcccagtctggatgcacaggaggatgctggcggcacagtgagtgaggcctggtgccagagctgtgcggaccccttgttggccatggagcagcaggcccagaggccctctccccagccctgcttgcctgcctcggagaggacagaggcctaggcccacgggggagggtgttggcagacagatgccctccaggccctggggcctccttaacggccccttaacgacacgcgtgccaagggtggaggatgccagccaaggggcgctacttcctcaacgagggcgaggagggccctgaccaagatgcgctctacgagaagtaccagctcaccagccagcatgggccgctgctgctcacgctcctgctggtggccgccactgcctgcgtggccctcatcatcattgccttcagccagggggacccctccagacaccaggccattctgggcatggcgttcctggtgctggcggtgtttgcggccctctctgtgctgatgtacgtcgagtgtctcctgcggcgctggctcagggccttggcgctgctcacctgggcctgcttggtggcgctgggctatgtgctggtgttcgacgcatggacaaaggcggcctgtgcgtgggagcaggtgcccttcttcctgttcattgtcttcgtggtgtacacactactgcccttcagcatgcggggcgctgtcgccgttggggccgtctccactgcctcccacctcctggtgctcggttctttgatgggaggcttcacgacacccagt

SEQ ID NO: 110236 - DNA, 313 bp, Homo sapiens
atctccactctcttctgcacggaggggtcctttgaaatctagtctcccactgaaactcactgctccactgcactatctatgaagagtctaaaaggccattctgaggcagccaagaactggaggtcctgagcaggtgattcagcaatgccagcaggcaatttgagctctgaggttctttttggtctcacttgctctgtctcagcaggtgagaaaggatcagcgctgcccagccttccccaggctgttttttttttttttcgtctgacacagagtttcacttttgttgcccaggctggagtgcaatggcgtgatc

SEQ ID NO: 110237 - DNA, 370 bp, Homo sapiens
gtaatcaataaattagagggaagcaccatgcacagggcaacaaataacatgttttaaaaacctttttggataagaccataagatagaataatcttgtccatgtagtcttcgactgtacttcgtggtgatgctcaaaccttttgcacttggaagcatcccaactgccatgactcctatgaaatcagctctttatacccattctagctgaatttattattgacattaataaatgaaaataacaaaacctgtggaggtcatatataattttcacatttttttgaaataggaaacattagtgtgtattcttgagcaaaaaagagaagatatacaagtggagaagcaaagggactaatggaaaggctgttacagt

SEQ ID NO: 110238 - DNA, 517 bp, Homo sapiens
atagccacttagatacaatcttacaaatgcccgtcccagcacattaaaatactacatgcaggagagaaaaaaatgacaatatttcactctggtgattctctaactctatgtagacagaggcaagtgtttacccaattctctgcctcagcaatagctctgacatgtgtttatctccttcatggatactcatccactgtccagcaaggccaccatcatccctgtctactgggatcagtataggatcttcacagctgcacttccctgaatctgtcttgcattctccatatccttcccagcagtcccatgtctctataaatgcaaatctcactctctcactcccccggtacaaattctttattgggttctatttgtgcaatcaataaattatgaggtcttgatgaggaatgaaggcacaacaggtcttctgatccttggcatgagaactcttcagtcctatctgttttctcatcctcctctcttccctccactttccccctctatagcattcgcccgtaaa

SEQ ID NO: 110239 - DNA, 791 bp, Homo sapiens
  misc_feature (103)..(104): n is a, c, g, or t
  misc_feature (134)..(134): n is a, c, g, or t
tccaaagcaagggacatgcctgcattccctgcttcaagcctcccagagctcctcactgcctggagaatcgtatccaaactcattatcacagcagccaaggccnnccaccagctggccctcacccacatgggagnccacatacctgcaccaaaatcaaatcctgtgatcaaatcaaagacgtgtacctgccacgtctttccccactatcagtgcctttcccacccttatcaaaagtccaactcaaatgtctgatctttcatgatgccctcctctcacacccaccttacagccccacagctctctacatgtctattagggaacttctcggtttctacctggaataagggccacgcgtctgctgagctttcttctcaattaacttctgctgacagaagaagagtttctatattaaagcacttcttttccttggatattatcattaattgttaatgatacaaagtgctttttaatccattcgtatgtccactatcaacaatactgctaatgtactactaacattagttatctaagtaaattgattttttttcttcctctttcaccatgcagcctaaagctcttaaacttctgggaatggaagtaagtagaacttgttttcaacagttttataatatcctggtcaaatatacatagcccttttaagttctgtatttgcgaatatacgatactactcaccaaaatttacctagatgtcttagtcaaattatataaaaggaccatatatacattttctttaatggggataaaagctgcacaatccatttctagaacta

SEQ ID NO: 110240 - DNA, 367 bp, Homo sapiens
ctcctccctcatgggttgtatttccctaccttcccatacacttctctccctaaggtcttatctaaccatcattctcttcaagttgccatttccattccctacttcccagctatgcacctttctgttccatttggttgacttttatttttttcttctttccagcacatggctttcagttttcctgcctctgctggagttgtcagggttggagccaggagggctttactttttccttttcttctaccaggttagcccggttggtttatgacatctcctcattttcaactctcctcatctcttttcatgtggctttgttggggttggatggctgaggttggctggactgatggttacaaaagaatatgtg

SEQ ID NO: 110241 - DNA, 773 bp, Homo sapiens
gagtctctctggagttatttgctgccgctacctagtctgaaggtgtgagcagctgggcttagtttggcagatgtggaaagctggtaagcactttcatttcatagtgctgttagaaaggaggggaagagaataggaagaagagtccttttctcttaatttggagtcttcaattgaaatctgcctttacaaatcatataaagcttgatgccaattctactaaaataaaactctacacttgtatatgtatttaaaaaacaccacgcctggcacagcctacacactttaaatttacccatttagagtgtacagctgagtggtttttagtaaattgaaaaaattgaacaattatcacaatcttaattttagaactttaaaaatacccctgaaaagaaaaatttcttgtaattctgttcatatattttagtggtatgaatccttttataaatcttgtgacattttcagggtgaacctagcactgtgagttatgaaggcatataagacacagttcttgacttcaagtagctgatagactaatagggaagaaaaggaaacataaatgtctttacaacaagacagttgattaaagtttcacaccagtgatataagctatatatcacaggtttgctgaggaattgaagaatcatctgtgtttggaatgatgacaacaggcctcatggaagtagggagatggaattttctagccagaaaaaatgtggaattatattattctttgtataggcacttttcagtctataataaacattttctttttg

SEQ ID NO: 110242 - DNA, 388 bp, Homo sapiens
gtaaggataatggctgagtgtcattgcttgagctcttaaccagggctcttcaagccgcttgaagctgatttctgattcctccaaagccttgaaaattcccaagtcagggtctcagagattcaaatcccaaataaatcttttgtgtttcacctgcatctgatagtcagttggtatgccttcacatgactacattgactgttgaaataatagaacactctcacaccaattgataattagctgctccccttaacccctgagccctccattattacctggggctgccttgtcccattcctcagaactctctagaccacccccatggtcatgcaacaaaaggtataccaaggaatctctaagactccaagtctacagtaggcatctgttgtga

SEQ ID NO: 110243 - DNA, 307 bp, Homo sapiens
ttttcatttgcttagatttccatgtctttaattcagtttcaaattcccgtcccagctgtgtaaaactccttgttaggtattttaacaattttaccttcttaaagacacctttaagaaccttctagcctgctccattctgagttggttattctgaaactgaatacacagctgtcatcctgtgatctttcaccattgttcagaagattccctttgcctcaatcttgtgtcttcttgttttagtggagaacttcccccaatagttttctgataaaaaggctcactggtaagtctttggacaccagtgtat

SEQ ID NO: 110244 - DNA, 442 bp, Homo sapiens
aactaaacactggcaagatctggagtaacttaactattacaatacaaacaatgacagactgtgaaactccctgagggcagagaccctgtctaattcatctctgtatccaacaattagcatcctgtagttaaatgttgaagagaggtaagctaacatccaaaatttaaatgtgagctattgaaaaattcaacttaacaatctgaaagttatctttttatgactgacattattttttaaatgttaaacaataatgtccaatgcaagtatacaagcgacattaccatggaatgtttgtcaacaactgtggctgtcaaaatcagtataacctagtcttaagagtataaggtagggtgagaggatagaaacagtggcagggaagggtagtaagggaagacctgagactggtgcagagacctgaagaagtgagggatatatactgcct

SEQ ID NO: 110245 - DNA, 266 bp, Homo sapiens
attgttttttctgctttcagtttcactgatttccgctgttatcattttccttctgttaggaaacacaaaaccataatgagataccactatatgcctattcaaacagctaaagctttaaaaatactgacaatgtcaagtgctgacaaagactgtgaagcaatagaaactcatatattgctgatgggcatgcaaaatggtatagccactctggaaaacagtgtggaagttctttatacagtaaagcaaacactcaccagacgacccag

SEQ ID NO: 110246 - DNA, 387 bp, Homo sapiens
tcgaagttatgactaattgttttttaatgaaaaaaacaaggtttgcttaatgtttgatgagtcacgcaagtgagcatctctgtatcaggactctcccactttcaaagacttggcctgtccatctacctgtggctgaggggagaggccaggtgagaccctctctcctgagggcccaccatgtgctatacaaatcccctagcagagcagtagggtcaacagggtggtctctgcgctcaagaagcccacgatggacaggaaaggaagatgtgcacaggctctctcttgacactaggcagggcagggcaccctgtaacaggcacaggccaggggctctggggccaacagaccatgccaacaacaaatgttgagccgggtcttggcctcccc

SEQ ID NO: 110247 - DNA, 322 bp, Homo sapiens
tgccaaaaatgagggatcagctatataagacagtgctattattcttggatttcaggtgaatcaggactgaactactgttacctgctgactgactcatttcaacctgtttaagctccatcaaagtccccatcagaaagttcacttattttcccagccttgccaactggtttaagaaaaatgtaatagcaaataaggaagagaatgactcagaaatctaaaaaaaaaattttccttcaaggaaattaaaataatatttagggaaacaaattatataaatgaataattattttaagtgaggaataagacattctacagagaagag

SEQ ID NO: 110248 - DNA, 131 bp, Homo sapiens
tttgactaacttaacttgcttaaaatatttagggcatgttcatctttcaagatttttattttcctgtctcaacagatcttaaaacttagtgttaaaccagactgttttttaaaaagtctggcttattgagg

SEQ ID NO: 110249 - DNA, 155 bp, Homo sapiens
ggcctctctgtcagcctggcactggctttacagtctcccagtggtgtgattaatgtctgggcttaggaggaaatttcctctgcaggtttgagtttatgcaggtgaagggaaggtacagctgatctaaagcatctgtaggcctcctggggttctgg

SEQ ID NO: 110250 - DNA, 276 bp, Homo sapiens
tacagaaggagcaagtggccatgggttgagctgcattcattaagtgcctgctgttatgtgtcaacatcaagagtcctaggactccggctaaccaggctgttgaggaaaaatgcagtttccctaaattcattatctgtcagcccctcttggttgtaatccccttttacttgaacccgttgctgagaagctctctgcgtgttggcagtcctactccggacttgtgaagctgagtgagtgacggtgactgaggcctcacagggcccttgggtgtttatt

SEQ ID NO: 110251 - DNA, 277 bp, Homo sapiens
ccagaatgtcataaaggccaattggtgaagccgaatgtcaccctcccaaacaaggcctcaatctctggctggaggtgttggctctgcacagtggacgtaacccttagacccctaaggatttctgtgctgcctctgcccaagcaccttgtgccataatgacctgcctgggctggcttggggccacttgccttttaaaaatatatttttaaaagttgaagctgcgcagtgtcccacccctgtaatcccagcactgtgggaggccgaggcaggtggatca

SEQ ID NO: 110252 - DNA, 1205 bp, Homo sapiens
ttctccccgcccaggttctcttacttccctctttctaccattgtgtttgtggtagagcatgctggtttgttctttctttgccagctttcccctttcctcttgtctgtctgctttcattttcttgccacttttgcattgcccagccttggctccagtggaatttggttttgatcatcattgccagcccagtgcaagcacttgttttgttgtgttgctttgaacagttggattcatcagatcaaatgaaataatttacataaaatgtcacagagaactaaaaatgtctatactatttatatagtgacatgtataaagggaacttgtctaggtttggaaagctttttcaaacccagtaatttgctatgtaaagtgatagcttaatatctgaagtattgctattctttcttacataaaaaatagcatgacacgttatcatcaaaagtatagtttatactgtatactgtttttaaaaagcatcaaaaattttatcctcctttcatagatttttaagaaaaaaaatgatcacatgtgcattgtcagacaacacattggaaagatttactcgtttattctctcattctgtaatttttattgagtgacttctctgtgagggccgcattacagatgcagtgactgaaaatacacgtaaggatttttatgcagatgaagcctgcaatctaacagtcgtctggcaccaagtgtgttgtctttttgctgaatttgaacatcccatagtttttggcaaaggatgaaattgtattataatacctataatacactgacgtgatgattttagtgtcagaacccaaaccccctttactcaggaacctgatcatgcaaataaatcatgtgtttgtttggttctggaacctggaagagttgcattatcttctctttaaactcttcagctgttcctcctgtagcctgagactcagagggagctcctagcatccaaacttgaacgaaatgtgccatgtaaactcagagtgccaggatgacccacgggggtgcgcactcagcttgtacagactcttacacacatagagatgaggtagctgttttctgaacaagtgaggttgaaattgaatgttggatacattttacgaaagttaatctatttttgaacattgaaaataatcatagtatgtaattcagaggtccccttgtgagcagattttagcaacatgatatgctgtgtggagata

SEQ ID NO: 110253 - DNA, 402 bp, Homo sapiens
aaggggatttacaatatgttcatgtaaggctctgggcagaatttaaagtcactctatcagctcagccaaatgagaagatcctctttctgacaaatcccaacagaagacatgtcagtgagctaaaagtatcttggtatcttcttccatctgggctgctatcacaaaatatcataggctgggtagcttatgaacagtagaaatgtatttctcacagttctggggccaggaaggccaagatcaaggtactggcagtacctggtgagaggtcattcatagatggctgtcttccagctgtatcctcacatgacagaggagataaggagtctttctcaggcctcattcataatggcactcatcccattcatgagagctctaccctccaacctaagtgcctccaaaaag

SEQ ID NO: 110254 - DNA, 1179 bp, Homo sapiens
cttgtcttcaaggagtagaaaaaataggcatggaagccaggtgtggtgactcacacctgtaatcccaccactttgggaggctcaggtgttccactcccctcggcctcccaaagtgctgggattacaggcgtgagccaccgcgcctggcctatatcccactatttctttagttagtaccttttcttttttagatcttggtttcccaaggtccttgtagtttctttcttcctccttcaaaatattttgatataattggttttagcatttttagtcttttgcatttacacttgccttatttctgaactactattctgaaggtcaagctggtaccaaaccagagcacctctggagataagaattcacttagctgaattgcttatctgtgtgaaataataaacaaattatttcagcctaatttattgttcagttttgattaaaaacaaagaagtttagactaatggttaagatagactatagaaccagactgtctagattcagatattctctgctactcagcgagtgttcttggacaaattacctgattactgtgtgtctgtttttataactataaattggggataattatagttcctgtctcatagggtgattatgaggattaaataagttaatatgcatgcactgcttaaaattgtgtctagcatataacaagtagtaggtaaatacttgctgcaggtggcgatgacagcagcagcagtaatagtagtagtagtaatctggtttgctgatgataaaagccagaaagaacagaaaatttggagaactcagaatagcatgataataattgctattgacaaagtagggtaaaagaaaatagatatgaaatataaactatcagatttgccagtgttaaaatttggagcagtatcttttattccactttcaagttcctggattagtcgaatcaagaggaaatatattcttacagaattagtatgaaaatttttactatttataactacttgtatgaaacctaatacagaaataaattatgtcaaacacaatcctactttcaaatttttaagtcctttcaactgacacattttaaaaaggaaaatactacaaattttccactttataaatgtgtgccgttttgatcacttgaaaatgtatgaaagattgcatttggaggaaaaaaggttgtgctaataaaaaatgtct

SEQ ID NO: 110255 - DNA, 245 bp, Homo sapiens
tggggctgtttgtgtttgggactgcctggccctaaataagggatcagtggaccaacggtggggagtggggttttgaaccttgtcgctaacgcagccgcctgggcacccaaaagttcagataagtaagtctctacctcctgcacacacagcccacctaggtggacatttggttgagtggagaattgaaccactacctcccgggttctggcttctagcttctagcctacaccttgtcccccagccca

SEQ ID NO: 110256 - DNA, 739 bp, Homo sapiens
tgtttggagtacttctatacccagtccataaaagtgtgacaactcctgaactcagttaatcaggtttcaaagtgatttttcctgtggttgagacaatatagggagggaattaggatttggggatttacagtcagactgcctgggctcaaatcctagctctgtgacaacttactgattataaccttagtgtagttaatgaactagacccagttccctcagctatataatgaggactaagtcaacctctgcatataaaaacatgacacagggctgggacataactctcaaagggatactgctgaataggtacaatgctatgcaatgaattgtgaccccccaaattcatgtgtcgaagccctaacccccaatatgatggtatatgaagatgaaacctttgggaggtcattatgtttagatgagatcataaaggtggggtctcataatagttttagtgcccttaagagacaccagagaacttgcttctctctctctctccctggccaatgcaagcacacagcaagaaggaggccatcagcaaactgggaagaggaccctcaccaggaaccacatctgccagcaccttgatcttgaacttctcagcctccagaacggtgagaaataaatgtctgtcgtttaagacacccagtacatggtactttgttatagcagtctaagctaactaagatgtacaattttgttattagcattcttcgtggggcctgagagtcttatgagaaat

SEQ ID NO: 110257 - DNA, 761 bp, Homo sapiens
tgtttggagtacttctatacccagtccataaaagtgtgacaactcctgaactcagttaatcaggtttcaaagtgatttttcctgtggttgagacaatatagggagggaattaggatttggggatttacagtcagactgcctgggctcaaatcctagctctgtgacaacttactgattataaccttagtgtagttaatgaactagacccagttccctcagctatataatgaggactaagtcaacctctgcatataaaaacatgacacagggctgggacataactctcaaagggatactgctgaataggtacaatgctatgcaatgaattgtgaccccccaaattcatgtgtcgaagccctaacccccaatatgatggtatatgaagatgaaacctttgggaggtcattatgtttagatgagatcataaaggtggggtctcataatagttttagtgcccttaagagacaccagagaacttgcttctctctctctctccctggccaatgcaagcacacagcaagaaggaggccatcagcaaactgggaagaggaccctcaccaggaaccacatctgccagcaccttgatcttgaacttctcagcctccagaacggtaaatcagacaccgcctattcaccagctcatctataaaaccccctgcatttcaccgcagaactggaacctattttaccaggacccctctctgcagcagagagctcttctctttctttcgcctattaaacttccactcttaacctcatta

SEQ ID NO: 110258 - DNA, 376 bp, Homo sapiens
cagctgtgccaatagaaaagggctacctggggaccaggcatgtccaccctggaggtttcatcttccctttttttgttaccatgtgtacagtaatagataaatgggcaacatggcacagctcaggcagagaaccagccagcataatagaagattagggtgggggctaccagaaattcgtgccctatgcaaatggcacacctgatataaccagttttttgcaccctaggtaaatcagacaccgcctattcaccagctcatctataaaaccccctgcatttcaccgcagaactggaacctattttaccaggacccctctctgcagcagagagctcttctctttctttcgcctattaaacttccactcttaacctcatta

SEQ ID NO: 110259 - DNA, 707 bp, Homo sapiens
tgtttggagtacttctatacccagtccataaaagtgtgacaactcctgaactcagttaatcaggtttcaaagtgatttttcctgtggttgagacaatatagggagggaattaggatttggggatttacagtcagactgcctgggctcaaatcctagctctgtgacaacttactgattataaccttagtgtagttaatgaactagacccagttccctcagctatataatgaggactaagtcaacctctgcatataaaaacatgacacagggctgggacataactctcaaagggatactgctgaataggtacaatgctatgcaatgaattgtgaccccccaaattcatgtgtcgaagccctaacccccaatatgatggtatatgaagatgaaacttttagtgcccttaagagacaccagagaacttgcttctctctctctctccctggccaatgcaagcacacagcaagaaggaggccatcagcaaactgggaagaggaccctcaccaggaaccacatctgccagcaccttgatcttgaacttctcagcctccagaacggtaaatcagacaccgcctattcaccagctcatctataaaaccccctgcatttcaccgcagaactggaacctattttaccaggacccctctctgcagcagagagctcttctctttctttcgcctattaaacttccactcttaacctcatta

SEQ ID NO: 110260 - DNA, 2143 bp, Homo sapiens
tgtttggagtacttctatacccagtccataaaagtgtgacaactcctgaactcagttaatcaggtttcaaagtgatttttcctgtggttgagacaatatagggagggaattaggatttggggatttacagtcagactgcctgggctcaaatcctagctctgtgacaacttactgattataaccttagtgtagttaatgaactagacccagttccctcagctatataatgaggactaagtcaacctctgcatataaaaacatgacacagggctgggacataactctcaaagggatactgctgaataggtacaatgctatgcaatgaattgtgaccccccaaattcatgtgtcgaagccctaacccccaatatgatggtatatgaagatgaaacctttgggaggtcattatgtttagatgagatcataaaggtggggtctcataatagttttagtgcccttaagagacaccagagaacttgcttctctctctctctccctggccaatgcaagcacacagcaagaaggaggccatcagcaaactgggaagaggaccctcaccaggaaccacatctgccagcaccttgatcttgaacttctcagcctccagaacgatcacaatggaagcagaaatcaccttgctcattgttgacaatagctttgccatgtgcaagtctgcctttgctggggacaatgccctcaagtcatgttcctctccattgtcaggcacccctggcaccagggcatgatggtgggcaggggctaggactcctatgtgggcgatgaggcccagagcaagcagcatcctgatcctgaagcaccccatggagcaggcctcatcaccaactgggaccacatggggaagatctagcaccataccttccgcaatgggctgcacgtggcccctaaggagcaactggtgctgctgaccgaggcccccgagccccaaggccaacagagagaagatgattcagatcatgtttggggccttcaacaccccagtcaagtacagggccattcaggtcaccctgtccctgcatgcctctgtcagtgccattggcaccatgggggactcaggcgatggggtcacccacacttgcccatctccaaggatacagccaccctctcccagtcatcctgtgtttggccctggctggccgggacctggccgactacgtggtgaagatcctcgaggggcccgctacagcttcatcaccacagtgaagtgggggattgtgcgtgacatccaggaaaagctatgctgtgttgccttggacttgcagcaggagatggccactgccgtgtcctcttccttcctggagaagagctacaagctctcccacagcctggtggtcaccatcagcaatgagtggttctggtgtccagaggcgctgtcccagccctccttcctgggcatggaatcttgctgcatccaggagaccatcttgacctccatcatgaagtgtgatgtggatatctgcaaggacctgtacaccaatgtggtgctgtctggcagcattgccatgcacccaagtatcacacacaggatgtagaaggagatcactgccccagcacccaggaccatgaagatcaagatcatggctgtctctgagcacaagtattccatgtggatcagcagctccatcctggcctcactgtccaccttccagccaatgtggatcagcaagcgggagtgccaccagtcaggcccctccactgttcaccgcaaatgcttctaaatggactgtgatgagatacgtagcctgtgctgcctgagtcaattcagaagtacaaatttgtccctggaaaatgtatacatctcatgctagccttaggaaactggaataagcctttgaaaagaaatttgtcaggctgggtgcagtggctcatgcctgtaatcccagcacttttggaggcccaggcgggcggatcacctgaggtcgggagtttgagaccagcctgaccaacatggagaaaccccgtctctactaaaaatacaaaattagccgagcatagtggcacatgcctgtaatcccagctactcgggaggctgaggcaggagaatcgcttaaacctgggaggcagaggtgagctgagatcgcgtcattgcactccagcctgggcaacaagagtgaaactccgtctc

SEQ ID NO: 110261 - DNA, 237 bp, Homo sapiens
gtcagagaagagagaatcttagttgaacatcagaggcattcaatagagaacacagatgggtcattctaatgagtagagataaacaagcctctagtaaatggaggacctgctgaggctcacggactatcagcggcgcctgtactggtgccaccttcgtctgagcagcgaccctatgctgagcgagttcaagagcctggacatcatctagaagaaattggcccacgagggcccacggcc

SEQ ID NO: 110262 - DNA, 735 bp, Homo sapiens
tgcggtagctcacgcctgtaatctcagcactttgggaggctgaggcgggtggatcacgaggtcgggagattgagaccatcctggctaacatggtaaaaccctgtctctactaaaaatattttaaaaattagccaggtgtggcggcgggcgcctctagtcccagctactcgggaggcttaggattacaaacatgaggcaccacacttggccaggacatcatcaaacctattaagaaaattaaatgaaaagctacagactggaataacatatttgcaaatcacatattcaacaaatggcatgtacacaaaacatacaaaaaatcctcaagactcaacactaagaaactaacagcccaattaaaagtagacaaaggtctttgaacagacctttcatcaaagaggacacagagaaatcaaataagcacttgaaaaaatactcaccttatgactattagggaaatacaagctaaaaccatgatgagatacacctactagaatggatataatgaaaaaagaccaagtgctgacaaggatgcagagaaactagaagcattatgcattgctgctgagaatgcaaaatggtacaaccagtctggaatttgtctggcaatttctttctcagtctgtcacccaggctggagtgcagtggtgcgatcatagctcactgcagcctcaacctcctgggcttaagcaatcctcccacctcagcctcctgagtagctaggactacaggcat

SEQ ID NO: 110263 - DNA, 2209 bp, Homo sapiens
aggagctgcaaagtgactgctaatggaggaacgatctgctggctgggggaaatgtggcctgagactagagatgcagagcaggcatctctagaaggagagatgatgccaatagaagccccaggagggaactggccagtgaatacaattttataaagattctcagtactttttctgaaaaaattcctaaaattttcaagggcgcgtctagccctctgcctctttagaggtgagctcagtgctacttctgggttcttaaggcaaatgccctacaaacaccaaagtcttgtattttccactctcagccggcactggctaagtgggattttttttttcccttccctaagtgaaagggacttgttttcaggagaagtgtcctttaaacatccagctaaaactggaagtaattttttgcatgaatggctttttacagctaggtctacagcagaacaaaacttgtattaaactaagtgctactttacatatcttatttcaagggaaatgaaggatttattgtcgtgtaaatgatatacactgatttgtttcctactggacattacatgtccctttatctctaggctgatgttgtgcagcaaactttcaatatctggaaaatcagctggtacctacttcagtgcattattaggatattacgttccctgagaggaattttgccaatgaagtttaggtactgttgtaactgatttccatcccccctccctaagcttctgtactaagtatatgtaaagctattatatcttgtctgatcccatgtgttcatgtgtgtttcccaatgtttgcataaatatattggcaatctgaagggttagctggcttatggcaactgctgaacaatggtatgtttggcatgtgggacacctgatacctgggcacacctgttctgaggccaagctaattttacagattttggaaaagaaaaaacagcagcaacaacaacagtgtggcttgaattaaggaaagtttaacaatgaatacagtattgccaagtcatcatttatgggtggagacgttgaccacagcagttgaggtgctttcaactggatcttatgccctttattttaatcccaattgatagttcctcatttgtattttatgacttagaaatactcctacgtgatgctcgtttgtttttctcccaggcttctggaaagtgctgatcatgattgcttcctatcatttggatcccaaagttgataacttaacataagtgactgaggttttagtagaactgggttttactaatcgtatctcctccttgaggtgctgttcccttcattcctttcctttatgacaggtgaatgcattggctatgctgattttatttgcatcctggcgagtcttggagaatcaatctcgttaaaatgatgactgcatttgcctttggagaagaggtttattgtctaagtaaaactcttatgtgaaggtgtcatttatgtaaaaaaaaaaaaaattctaacttgataagatggccacaggttagaggggtgtgttctcagttgatattaagggatatgttgaaaaggcaagtgcccaccctctattcttcatctcacccttcctttctccccaacctcaaaagaaaacaaaaaattatttttttaaattgtattagtaatttatgtttaatacaaaaggatgatttaatggtatcaccaaaggttgtttctcccattgtgcatgtccttcagtctcggccccatacccatcaccccattcttcaccctcatgcttccatcccaaggcaaacatgtgtcttcatcggaatctatgggtgttgaagttaaatgtgggggcagagatttaacaccatgacactaatacaaatcaaccattcttcactttcaaatggttaatcactacaggaaggcgaactcttttcttggtttttgtttaaaaacattttatacatatatatgtatatatgtgtgtgtatgtatggacataggtatgtatatgcacatgtacatgtatatatgtatatatccatcttcaatataaatatatcataagtgagagttgtaaatactccttggtcatatgtctgtctttctcatagtatcatatcttcaatgttatgttaacaactccatttattgattgatgaaatcgtgtgtagacctgtatcctcctgacatagtttatgtagggtctcttctcaaataaagtataaaacaacaaaaaccttgtttta

SEQ ID NO: 110264 - DNA, 523 bp, Homo sapiens
tgagacagagttttgctcttgttgcccaggctggagtgcaatggtgcaatctcggctcacggcaacctccgcctctcatgttcaagctattatcctgactcagctgggattacaggcacccaccaccacacctggctgattttggtatttttagtagagacggggtttctccatgtcggccaggctggtctcgaactcctgacctcaggtgatccacccgccttgggctcccaaagtgctgggattacagccctgagccaccatggctgacaataataaaaaattttaaagcaaaactaaagatttataaattgtaaaatgcggttgtaacaagtatttactgtaccagtaaatatgaaaaatattaatgtcctcacacacggaggtggcttgtgagtggtgtgagcatttcatggtcagagtttggcagttgggcgagagacaggatggattttaactcgaacatcgcagacacaaaactgaaaaccctgatgcggtgcctgcaccgttgcctcctttcctg

SEQ ID NO: 110265 - DNA, 709 bp, Homo sapiens
gccctacggttgggagtcagagaagagccggtgttccagggacaatgcagcagaggctgagcccaggcctgctgtcctgagaggtggctggatcactgacactttggcagtggtgctggggtttatgtcatgacctgcagctgagcctacttccaatgaccgtgagatctgaaagactgttttgagggcgtagcctctgccatgattgtggggaatgctgtcctgtttcctcccttggccctgctcagcccagcgagaggctgaggcacacgtggctccccgggtgcccacaggcagcgtggctcaccagccgggcccttttccactgagccagaaccccccaaagccttcaatgcaggcaccacggtgagcccacgagaaaccctgacctcaggtgatccacccgccttgggctcccaaagtgctgggattacagccctgagccaccatggctgacaataataaaaaattttaaagcaaaactaaagatttataaattgtaaaatgcggttgtaacaagtatttactgtaccagtaaatatgaaaaatattaatgtcctcacacacggaggtggcttgtgagtggtgtgagcatttcatggtcagagtttggcagttgggcgagagacaggatggattttaactcgaacatcgcagacacaaaactgaaaaccctgatgcggtgcctgcaccgttgcctcctttcctg

SEQ ID NO: 110266 - DNA, 3191 bp, Homo sapiens
gccctacggttgggagtcagagaagagccggtgttccagggacaatgcagcagaggctgagcccaggcctgctgtcctgagaggtggctggatcactgacactttggcagtggtgctggggtttatgtcatgacctgcagctgagcctacttccaatgaccgtgagatctgaaagactgttttgagggcgtagcctctgccatgattgtggggaatgctgtcctgtttcctcccttggccctgctcagcccagcgagaggctgaggcacacgtggctccccgggtgcccacaggcagcgtggctcaccagccgggcccttttccactgagccagaaccccccaaagccttcaatgcaggcaccacggtgagcccacgagaaaccctgcttgccacctcccacacccccacccccaagttcaaaggaaatggtccctgaaccaagggctgagatcagctgtgggtccagctgtcctggggagctgtactggagcccaccacggtgggactgttggtccggcggtgacccccacctccatgtctgtggccgcagctggacaggccactccctgggccacagagatgttttacctctcgcagccctcgggcacacattgagcagatgtgtgtgtgtgtgcgtgtgtgggtgggtgcgcatttgtgtgtgcctgtgtgtgtgcgcatgtggtgtgggtgcacgtgtgtgcacgtgtgtgggtaaacattgtgtgtgcgcatacgtgtgtgggtaaacatttgtatgtgcacgcgtgtgtgggtaaacgtgtgtgcgcacgtatgtatgtgtgtacatttgtatgtgtgtacatttgtatgcatgtgtgcctgtgtgtgtgtgcctgtgtgtgtgggtgcacatttgtgtgtgtgtgtgtgcctgtgtgtgtgtgtgcacgtatgtatgtgtgcacacttgtatgcatgtgtgcctgtgtgtgtgggtgcacatttgtgtgtgtgtgcctgtgtgtgtgggtgcacatttgtgtgtgtgggtgcacatttgtgtgtgtgtgcgcctgtgtgggtgcacatttgtgtgtgtgtgtgcctgtgtgtgtgcctgtgtgtgtgggtgcctgtgtgtgtggggcacatttgtgtgtgtgtgtgcctgtgtgtgggtgcacatttgtgtgtgtgcctctgtgtgtgtgcctgtgtgtgggggtgcacatttgtgtgtgcgcctgtgtgtgggggtgcacatttgtgtgtgcgcctgtgtgtgtgggtgcacatttgtgtgtgtgtgcgcctgtgtgtgtgggtgcctgtgtgtgtgtggggcacatttgtgtgtgtgtgtgtgcctgtgtgtgggtgcacatttgtgtgtgtgcctgtgtgtgtgtgcctgtgtgtgggggtgcacatttgtgtgtgtgtgtgcctgtgtgtgggggtgcacatttgtgtgtgtgtgtgcctgtgtgtgtgggtgcacatttgtgtgtgtgtgtgcctgtgtgtgtgggtgcacatttgtgtgtgtgtgcctgtgtgtgtgggtgcacatttgtgtgtgtgtgtgcctgtgtgtgtgggtgcacatttgtgtgtgtgcctgtgtgtgggtgcacatttgtgtgtgtgtgcctgtgtgtgtgtgcctgtgtgtgtgggtgcacatttgtgtgtgtgtgtgcctgtgtgtgtgggtgcacatttgtgtgtgtgtgtgtgcctgtgtgtgtgttgcaggccctggatgccagacactgaataaacgcaggaagacgtctgtcttcattctcctcgtgggtcgctggtccagaaacaccttgatggaaagtgctctgcaggaacggtgcctctgcctgtggcggggaccctggtgagcggatgggccagccccacgtgtcttccggccactcagcatgcagtgtttccaggggcactaagagaccaaaatcgagatatgattagctgtaggatgtcatctaatcacagatcatcccgaggctaatttatctcccccatgaccataacacatcaaaaagttgactttttgcagctcggctgtgcctcatcttcccacgaagccccgacaggcacatccagtgaggaaccacagtgggagtcctgtggcagggtcaccccacttccgatgccctccagctgcatcttggcacgaaaaaggctgcccagttctcatgccctttcaagtcccgggctggggggtagcagtggaggctggggttaaccgccgtccgtctcaaaggcctcattgtggagctgcaaacacgaacgtccttgaaatgtgaggggacagtgctctggggcaggggctgctcactggttcatggccagaggtgagcgggctctgggtctgggtctgtgaggtgctgtggacgtcgggggtgctcctggggcagggacacagccacggccctcacaccagtggagccgtcttccttcccgaggcagaggcttggccttctcacaccttgggacccttctctcccctgtgctcatgctggaagcacagcgtgagggggcaaaggtcatgggaggcaaaaggctgggctgaggccgaggctctgtggctgtggccggataccaggtcctgtggtggtgtgggcagggcgcgctctctcctctgagcagcctggggctgcgtgtgtgaacagaaacaggcctgccgatttgaagatggtttgaccaagtctcccaaagctgaagagaggtccctgcccatgtcccccgggtggcaatccacagacgcacctgtgtccatcagacggtatcgttgatagggagtctgaagccacccagacgtggtctgttcacgccgtggacaccacggtctgaggcagacggttacagccaccggcataggcgaatctcagccagagagagtgaactgggacaccattcacgtgatgggccagatgggctggcagcggctcgctggagccgtccgggtgggaacgctgtgtctgttggtctggtgctgcttatgtggctggttcaggtctgtcatccgtcaacctgcatatttatcactggtgcattttcatgtatgttgtacctcaattaaaacattttagggccgggcgcggtggctcacgcctgtaatcccagcactgtgggaggcggaggcgggaggatcatgaggtcaggagatcgagaccgtcctggccgacatggtgaaaccccatctctact

SEQ ID NO: 110267 - DNA, 413 bp, Homo sapiens
tcctttaaagaacctagcatatcattaatgtgaaaatctgataaagatatagatacaaaaaagaaaactataattaattttatttataacaatagatgaaaaatttcaattaagatactaggccagggtttggcatagtggctcatgcctgtaatcctagcactttgggagtctgaggcaggtggattgcttgagccaagtaggttgataccagcctgggcaacatggtgaaaccccatctctaccaaaaatgcaagaatcagctgggcgtggtggcgcacgcctgtagtcccagctacttgggagactgaagtgggaggatggcttgagcctgggaggcagagattgcagtgagccatgaccgcaccactgcactccagcctgagcaacagagccagaccctgtctcaaaaa

SEQ ID NO: 110268 - DNA, 432 bp, Homo sapiens
gttcccagcctagactgaaggaatctgtttaattcacagcagtttttgaaattgtttatggtgatagtggaattctggatcttgggagctggtagtcatgtgaaagagaagtaaggactcatgccccatgccccaggagcctccctgtgcaggctgtgtggcgtccaggggtctcatgccactgcagccctccaggtctgtgctggccctccttgttcttcatcctccttcatctctctcttaatttgaagcttctacttccctggttaagctcactttctttaaatcatggtagcaaagcacatggttcaaattcatttccctgctagactaccgctgttattcagggttgggatgactacaggctttattcatgtcatttcactcatgttctttaacccttttagaggtgtacaatgttaatatttttaa

SEQ ID NO: 110269 - DNA, 362 bp, Homo sapiens
atttaaaagctgtgtaggaggaaagagagaatttgacacttcaccctgcctggctgtcaccactcctcttcccctgccttctgctggggctcagacagcttcaggcctcgagcctgagaaagtgcctgcccagaattgggcccaggggttgaatggtggaatctacattgcgaggggacctgcagaatcatcctgtccactgcccatctcgagcgccaccatgcctcagccatctcagacatgggatggggctggagtcgcttcgttcagcaagtatttgtgaggcatgtagccaggcactgagggcagacagcagtgaatgaccagacagacctctgcccttcaggagcttttagtttatt

SEQ ID NO: 110270 - DNA, 373 bp, Homo sapiens
tactactactaaattcgcggccgcgtcgacttttttttttttgtagagacagagtttcaccatgttgcccaggctggtctcaaactcctgagctcaaaccatcacccacctcggcttcccaaagtgctgggattacaggcgtgagccaccacatctgaccgcgggagtccttttacccaaagccacccaacagacccacgcagagacttttaaccagcaatcgtctcagttccctctgaggctgccggctctccctgtgacagcagcccatcttagcccttcctgtgtatctctgctgcctaaaggatgagagtttcctaaagtgtagaactgtgaggggtggagggacattcctctcatgctggcctgaatc

SEQ ID NO: 110271 - DNA, 152 bp, Homo sapiens
cacaggtgccccctggtggctgctttggggagaacggactatgggggccagaggaggagccaggaggggactgagctggtcctagtggaaggaaagtaggcagatttgagatggacattttttttttttttttttttttttgagacagggcc

SEQ ID NO: 110272 - DNA, 482 bp, Homo sapiens
tcttacttacccctgttaaacagggggcaatcactttcaaataccacacattcctgaaggaatcaccctgctctacccctgctcagcatcattgatggaagtgactgctcactgttgaacctgcttcttctcttgattcctcgcagaggcagctgctggctacagacttactaaattgcaagtcgcctcagttggcagaactgccccttctcgacgatttataaactctgtccatcgagagcacactccagagacagggctctggacgggacagaagcaggaatcttggccaaggatacaaagcttccagaactaccaaaggcattgtccgccaataaaataccactctgaatggactcattcatgtcccattaacaaaagtgttgctaataataggtgccaccttacttatgctacaagggcactgtaagaattaatgaaataatgaggtctctggagcacttgcccagagagggcggcca

SEQ ID NO: 110273 - DNA, 955 bp, Homo sapiens
  misc_feature (1)..(3): n is a, c, g, or t
nnngacagggatagcggcagagccggtagcggacggtccttgcattggcctccggcaggcgccccccgggggcgggaagctgcctcacagcatggaaccacaggttactctaaatgtgacttttaaaaatgaaattcaaagctttctggtttctgatccagaaaatacaacttgggctgatatcgaagctatggtgagtgttactttattttgtttctccttggtttaagcatggttattttttccaaaggtagctatttttagcagtgttgtttcatagctgtgaagtctgtcatagttaccatttctgggccttttggaaaattgcttttgatagggtttcagtattcatatatgagatgtgccccagtaaagggaaccaacacataaatttccttttgaacattttagaaagggaaggtaaaattgtttttagtgagataggatttagaaaacctattaattttagaaccagtatgaggagtgaattggtgtgggctccacccaaccagatcccaaggaaatgttctcttgtgtgaggatatgacttgtgttttgcacaaggatataacttgtgttttgcaagagcctatcaattgtttttattgctaggtcagaggttgagtatctcagagttgagcaggaaaaactttcatacctgcttagacagcagttcacctgttccgtttttttgctaaggcttttcctcctcttggtttgccctttgtactcttctgtttttgttcagtttgcagtggtgaatgttttacttcctgtgttgactgtgtttctctctgaaaccctttggtaaaaatctacgtttacctggttatatctgatgataactaaaaagggaaagaaatggtagatcttaaaagatgatctgaggtagttgtctgccttccagcaaatacctgttcatactgtcctatcagtgacagtgagacccgtctca

SEQ ID NO: 110274 - DNA, 607 bp, Homo sapiens
tctagaggatcccagtcactttctacacatttaaaagggaaaagtaaatttaacagttgccttttttcttaatgtcagggcagatcttattttacagtacagtgggggaaatagaaacatgtgaaaggcaaaaggcaggctcctaaattaatgtcagtgaagttcagggtgggcaaatgagtgtgtgtgaggtataggaaatgctgatgacttctttaatgcttgaagtccgttcacaggtatctagccctagaatgcctagaacaggaagaggcagctggtgttctgcaaaacttggacaggggcaaagttgctgaaaaagttttggtttaacccgaagataagtggaaaagagcttgtccatgaacccaggttctcactctgtttacagaagtgtgttgagtacagttggtgaaggaagaggtaacaaaaaatgctaaatattttatccatgaaaatgacttccagaaaaggaagaatatgaaccccagaccgaaggggaaaagatagttaatagtattatctaacctggttggtatttgtaatgaatggtgattttaattagtcattagccatgacgatatttctcccgggtcagctcggttcg

SEQ ID NO: 110275 - DNA, 4794 bp, Homo sapiens
ttccagttgcggcttattacgtcacagtaattgctgtaccaaggtcagaatcgccacctgaggcctgaatatcagcgtaagatagtgtccaaagcagtcttaagaagaggtcccattaccccactctttccgccctaatggaggtctccagtttaggtaaataaaaggattgttgggaggtggagggaaagaactactatttccaacatgcattgcggaacgaaaggccttggccacactgttccttggaaactgtagtcttatggagaggaacatccaataccaaagcgggcacaattctcacggaaatccagtggatagattggagacctccgcgggcttatacatgtcaacagtaatggattggagtgttgttatgttctcctatcttgagagcagagactaggccaaaaaaagatacctacaactcctaggaagactacgattcccatccagccccacgagtctcgggcaagtagtcctctaagcctcacagcatggaaccacaggttactctaaatgtgacttttaaaaatgaaattcaaagctttctggtttctgatccagaaaatacaacttgggctgatatcgaagctatggtaaaagtttcatttgatctgaatactattcaaataaaatacctggatgaggaaaatgaagaggtatccatcaacagtcaaggagaatatgaagaagcgcttaagatggcagttaaacagggaaaccaactgcagatgcaagtccacgaagggcaccatgtcgttgatgaagccccacccccagttgtaggagcaaaacgactagctgccagggcagggaagaagccacttgcacattactcttcactggtgagagtcttgggatcagacatgaagaccccagaggatcctgcagtgcagtcgtttccacttgttccatgtgacacagaccagcctcaagacaagcccccagactggttcacaagctacctggagacgttcagagaacaagtggttaacgaaacggttgagaagcttgaacagaaattacatgaaaagcttgtcctccagaacccatccttgggttcttgtccctcagaagtctcaatgcctacttcagaagaaacattgtttttgccagaaaaccagttcagctggcatattgcttgcaacaactgccaaagaaggattgttggtgtccgctaccagtgtagcctatgcccatcctacaatatctgtgaagattgtgaagcagggccatatggccatgacactaaccacgtcctgctgaagttgcggagacctgttgtgggctcctctgaaccgttctgtcactcaaagtactctactcctcgtcttcctgctgctctggaacaagtcaggctccagaaacaggttgataagaactttcttaaagcagaaaagcaaaggttgcgagctgagaagaaacaacgtaaagcagaggtcaaggaacttaaaaagcagcttaaactccataggaaaattcacctgtggaattcaatccatggactccagagccccaagtctcctttaggccgacctgagagcttgctccagtctaataccctgatgctccctttgcagccctgtacctccgttatgccaatgctcagtgcagcatttgtggatgagaatttgcctgatgggactcaccttcagccaggaaccaagtttatcaaacactggaggatgaaaaatacaggaaatgtaaagtggagtgcagacacaaagctcaagttcatgtggggaaacctgactttggcttccacagaaaagaaggatgttttggttccctgcctcaaggccggccatgtgggagttgtatctgtggagttcattgccccagccttggagggaacgtatacttcccattggcgtctttctcacaaaggccagcaatttgggcctcgggtctggtgcagtatcatagtagatcctttcccctccgaagagagccctgataacattgaaaagggcatgatcagctcaagcaaaactgatgatctcacctgccagcaagaggaaacttttcttctggctaaagaagaaagacagcttggtgaagtgactgagcagacagaagggacagcagcctgcatcccacagaaggcaaaaaatgttgccagtgagagggagctctacatcccatctgtggatcttctgactgcccaggacctgctgtcctttgagctgttggatataaacattgttcaagagttggagagagtgccccacaacacccctgtggatgtgactccctgcatgtctcctctgccacatgacagtcctttaatagagaagccaggcttggggcagatagaggaagagaatgaaggggcaggatttaaagcacttcctgattctatggtgtcagtaaagaggaaggctgagaacattgcttctgtggaggaagcagaagaagacctgagtgggacccagtttgtgtgtgagacagtaatccgatcccttaccttggatgctgccccagaccacaaccctccttgcagacagaagtccttgcagatgacatttgccttgcctgaaggaccacttggaaatgagaaggaggagattatccatatcgctgaggaagaagctgtcatggaggaggaggaggatgaggaggatgaggaggaggaggatgagctcaaagatgaagttcaaagtcagtcctctgcttcctcagaggattacatcatcatcctgcctgagtgctttgataccagccgccccctgggggattctatgtacagctctgcgctctcacagccaggcctggagcgaggtgctgaaggcaagcctggggttgaggctgggcaggaaccagctgaggctggggaaagactccctggaggggagaaccagccacaggagcacagcataagtgacatcctcacgacctcacagactctggaaacagtgcccctaatcccagaggtagtggagcttccaccgtcactgcccaggagctctccttgtgtacatcatcatggttccccaggagtggatttaccagttaccataccagaagtttcttcagtccctgatcagatcagaggagagcccagaggctcatcaggacttgtaaacagcagacagaagagctatgaccactcaaggcaccatcatgggagcagcattgctggaggactggtgaagggggctttgtctgttgctgcctctgcatacaaggccctgtttgctgggccaccagtcactgcacagccaataatttctgaagatcagacagcagccctgatggcccatctctttgaaatgggattctgtgacaggcagctgaacctacggctgctgaagaaacacaattacaatatcctgcaggttgtgacagaacttcttcagttaaacaacaacgactggtacagccaacgctattgaggagtgaccttgtattaaataactgcctgctgctcagagatgatctttattctgtcattggggtatgggatagaagcccttgcttatttttaatctgatgaatctgtatagagcccatcgttgagttaccaagacaatacctgctacagtattttggggagcaaactaaagaccagaacttaaattttcactttagacattggatgaatagtatgaagacagtttttcagttgatttggataaaactattttagtgcattgacaagtgtaacttcaacttcatatagaaccatttttctttctgcttttattgaaactgagtatttttctttggctaatgtggattttttatggggatatctgttaattttcaggttttgaaagacattaacctcggaagttgtttttaagaattattctcataattcttattctcataatttctgtaatccacctcaagcttcatagttatttggcattgaaataacacccagagcatgatagaaatgttgttactcttcctctctcaaggagaaagtaattttcctgcaatacttaataattggcaccgttgctttctaaagactccatggtgcattcaagagtatccaacttcaagggaatctccgcatttcaatgaaaggaggaagagtgtgctgataaacctaccagcacctattgagcaatgtctattatagtaattttgcatacatttttatttaagggaaaaaatataggtattgtgaaatattttgctaatcttatagaaaaggaaaaaatcccgttatttaaagggaaaagtaaatttaacagttgccttttttcttaatgtcagggcagatcttattttacagtacagtgggggaaatagaaacatgtgaaaggcaaaaggcaggctcctaaattaatgtcagtgaagttcagggtgggcaaatgagtgtgtgtgaggtataggaaatgctgatgacttctttaatgcttgaagtccgttcacaggtatctagccctagaatgcctagaacaggaagaggcagctggtgttctgcaaaacttggacaggggcaaagttgctgaaaaagttttggtttaacccgaagataagtggaaaagagcttgtccatgaacccaggttctcactctgtttacagaagtgtgttgagtacagttggtgaaggaagaggtaacaaaaaatgctaaatattttatccatgaaaatgacttccagaaaaggaagaatatgaaccccagaccgaaggggaaaagatagttaatagtattatctaacctggttggtatttgtaatgaatggtgattttaattagtcattagccataatgatgtttatttacagtataactcctgaatgctacttaaataaaccaggattcaaactgca

SEQ ID NO: 110276 - DNA, 4779 bp, Homo sapiens
ttccagttgcggcttattacgtcacagtaattgctgtaccaaggtcagaatcgccacctgaggcctgaatatcagcgtaagatagtgtccaaagcagtcttaagaagaggtcccattaccccactctttccgccctaatggaggtctccagtttaggtaaataaaaggattgttgggaggtggagggaaagaactactatttccaacatgcattgcggaacgaaaggccttggccacactgttccttggaaactgtagtcttatggagaggaacatccaataccaaagcgggcacaattctcacggaaatccagtggatagattggagacctccgcgggcttatacatgtcaacagtaatggattggagtgttgttatgttctcctatcttgagagcagagactaggccaaaaaaagatacctacaactcctaggaagactacgattcccatccagccccacgagtctcgggcaagtagtcctctaagcctcacagcatggaaccacaggttactctaaatgtgacttttaaaaatgaaattcaaagctttctggtttctgatccagaaaatacaacttgggctgatatcgaagctatggtaaaagtttcatttgatctgaatactattcaaataaaatacctggatgaggaaaatgaagaggtaaaatatattatggcacttaatatgatggcagttaaacagggaaaccaactgcagatgcaagtccacgaagggcaccatgtcgttgatgaagccccacccccagttgtaggagcaaaacgactagctgccagggcagggaagaagccacttgcacattactcttcactggtgagagtcttgggatcagacatgaagaccccagaggatcctgcagtgcagtcgtttccacttgttccatgtgacacagaccagcctcaagacaagcccccagactggttcacaagctacctggagacgttcagagaacaagtggttaacgaaacggttgagaagcttgaacagaaattacatgaaaagcttgtcctccagaacccatccttgggttcttgtccctcagaagtctcaatgcctacttcagaagaaacattgtttttgccagaaaaccagttcagctggcatattgcttgcaacaactgccaaagaaggattgttggtgtccgctaccagtgtagcctatgcccatcctacaatatctgtgaagattgtgaagcagggccatatggccatgacactaaccacgtcctgctgaagttgcggagacctgttgtgggctcctctgaaccgttctgtcactcaaagtactctactcctcgtcttcctgctgctctggaacaagtcaggctccagaaacaggttgataagaactttcttaaagcagaaaagcaaaggttgcgagctgagaagaaacaacgtaaagcagaggtcaaggaacttaaaaagcagcttaaactccataggaaaattcacctgtggaattcaatccatggactccagagccccaagtctcctttaggccgacctgagagcttgctccagtctaataccctgatgctccctttgcagccctgtacctccgttatgccaatgctcagtgcagcatttgtggatgagaatttgcctgatgggactcaccttcagccaggaaccaagtttatcaaacactggaggatgaaaaatacaggaaatgtaaagtggagtgcagacacaaagctcaagttcatgtggggaaacctgactttggcttccacagaaaagaaggatgttttggttccctgcctcaaggccggccatgtgggagttgtatctgtggagttcattgccccagccttggagggaacgtatacttcccattggcgtctttctcacaaaggccagcaatttgggcctcgggtctggtgcagtatcatagtagatcctttcccctccgaagagagccctgataacattgaaaagggcatgatcagctcaagcaaaactgatgatctcacctgccagcaagaggaaacttttcttctggctaaagaagaaagacagcttggtgaagtgactgagcagacagaagggacagcagcctgcatcccacagaaggcaaaaaatgttgccagtgagagggagctctacatcccatctgtggatcttctgactgcccaggacctgctgtcctttgagctgttggatataaacattgttcaagagttggagagagtgccccacaacacccctgtggatgtgactccctgcatgtctcctctgccacatgacagtcctttaatagagaagccaggcttggggcagatagaggaagagaatgaaggggcaggatttaaagcacttcctgattctatggtgtcagtaaagaggaaggctgagaacattgcttctgtggaggaagcagaagaagacctgagtgggacccagtttgtgtgtgagacagtaatccgatcccttaccttggatgctgccccagaccacaaccctccttgcagacagaagtccttgcagatgacatttgccttgcctgaaggaccacttggaaatgagaaggaggagattatccatatcgctgaggaagaagctgtcatggaggaggaggaggatgaggaggatgaggaggaggaggatgagctcaaagatgaagttcaaagtcagtcctctgcttcctcagaggattacatcatcatcctgcctgagtgctttgataccagccgccccctgggggattctatgtacagctctgcgctctcacagccaggcctggagcgaggtgctgaaggcaagcctggggttgaggctgggcaggaaccagctgaggctggggaaagactccctggaggggagaaccagccacaggagcacagcataagtgacatcctcacgacctcacagactctggaaacagtgcccctaatcccagaggtagtggagcttccaccgtcactgcccaggagctctccttgtgtacatcatcatggttccccaggagtggatttaccagttaccataccagaagtttcttcagtccctgatcagatcagaggagagcccagaggctcatcaggacttgtaaacagcagacagaagagctatgaccactcaaggcaccatcatgggagcagcattgctggaggactggtgaagggggctttgtctgttgctgcctctgcatacaaggccctgtttgctgggccaccagtcactgcacagccaataatttctgaagatcagacagcagccctgatggcccatctctttgaaatgggattctgtgacaggcagctgaacctacggctgctgaagaaacacaattacaatatcctgcaggttgtgacagaacttcttcagttaaacaacaacgactggtacagccaacgctattgaggagtgaccttgtattaaataactgcctgctgctcagagatgatctttattctgtcattggggtatgggatagaagcccttgcttatttttaatctgatgaatctgtatagagcccatcgttgagttaccaagacaatacctgctacagtattttggggagcaaactaaagaccagaacttaaattttcactttagacattggatgaatagtatgaagacagtttttcagttgatttggataaaactattttagtgcattgacaagtgtaacttcaacttcatatagaaccatttttctttctgcttttattgaaactgagtatttttctttggctaatgtggattttttatggggatatctgttaattttcaggttttgaaagacattaacctcggaagttgtttttaagaattattctcataattcttattctcataatttctgtaatccacctcaagcttcatagttatttggcattgaaataacacccagagcatgatagaaatgttgttactcttcctctctcaaggagaaagtaattttcctgcaatacttaataattggcaccgttgctttctaaagactccatggtgcattcaagagtatccaacttcaagggaatctccgcatttcaatgaaaggaggaagagtgtgctgataaacctaccagcacctattgagcaatgtctattatagtaattttgcatacatttttatttaagggaaaaaatataggtattgtgaaatattttgctaatcttatagaaaaggaaaaaatcccgttatttaaagggaaaagtaaatttaacagttgccttttttcttaatgtcagggcagatcttattttacagtacagtgggggaaatagaaacatgtgaaaggcaaaaggcaggctcctaaattaatgtcagtgaagttcagggtgggcaaatgagtgtgtgtgaggtataggaaatgctgatgacttctttaatgcttgaagtccgttcacaggtatctagccctagaatgcctagaacaggaagaggcagctggtgttctgcaaaacttggacaggggcaaagttgctgaaaaagttttggtttaacccgaagataagtggaaaagagcttgtccatgaacccaggttctcactctgtttacagaagtgtgttgagtacagttggtgaaggaagaggtaacaaaaaatgctaaatattttatccatgaaaatgacttccagaaaaggaagaatatgaaccccagaccgaaggggaaaagatagttaatagtattatctaacctggttggtatttgtaatgaatggtgattttaattagtcattagccataatgatgtttatttacagtataactcctgaatgctacttaaataaaccaggattcaaactgca

SEQ ID NO: 110277 - DNA, 5022 bp, Homo sapiens
ttccagttgcggcttattacgtcacagtaattgctgtaccaaggtcagaatcgccacctgaggcctgaatatcagcgtaagatagtgtccaaagcagtcttaagaagaggtcccattaccccactctttccgccctaatggaggtctccagtttaggtaaataaaaggattgttgggaggtggagggaaagaactactatttccaacatgcattgcggaacgaaaggccttggccacactgttccttggaaactgtagtcttatggagaggaacatccaataccaaagcgggcacaattctcacggaaatccagtggatagattggagacctccgcgggcttatacatgtcaacagtaatggattggagtgttgttatgttctcctatcttgagagcagagactaggccaaaaaaagatacctacaactcctaggaagactacgattcccatccagccccacgagtctcgggcaagtagtcctctaagcctcacagcatggaaccacaggttactctaaatgtgacttttaaaaatgaaattcaaagctttctggtttctgatccagaaaatacaacttgggctgatatcgaagctatggtaaaagtttcatttgatctgaatactattcaaataaaatacctggatgaggaaaatgaagaggtatccatcaacagtcaaggagaatatgaagaagcgcttaagatggcagttaaacagggaaaccaactgcagatgcaagtccacgaagggcaccatgtcgttgatgaagccccacccccagttgtaggagcaaaacgactagctgccagggcagggaagaagccacttgcacattactcttcactggtgagagtcttgggatcagacatgaagaccccagaggatcctgcagtgcagtcgtttccacttgttccatgtgacacagaccagcctcaagacaagcccccagactggttcacaagctacctggagacgttcagagaacaagtggttaacgaaacggttgagaagcttgaacagaaattacatgaaaagcttgtcctccagaacccatccttgggttcttgtccctcagaagtctcaatgcctacttcagaagaaacattgtttttgccagaaaaccagttcagctggcatattgcttgcaacaactgccaaagaaggattgttggtgtccgctaccagtgtagcctatgcccatcctacaatatctgtgaagattgtgaagcagggccatatggccatgacactaaccacgtcctgctgaagttgcggagacctgttgtgggctcctctgaaccgttctgtcactcaaagtactctactcctcgtcttcctgctgctctggaacaagtcaggctccagaaacaggttgataagaactttcttaaagcagaaaagcaaaggttgcgagctgagaagaaacaacgtaaagcagaggtcaaggaacttaaaaagcagcttaaactccataggaaaattcacctgtggaattcaatccatggactccagagccccaagtctcctttaggccgacctgagagcttgctccagtctaataccctgatgctccctttgcagccctgtacctccgttatgccaatgctcagtgcagcatttgtggatgagaatttgcctgatgggactcaccttcagccaggaaccaagtttatcaaacactggaggatgaaaaatacaggaaatgtaaagtggagtgcagacacaaagctcaagttcatgtggggaaacctgactttggcttccacagaaaagaaggatgttttggttccctgcctcaaggccggccatgtgggagttgtatctgtggagttcattgccccagccttggagggaacgtatacttcccattggcgtctttctcacaaaggccagcaatttgggcctcgggtctggtgcagtatcatagtagatcctttcccctccgaagagagccctgataacattgaaaagggcatgatcagctcaagcaaaactgatgatctcacctgccagcaagaggaaacttttcttctggctaaagaagaaagacagcttggtgaagtgactgagcagacagaagggacagcagcctgcatcccacagaaggcaaaaaatgttgccagtgagagggagctctacatcccatctgtggatcttctgactgcccaggacctgctgtcctttgagctgttggatataaacattgttcaagagttggagagagtgccccacaacacccctgtggatgtgactccctgcatgtctcctctgccacatgacagtcctttaatagagaagccaggcttggggcagatagaggaagagaatgaaggggcaggatttaaagcacttcctgattctatggtgtcagtaaagaggaaggctgagaacattgcttctgtggaggaagcagaagaagacctgagtgggacccagtttgtgtgtgagacagtaatccgatcccttaccttggatgctgccccagaccacaaccctccttgcagacagaagtccttgcagatgacatttgccttgcctgaaggaccacttggaaatgagaaggaggagattatccatatcgctgaggaagaagctgtcatggaggaggaggaggatgaggaggatgaggaggaggaggatgagctcaaagatgaagttcaaagtcagtcctctgcttcctcagaggattacatcatcatcctgcctgagtgctttgataccagccgccccctgggggattctatgtacagctctgcgctctcacagccaggcctggagcgaggtgctgaaggcaagcctggggttgaggctgggcaggaaccagctgaggctggggaaagactccctggaggggagaaccagccacaggagcacagcataagtgacatcctcacgacctcacagactctggaaacagtgcccctaatcccagaggtagtggagcttccaccgtcactgcccaggagctctccttgtgtacatcatcatggttccccaggagtggatttaccagttaccataccagaagtttcttcagtccctgatcagatcagaggagagcccagaggctcatcaggacttgtaaacagcagacagaagagctatgaccactcaaggcaccatcatgggagcagcattgctggaggactggtgaagggggctttgtctgttgctgcctctgcatacaaggccctgtttgctgggccaccagtcactgcacagccaataatttctgaagatcagacagcagccctgatggcccatctctttgaaatgggattctgtgacaggcagctgaacctacggctgctgaagaaacacaattacaatatcctgcaggttgtgacagaacttcttcagttaaacaacaacgactggtacagccaacgctattgaggagtgaccttgtattaaataactgcctgctgctcagagatgatctttattctgtcattggggtatgggatagaagcccttgcttatttttaatctgatgaatctgtatagagcccatcgttgagttaccaagacaatacctgctacagtattttggggagcaaactaaagaccagaacttaaattttcactttagacattggatgaatagtatgaagacagtttttcagttgatttggataaaactattttagtgcattgacaagtgtaacttcaacttcatatagaaccatttttctttctgcttttattgaaactgagtatttttctttggctaatgtggattttttatggggatatctgttaattttcaggttttgaaagacattaacctcggaagttgtttttaagaattattctcataattcttattctcataatttctgtaatccacctcaagcttcatagttatttggcattgaaataacacccagagcatgatagaaatgttgttactcttcctctctcaaggagaaagtaattttcctgcaatacttaataattggcaccgttgctttctaaagactccatggtgcattcaagagtatccaacttcaagggaatctccgcatttcaatgaaaggaggaagagtgtgctgataaacctaccagcacctattgagcaatgtctattatagtaattttgcatacatttttatttaagggaaaaaatataggtattgtgaaatattttgctaatcttatagaaaaggaaaaaatcccgttatttaaagggaaaagtaaatttaacagttgccttttttcttaatgtcagggcagatcttattttacagtacagtgggggaaatagaaacatgtgaaaggcaaaaggcaggctcctaaattaatgtcagtgaagttcagggtgggcaaatgagtgtgtgtgaggtataggaaatgctgatgacttctttaatgcttgaagtccgttcacaggtatctagccctagaatgcctagaacaggaagaggcagctggtgttctgcaaaacttggacaggggcaaagttgctgaaaaagttttggtttaacccgaagataagtggaaaagagcttgtccatgaacccaggttctcactctgtttacagaagtgtgttgagtacagttggtgaaggaagaggtaacaaaaaatgctaaatattttatccatgaaaatgacttccagaaaaggaagaatatgaaccccagaccgaaggggaaaagatagttaatagtattatctaacctggttggtatttgtaatgaatggtgattttaattagtcattagccataatgatgtttatttacagtataactcctgaatgctacttaaataaaccaggattcaaactgcaagccagccaggccgttcattatttaaaacgttttaatcggggcttccgggtagaaggtggagcggcagggtgtaattgggttgatgggtgggacctgtcttgaccatcggagttttataatcgagggccaggagggcccgggttgctctcctggttatgtatgtacttgtacataaccacctaaagaatggtgaaataaatgttcttggaaattcctaaaaaaaaaaa

SEQ ID NO: 110278 - DNA, 4423 bp, Homo sapiens
cttggcttgtaaaggcctctggtggagacagtaatcaaagctcaggttgccaggtctgtttcattaaagggattttgttgaggctgaaaaaaaaatcgacgtggaggaaaagctaacttgtgccaagcaaagcctcacagcatggaaccacaggttactctaaatgtgacttttaaaaatgaaattcaaagctttctggtttctgatccagaaaatacaacttgggctgatatcgaagctatggtaaaagtttcatttgatctgaatactattcaaataaaatacctggatgaggaaaatgaagaggtaaaatatattatggcacttaatatgatggcagttaaacagggaaaccaactgcagatgcaagtccacgaagggcaccatgtcgttgatgaagccccacccccagttgtaggagcaaaacgactagctgccagggcagggaagaagccacttgcacattactcttcactggtgagagtcttgggatcagacatgaagaccccagaggatcctgcagtgcagtcgtttccacttgttccatgtgacacagaccagcctcaagacaagcccccagactggttcacaagctacctggagacgttcagagaacaagtggttaacgaaacggttgagaagcttgaacagaaattacatgaaaagcttgtcctccagaacccatccttgggttcttgtccctcagaagtctcaatgcctacttcagaagaaacattgtttttgccagaaaaccagttcagctggcatattgcttgcaacaactgccaaagaaggattgttggtgtccgctaccagtgtagcctatgcccatcctacaatatctgtgaagattgtgaagcagggccatatggccatgacactaaccacgtcctgctgaagttgcggagacctgttgtgggctcctctgaaccgttctgtcactcaaagtactctactcctcgtcttcctgctgctctggaacaagtcaggctccagaaacaggttgataagaactttcttaaagcagaaaagcaaaggttgcgagctgagaagaaacaacgtaaagcagaggtcaaggaacttaaaaagcagcttaaactccataggaaaattcacctgtggaattcaatccatggactccagagccccaagtctcctttaggccgacctgagagcttgctccagtctaataccctgatgctccctttgcagccctgtacctccgttatgccaatgctcagtgcagcatttgtggatgagaatttgcctgatgggactcaccttcagccaggaaccaagtttatcaaacactggaggatgaaaaatacaggaaatgtaaagtggagtgcagacacaaagctcaagttcatgtggggaaacctgactttggcttccacagaaaagaaggatgttttggttccctgcctcaaggccggccatgtgggagttgtatctgtggagttcattgccccagccttggagggaacgtatacttcccattggcgtctttctcacaaaggccagcaatttgggcctcgggtctggtgcagtatcatagtagatcctttcccctccgaagagagccctgataacattgaaaagggcatgatcagctcaagcaaaactgatgatctcacctgccagcaagaggaaacttttcttctggctaaagaagaaagacagcttggtgaagtgactgagcagacagaagggacagcagcctgcatcccacagaaggcaaaaaatgttgccagtgagagggagctctacatcccatctgtggatcttctgactgcccaggacctgctgtcctttgagctgttggatataaacattgttcaagagttggagagagtgccccacaacacccctgtggatgtgactccctgcatgtctcctctgccacatgacagtcctttaatagagaagccaggcttggggcagatagaggaagagaatgaaggggcaggatttaaagcacttcctgattctatggtgtcagtaaagaggaaggctgagaacattgcttctgtggaggaagcagaagaagacctgagtgggacccagtttgtgtgtgagacagtaatccgatcccttaccttggatgctgccccagaccacaaccctccttgcagacagaagtccttgcagatgacatttgccttgcctgaaggaccacttggaaatgagaaggaggagattatccatatcgctgaggaagaagctgtcatggaggaggaggaggatgaggaggatgaggaggaggaggatgagctcaaagatgaagttcaaagtcagtcctctgcttcctcagaggattacatcatcatcctgcctgagtgctttgataccagccgccccctgggggattctatgtacagctctgcgctctcacagccaggcctggagcgaggtgctgaaggcaagcctggggttgaggctgggcaggaaccagctgaggctggggaaagactccctggaggggagaaccagccacaggagcacagcataagtgacatcctcacgacctcacagactctggaaacagtgcccctaatcccagaggtagtggagcttccaccgtcactgcccaggagctctccttgtgtacatcatcatggttccccaggagtggatttaccagttaccataccagaagtttcttcagtccctgatcagatcagaggagagcccagaggctcatcaggacttgtaaacagcagacagaagagctatgaccactcaaggcaccatcatgggagcagcattgctggaggactggtgaagggggctttgtctgttgctgcctctgcatacaaggccctgtttgctgggccaccagtcactgcacagccaataatttctgaagatcagacagcagccctgatggcccatctctttgaaatgggattctgtgacaggcagctgaacctacggctgctgaagaaacacaattacaatatcctgcaggttgtgacagaacttcttcagttaaacaacaacgactggtacagccaacgctattgaggagtgaccttgtattaaataactgcctgctgctcagagatgatctttattctgtcattggggtatgggatagaagcccttgcttatttttaatctgatgaatctgtatagagcccatcgttgagttaccaagacaatacctgctacagtattttggggagcaaactaaagaccagaacttaaattttcactttagacattggatgaatagtatgaagacagtttttcagttgatttggataaaactattttagtgcattgacaagtgtaacttcaacttcatatagaaccatttttctttctgcttttattgaaactgagtatttttctttggctaatgtggattttttatggggatatctgttaattttcaggttttgaaagacattaacctcggaagttgtttttaagaattattctcataattcttattctcataatttctgtaatccacctcaagcttcatagttatttggcattgaaataacacccagagcatgatagaaatgttgttactcttcctctctcaaggagaaagtaattttcctgcaatacttaataattggcaccgttgctttctaaagactccatggtgcattcaagagtatccaacttcaagggaatctccgcatttcaatgaaaggaggaagagtgtgctgataaacctaccagcacctattgagcaatgtctattatagtaattttgcatacatttttatttaagggaaaaaatataggtattgtgaaatattttgctaatcttatagaaaaggaaaaaatcccgttatttaaagggaaaagtaaatttaacagttgccttttttcttaatgtcagggcagatcttattttacagtacagtgggggaaatagaaacatgtgaaaggcaaaaggcaggctcctaaattaatgtcagtgaagttcagggtgggcaaatgagtgtgtgtgaggtataggaaatgctgatgacttctttaatgcttgaagtccgttcacaggtatctagccctagaatgcctagaacaggaagaggcagctggtgttctgcaaaacttggacaggggcaaagttgctgaaaaagttttggtttaacccgaagataagtggaaaagagcttgtccatgaacccaggttctcactctgtttacagaagtgtgttgagtacagttggtgaaggaagaggtaacaaaaaatgctaaatattttatccatgaaaatgacttccagaaaaggaagaatatgaaccccagaccgaaggggaaaagatagttaatagtattatctaacctggttggtatttgtaatgaatggtgattttaattagtcattagccataatgatgtttatttacagtataactcctgaatgctacttaaataaaccaggattcaaactgca

SEQ ID NO: 110279 - DNA, 4578 bp, Homo sapiens
ttccagttgcggcttattacgtcacagtaattgctgtaccaaggtcagaatcgccacctgaggcctgaatatcagcgtaagatagtgtccaaagcagtcttaagaagaggtcccattaccccactctttccgccctaatggaggtctccagtttaggtaaataaaaggattgttgggaggtggagggaaagaactactatttccaacatgcattgcggaacgaaaggccttggccacactgttccttggaaactgtagtcttatggagaggaacatccaataccaaagcgggcacaattctcacggaaatccagtggatagattggagacctccgcgggcttatacatgtcaacagtaatggattggagtgttgttatgttctcctatcttgagagcagagactaggccaaaaaaagatacctacaactcctaggaagactacgattcccatccagccccacgagtctcgggcaagtagtcctctaagatggcagttaaacagggaaaccaactgcagatgcaagtccacgaagggcaccatgtcgttgatgaagccccacccccagttgtaggagcaaaacgactagctgccagggcagggaagaagccacttgcacattactcttcactggtgagagtcttgggatcagacatgaagaccccagaggatcctgcagtgcagtcgtttccacttgttccatgtgacacagaccagcctcaagacaagcccccagactggttcacaagctacctggagacgttcagagaacaagtggttaacgaaacggttgagaagcttgaacagaaattacatgaaaagcttgtcctccagaacccatccttgggttcttgtccctcagaagtctcaatgcctacttcagaagaaacattgtttttgccagaaaaccagttcagctggcatattgcttgcaacaactgccaaagaaggattgttggtgtccgctaccagtgtagcctatgcccatcctacaatatctgtgaagattgtgaagcagggccatatggccatgacactaaccacgtcctgctgaagttgcggagacctgttgtgggctcctctgaaccgttctgtcactcaaagtactctactcctcgtcttcctgctgctctggaacaagtcaggctccagaaacaggttgataagaactttcttaaagcagaaaagcaaaggttgcgagctgagaagaaacaacgtaaagcagaggtcaaggaacttaaaaagcagcttaaactccataggaaaattcacctgtggaattcaatccatggactccagagccccaagtctcctttaggccgacctgagagcttgctccagtctaataccctgatgctccctttgcagccctgtacctccgttatgccaatgctcagtgcagcatttgtggatgagaatttgcctgatgggactcaccttcagccaggaaccaagtttatcaaacactggaggatgaaaaatacaggaaatgtaaagtggagtgcagacacaaagctcaagttcatgtggggaaacctgactttggcttccacagaaaagaaggatgttttggttccctgcctcaaggccggccatgtgggagttgtatctgtggagttcattgccccagccttggagggaacgtatacttcccattggcgtctttctcacaaaggccagcaatttgggcctcgggtctggtgcagtatcatagtagatcctttcccctccgaagagagccctgataacattgaaaagggcatgatcagctcaagcaaaactgatgatctcacctgccagcaagaggaaacttttcttctggctaaagaagaaagacagcttggtgaagtgactgagcagacagaagggacagcagcctgcatcccacagaaggcaaaaaatgttgccagtgagagggagctctacatcccatctgtggatcttctgactgcccaggacctgctgtcctttgagctgttggatataaacattgttcaagagttggagagagtgccccacaacacccctgtggatgtgactccctgcatgtctcctctgccacatgacagtcctttaatagagaagccaggcttggggcagatagaggaagagaatgaaggggcaggatttaaagcacttcctgattctatggtgtcagtaaagaggaaggctgagaacattgcttctgtggaggaagcagaagaagacctgagtgggacccagtttgtgtgtgagacagtaatccgatcccttaccttggatgctgccccagaccacaaccctccttgcagacagaagtccttgcagatgacatttgccttgcctgaaggaccacttggaaatgagaaggaggagattatccatatcgctgaggaagaagctgtcatggaggaggaggaggatgaggaggatgaggaggaggaggatgagctcaaagatgaagttcaaagtcagtcctctgcttcctcagaggattacatcatcatcctgcctgagtgctttgataccagccgccccctgggggattctatgtacagctctgcgctctcacagccaggcctggagcgaggtgctgaaggcaagcctggggttgaggctgggcaggaaccagctgaggctggggaaagactccctggaggggagaaccagccacaggagcacagcataagtgacatcctcacgacctcacagactctggaaacagtgcccctaatcccagaggtagtggagcttccaccgtcactgcccaggagctctccttgtgtacatcatcatggttccccaggagtggatttaccagttaccataccagaagtttcttcagtccctgatcagatcagaggagagcccagaggctcatcaggacttgtaaacagcagacagaagagctatgaccactcaaggcaccatcatgggagcagcattgctggaggactggtgaagggggctttgtctgttgctgcctctgcatacaaggccctgtttgctgggccaccagtcactgcacagccaataatttctgaagatcagacagcagccctgatggcccatctctttgaaatgggattctgtgacaggcagctgaacctacggctgctgaagaaacacaattacaatatcctgcaggttgtgacagaacttcttcagttaaacaacaacgactggtacagccaacgctattgaggagtgaccttgtattaaataactgcctgctgctcagagatgatctttattctgtcattggggtatgggatagaagcccttgcttatttttaatctgatgaatctgtatagagcccatcgttgagttaccaagacaatacctgctacagtattttggggagcaaactaaagaccagaacttaaattttcactttagacattggatgaatagtatgaagacagtttttcagttgatttggataaaactattttagtgcattgacaagtgtaacttcaacttcatatagaaccatttttctttctgcttttattgaaactgagtatttttctttggctaatgtggattttttatggggatatctgttaattttcaggttttgaaagacattaacctcggaagttgtttttaagaattattctcataattcttattctcataatttctgtaatccacctcaagcttcatagttatttggcattgaaataacacccagagcatgatagaaatgttgttactcttcctctctcaaggagaaagtaattttcctgcaatacttaataattggcaccgttgctttctaaagactccatggtgcattcaagagtatccaacttcaagggaatctccgcatttcaatgaaaggaggaagagtgtgctgataaacctaccagcacctattgagcaatgtctattatagtaattttgcatacatttttatttaagggaaaaaatataggtattgtgaaatattttgctaatcttatagaaaaggaaaaaatcccgttatttaaagggaaaagtaaatttaacagttgccttttttcttaatgtcagggcagatcttattttacagtacagtgggggaaatagaaacatgtgaaaggcaaaaggcaggctcctaaattaatgtcagtgaagttcagggtgggcaaatgagtgtgtgtgaggtataggaaatgctgatgacttctttaatgcttgaagtccgttcacaggtatctagccctagaatgcctagaacaggaagaggcagctggtgttctgcaaaacttggacaggggcaaagttgctgaaaaagttttggtttaacccgaagataagtggaaaagagcttgtccatgaacccaggttctcactctgtttacagaagtgtgttgagtacagttggtgaaggaagaggtaacaaaaaatgctaaatattttatccatgaaaatgacttccagaaaaggaagaatatgaaccccagaccgaaggggaaaagatagttaatagtattatctaacctggttggtatttgtaatgaatggtgattttaattagtcattagccataatgatgtttatttacagtataactcctgaatgctacttaaataaaccaggattcaaactgca

SEQ ID NO: 110280 - DNA, 4388 bp, Homo sapiens
  misc_feature (1)..(3): n is a, c, g, or t
nnngacagggatagcggcagagccggtagcggacggtccttgcattggcctccggcaggcgccccccgggggcgggaagctgcctcacagcatggaaccacaggttactctaaatgtgacttttaaaaatgaaattcaaagctttctggtttctgatccagaaaatacaacttgggctgatatcgaagctatggtaaaagtttcatttgatctgaatactattcaaataaaatacctggatgaggaaaatgaagaggtatccatcaacagtcaaggagaatatgaagaagcgcttaagatggcagttaaacagggaaaccaactgcagatgcaagtccacgaagggcaccatgtcgttgatgaagccccacccccagttgtaggagcaaaacgactagctgccagggcagggaagaagccacttgcacattactcttcactggtgagagtcttgggatcagacatgaagaccccagaggatcctgcagtgcagtcgtttccacttgttccatgtgacacagaccagcctcaagacaagcccccagactggttcacaagctacctggagacgttcagagaacaagtggttaacgaaacggttgagaagcttgaacagaaattacatgaaaagcttgtcctccagaacccatccttgggttcttgtccctcagaagtctcaatgcctacttcagaagaaacattgtttttgccagaaaaccagttcagctggcatattgcttgcaacaactgccaaagaaggattgttggtgtccgctaccagtgtagcctatgcccatcctacaatatctgtgaagattgtgaagcagggccatatggccatgacactaaccacgtcctgctgaagttgcggagacctgttgtgggctcctctgaaccgttctgtcactcaaagtactctactcctcgtcttcctgctgctctggaacaagtcaggctccagaaacaggttgataagaactttcttaaagcagaaaagcaaaggttgcgagctgagaagaaacaacgtaaagcagaggtcaaggaacttaaaaagcagcttaaactccataggaaaattcacctgtggaattcaatccatggactccagagccccaagtctcctttaggccgacctgagagcttgctccagtctaataccctgatgctccctttgcagccctgtacctccgttatgccaatgctcagtgcagcatttgtggatgagaatttgcctgatgggactcaccttcagccaggaaccaagtttatcaaacactggaggatgaaaaatacaggaaatgtaaagtggagtgcagacacaaagctcaagttcatgtggggaaacctgactttggcttccacagaaaagaaggatgttttggttccctgcctcaaggccggccatgtgggagttgtatctgtggagttcattgccccagccttggagggaacgtatacttcccattggcgtctttctcacaaaggccagcaatttgggcctcgggtctggtgcagtatcatagtagatcctttcccctccgaagagagccctgataacattgaaaagggcatgatcagctcaagcaaaactgatgatctcacctgccagcaagaggaaacttttcttctggctaaagaagaaagacagcttggtgaagtgactgagcagacagaagggacagcagcctgcatcccacagaaggcaaaaaatgttgccagtgagagggagctctacatcccatctgtggatcttctgactgcccaggacctgctgtcctttgagctgttggatataaacattgttcaagagttggagagagtgccccacaacacccctgtggatgtgactccctgcatgtctcctctgccacatgacagtcctttaatagagaagccaggcttggggcagatagaggaagagaatgaaggggcaggatttaaagcacttcctgattctatggtgtcagtaaagaggaaggctgagaacattgcttctgtggaggaagcagaagaagacctgagtgggacccagtttgtgtgtgagacagtaatccgatcccttaccttggatgctgccccagaccacaaccctccttgcagacagaagtccttgcagatgacatttgccttgcctgaaggaccacttggaaatgagaaggaggagattatccatatcgctgaggaagaagctgtcatggaggaggaggaggatgaggaggatgaggaggaggaggatgagctcaaagatgaagttcaaagtcagtcctctgcttcctcagaggattacatcatcatcctgcctgagtgctttgataccagccgccccctgggggattctatgtacagctctgcgctctcacagccaggcctggagcgaggtgctgaaggcaagcctggggttgaggctgggcaggaaccagctgaggctggggaaagactccctggaggggagaaccagccacaggagcacagcataagtgacatcctcacgacctcacagactctggaaacagtgcccctaatcccagaggtagtggagcttccaccgtcactgcccaggagctctccttgtgtacatcatcatggttccccaggagtggatttaccagttaccataccagaagtttcttcagtccctgatcagatcagaggagagcccagaggctcatcaggacttgtaaacagcagacagaagagctatgaccactcaaggcaccatcatgggagcagcattgctggaggactggtgaagggggctttgtctgttgctgcctctgcatacaaggccctgtttgctgggccaccagtcactgcacagccaataatttctgaagatcagacagcagccctgatggcccatctctttgaaatgggattctgtgacaggcagctgaacctacggctgctgaagaaacacaattacaatatcctgcaggttgtgacagaacttcttcagttaaacaacaacgactggtacagccaacgctattgaggagtgaccttgtattaaataactgcctgctgctcagagatgatctttattctgtcattggggtatgggatagaagcccttgcttatttttaatctgatgaatctgtatagagcccatcgttgagttaccaagacaatacctgctacagtattttggggagcaaactaaagaccagaacttaaattttcactttagacattggatgaatagtatgaagacagtttttcagttgatttggataaaactattttagtgcattgacaagtgtaacttcaacttcatatagaaccatttttctttctgcttttattgaaactgagtatttttctttggctaatgtggattttttatggggatatctgttaattttcaggttttgaaagacattaacctcggaagttgtttttaagaattattctcataattcttattctcataatttctgtaatccacctcaagcttcatagttatttggcattgaaataacacccagagcatgatagaaatgttgttactcttcctctctcaaggagaaagtaattttcctgcaatacttaataattggcaccgttgctttctaaagactccatggtgcattcaagagtatccaacttcaagggaatctccgcatttcaatgaaaggaggaagagtgtgctgataaacctaccagcacctattgagcaatgtctattatagtaattttgcatacatttttatttaagggaaaaaatataggtattgtgaaatattttgctaatcttatagaaaaggaaaaaatcccgttatttaaagggaaaagtaaatttaacagttgccttttttcttaatgtcagggcagatcttattttacagtacagtgggggaaatagaaacatgtgaaaggcaaaaggcaggctcctaaattaatgtcagtgaagttcagggtgggcaaatgagtgtgtgtgaggtataggaaatgctgatgacttctttaatgcttgaagtccgttcacaggtatctagccctagaatgcctagaacaggaagaggcagctggtgttctgcaaaacttggacaggggcaaagttgctgaaaaagttttggtttaacccgaagataagtggaaaagagcttgtccatgaacccaggttctcactctgtttacagaagtgtgttgagtacagttggtgaaggaagaggtaacaaaaaatgctaaatattttatccatgaaaatgacttccagaaaaggaagaatatgaaccccagaccgaaggggaaaagatagttaatagtattatctaacctggttggtatttgtaatgaatggtgattttaattagtcattagccataatgatgtttatttacagtataactcctgaatgctacttaaataaaccaggattcaaactgca

SEQ ID NO: 110281 - DNA, 2833 bp, Homo sapiens
  misc_feature (32)..(32): n is a, c, g, or t
ctccgaggatttcgcgttatccgtacaagcanaactgatgatctcacctgccagcaagaggaaacttttcttctggctaaagaagaaagacagcttggtgaagtgactgagcagacagaagggacagcagcctgcatcccacagaaggcaaaaaatgttgccagtgagagggagctctacatcccatctgtggatcttctgactgcccaggacctgctgtcctttgagctgttggatataaacattgttcaagagttggagagagtgccccacaacacccctgtggatgtgactccctgcatgtctcctctgccacatgacagtcctttaatagagaagccaggcttggggcagatagaggaagagaatgaaggggcaggatttaaagcacttcctgattctatggtgtcagtaaagaggaaggctgagaacattgcttctgtggaggaagcagaagaagacctgagtgggacccagtttgtgtgtgagacagtaatccgatcccttaccttggatgctgccccagaccacaaccctccttgcagacagaagtccttgcagatgacatttgccttgcctgaaggaccacttggaaatgagaaggaggagattatccatatcgctgaggaagaagctgtcatggaggaggaggaggatgaggaggatgaggaggaggaggatgagctcaaagatgaagttcaaagtcagtcctctgcttcctcagaggattacatcatcatcctgcctgagtgctttgataccagccgccccctgggggattctatgtacagctctgcgctctcacagccaggcctggagcgaggtgctgaaggcaagcctggggttgaggctgggcaggaaccagctgaggctggggaaagactccctggaggggagaaccagccacaggagcacagcataagtgacatcctcacgacctcacagactctggaaacagtgcccctaatcccagaggtagtggagcttccaccgtcactgcccaggagctctccttgtgtacatcatcatggttccccaggagtggatttaccagttaccataccagaagtttcttcagtccctgatcagatcagaggagagcccagaggctcatcaggacttgtaaacagcagacagaagagctatgaccactcaaggcaccatcatgggagcagcattgctggaggactggtgaagggggctttgtctgttgctgcctctgcatacaaggccctgtttgctgggccaccagtcactgcacagccaataatttctgaagatcagacagcagccctgatggcccatctctttgaaatgggattctgtgacaggcagctgaacctacggctgctgaagaaacacaattacaatatcctgcaggttgtgacagaacttcttcagttaaacaacaacgactggtacagccaacgctattgaggagtgaccttgtattaaataactgcctgctgctcagagatgatctttattctgtcattggggtatgggatagaagcccttgcttatttttaatctgatgaatctgtatagagcccatcgttgagttaccaagacaatacctgctacagtattttggggagcaaactaaagaccagaacttaaattttcactttagacattggatgaatagtatgaagacagtttttcagttgatttggataaaactattttagtgcattgacaagtgtaacttcaacttcatatagaaccatttttctttctgcttttattgaaactgagtatttttctttggctaatgtggattttttatggggatatctgttaattttcaggttttgaaagacattaacctcggaagttgtttttaagaattattctcataattcttattctcataatttctgtaatccacctcaagcttcatagttatttggcattgaaataacacccagagcatgatagaaatgttgttactcttcctctctcaaggagaaagtaattttcctgcaatacttaataattggcaccgttgctttctaaagactccatggtgcattcaagagtatccaacttcaagggaatctccgcatttcaatgaaaggaggaagagtgtgctgataaacctaccagcacctattgagcaatgtctattatagtaattttgcatacatttttatttaagggaaaaaatataggtattgtgaaatattttgctaatcttatagaaaaggaaaaaatcccgttatttaaagggaaaagtaaatttaacagttgccttttttcttaatgtcagggcagatcttattttacagtacagtgggggaaatagaaacatgtgaaaggcaaaaggcaggctcctaaattaatgtcagtgaagttcagggtgggcaaatgagtgtgtgtgaggtataggaaatgctgatgacttctttaatgcttgaagtccgttcacaggtatctagccctagaatgcctagaacaggaagaggcagctggtgttctgcaaaacttggacaggggcaaagttgctgaaaaagttttggtttaacccgaagataagtggaaaagagcttgtccatgaacccaggttctcactctgtttacagaagtgtgttgagtacagttggtgaaggaagaggtaacaaaaaatgctaaatattttatccatgaaaatgacttccagaaaaggaagaatatgaaccccagaccgaaggggaaaagatagttaatagtattatctaacctggttggtatttgtaatgaatggtgattttaattagtcattagccataatgatgtttatttacagtataactcctgaatgctacttaaataaaccaggattcaaactgca

SEQ ID NO: 110282 - DNA, 4968 bp, Homo sapiens
ttccagttgcggcttattacgtcacagtaattgctgtaccaaggtcagaatcgccacctgaggcctgaatatcagcgtaagatagtgtccaaagcagtcttaagaagaggtcccattaccccactctttccgccctaatggaggtctccagtttaggtaaataaaaggattgttgggaggtggagggaaagaactactatttccaacatgcattgcggaacgaaaggccttggccacactgttccttggaaactgtagtcttatggagaggaacatccaataccaaagcgggcacaattctcacggaaatccagtggatagattggagacctccgcgggcttatacatgtcaacagtaatggattggagtgttgttatgttctcctatcttgagagcagagactaggccaaaaaaagatacctacaactcctaggaagactacgattcccatccagccccacgagtctcgggcaagtagtcctctaagcctcacagcatggaaccacaggttactctaaatgtgacttttaaaaatgaaattcaaagctttctggtttctgatccagaaaatacaacttgggctgatatcgaagctatggtaaaagtttcatttgatctgaatactattcaaataaaatacctggatgaggaaaatgaagaggtatccatcaacagtcaaggagaatatgaagaagcgcttaagatggcagttaaacagggaaaccaactgcagatgcaagtccacgaagggcaccatgtcgttgatgaagccccacccccagttgtaggagcaaaacgactagctgccagggcagggaagaagccacttgcacattactcttcactggtgagagtcttgggatcagacatgaagaccccagaggatcctgcagtgcagtcgtttccacttgttccatgtgacacagaccagcctcaagacaagcccccagactggttcacaagctacctggagacgttcagagaacaagtggttaacgaaacggttgagaagcttgaacagaaattacatgaaaagcttgtcctccagaacccatccttgggttcttgtccctcagaagtctcaatgcctacttcagaagaaacattgtttttgccagaaaaccagttcagctggcatattgcttgcaacaactgccaaagaaggattgttggtgtccgctaccagtgtagcctatgcccatcctacaatatctgtgaagattgtgaagcagggccatatggccatgacactaaccacgtcctgctgaagttgcggagacctgttgtgggctcctctgaaccgttctgtcactcaaagtactctactcctcgtcttcctgctgctctggaacaagtcaggctccagaaacaggttgataagaactttcttaaagcagaaaagcaaaggttgcgagctgagaagaaacaacgtaaagcagaggtcaaggaacttaaaaagcagcttaaactccataggaaaattcacctgtggaattcaatccatggactccagagccccaagtctcctttaggccgacctgagagcttgctccagtctaataccctgatgctccctttgcagccctgtacctccgttatgccaatgctcagtgcagcatttgtggatgagaatttgcctgatgggactcaccttcagccaggaaccaagtttatcaaacactggaggatgaaaaatacaggaaatgtaaagtggagtgcagacacaaagctcaagttcatgtggggaaacctgactttggcttccacagaaaagaaggatgttttggttccctgcctcaaggccggccatgtgggagttgtatctgtggagttcattgccccagccttggagggaacgtatacttcccattggcgtctttctcacaaaggccagcaatttgggcctcgggtctggtgcagtatcatagtagatcctttcccctccgaagagagccctgataacattgaaaagggcatgatcagctcaagcaaaactgatgatctcacctgccagcaagaggaaacttttcttctggctaaagaagaaagacagcttggtgaagtgactgagcagacagaagggacagcagcctgcatcccacagaaggcaaaaaatgttgccagtgagagggagctctacatcccatctgtggatcttctgactgcccaggacctgctgtcctttgagctgttggatataaacattgttcaagagttggagagagtgccccacaacacccctgtggatgtgactccctgcatgtctcctctgccacatgacagtcctttaatagagaagccaggcttggggcagatagaggaagagaatgaaggggcaggatttaaagcacttcctgattctatggtgtcagtaaagaggaaggctgagaacattgcttctgtggaggaagcagaagaagacctgagtgggacccagtttgtgtgtgagacagtaatccgatcccttaccttggatgctgccccagaccacaaccctccttgcagacagaagtccttgcagatgacatttgccttgcctgaaggaccacttggaaatgagaaggaggagattatccatatcgctgaggaagaagctgtcatggaggaggaggaggatgaggaggatgaggaggaggaggatgagctcaaagatgaagttcaaagtcagtcctctgcttcctcagaggattacatcatcatcctgcctgagtgctttgataccagccgccccctgggggattctatgtacagctctgcgctctcacagccaggcctggagcgaggtgctgaaggcaagcctggggttgaggctgggcaggaaccagctgaggctggggaaagactccctggaggggagaaccagccacaggagcacagcataagtgacatcctcacgacctcacagactctggaaacagtgcccctaatcccagaggtagtggagcttccaccgtcactgcccaggagctctccttgtgtacatcatcatggttccccaggagtggatttaccagttaccataccagaagtttcttcagtccctgatcagatcagaggagagcccagaggctcatcaggacttgtaaacagcagacagaagagctatgaccactcaaggcaccatcatgggagcagcattgctggaggactggtgaagggggctttgtctgttgctgcctctgcatacaaggccctgtttgctgggccaccagtcactgcacagccaataatttctgaagatcagacagcagccctgatggcccatctctttgaaatgggattctgtgacaggcagctgaacctacggctgctgaagaaacacaattacaatatcctgcaggttgtgacagaacttcttcagttaaacaacaacgactggtacagccaacgctattgaggagtgaccttgtattaaataactgcctgctgctcagagatgatctttattctgtcattggggtatgggatagaagcccttgcttatttttaatctgatgaatctgtatagagcccatcgttgagttaccaagacaatacctgctacagtattttggggagcaaactaaagaccagaacttaaattttcactttagacattggatgaatagtatgaagacagtttttcagttgatttggatttctttctgcttttattgaaactgagtatttttctttggctaatgtggattttttatggggatatctgttaattttcaggttttgaaagacattaacctcggaagttgtttttaagaattattctcataattcttattctcataatttctgtaatccacctcaagcttcatagttatttggcattgaaataacacccagagcatgatagaaatgttgttactcttcctctctcaaggagaaagtaattttcctgcaatacttaataattggcaccgttgctttctaaagactccatggtgcattcaagagtatccaacttcaagggaatctccgcatttcaatgaaaggaggaagagtgtgctgataaacctaccagcacctattgagcaatgtctattatagtaattttgcatacatttttatttaagggaaaaaatataggtattgtgaaatattttgctaatcttatagaaaaggaaaaaatcccgttatttaaagggaaaagtaaatttaacagttgccttttttcttaatgtcagggcagatcttattttacagtacagtgggggaaatagaaacatgtgaaaggcaaaaggcaggctcctaaattaatgtcagtgaagttcagggtgggcaaatgagtgtgtgtgaggtataggaaatgctgatgacttctttaatgcttgaagtccgttcacaggtatctagccctagaatgcctagaacaggaagaggcagctggtgttctgcaaaacttggacaggggcaaagttgctgaaaaagttttggtttaacccgaagataagtggaaaagagcttgtccatgaacccaggttctcactctgtttacagaagtgtgttgagtacagttggtgaaggaagaggtaacaaaaaatgctaaatattttatccatgaaaatgacttccagaaaaggaagaatatgaaccccagaccgaaggggaaaagatagttaatagtattatctaacctggttggtatttgtaatgaatggtgattttaattagtcattagccataatgatgtttatttacagtataactcctgaatgctacttaaataaaccaggattcaaactgcaagccagccaggccgttcattatttaaaacgttttaatcggggcttccgggtagaaggtggagcggcagggtgtaattgggttgatgggtgggacctgtcttgaccatcggagttttataatcgagggccaggagggcccgggttgctctcctggttatgtatgtacttgtacataaccacctaaagaatggtgaaataaatgttcttggaaattcctaaaaaaaaaaa

SEQ ID NO: 110283 - DNA, 867 bp, Homo sapiens
tctagaggatcccagtcactttctacacatttaaaagggaaaagtaaatttaacagttgccttttttcttaatgtcagggcagatcttattttacagtacagtgggggaaatagaaacatgtgaaaggcaaaaggcaggctcctaaattaatgtcagtgaagttcagggtgggcaaatgagtgtgtgtgaggtataggaaatgctgatgacttctttaatgcttgaagtccgttcacaggtatctagccctagaatgcctagaacaggaagaggcagctggtgttctgcaaaacttggacaggggcaaagttgctgaaaaagttttggtttaacccgaagataagtggaaaagagcttgtccatgaacccaggttctcactctgtttacagaagtgtgttgagtacagttggtgaaggaagaggtaacaaaaaatgctaaatattttatccatgaaaatgacttccagaaaaggaagaatatgaaccccagaccgaaggggaaaagatagttaatagtattatctaacctggttggtatttgtaatgaatggtgattttaattagtcattagccataatgatgtttatttacagtataactcctgaatgctacttaaataaaccaggattcaaactgcaagccagccaggccgttcattatttaaaacgttttaatcggggcttccgggtagaaggtggagcggcagggtgtaattgggttgatgggtgggacctgtcttgaccatcggagttttataatcgagggccaggagggcccgggttgctctcctggttatgtatgtacttgtacataaccacctaaagaatggtgaaataaatgttcttggaaattcctaaaaaaaaaaa

SEQ ID NO: 110284 - DNA, 3205 bp, Homo sapiens
ttccagttgcggcttattacgtcacagtaattgctgtaccaaggtcagaatcgccacctgaggcctgaatatcagcgtaagatagtgtccaaagcagtcttaagaagaggtcccattaccccactctttccgccctaatggaggtctccagtttaggtaaataaaaggattgttgggaggtggagggaaagaactactatttccaacatgcattgcggaacgaaaggccttggccacactgttccttggaaactgtagtcttatggagaggaacatccaataccaaagcgggcacaattctcacggaaatccagtggatagattggagacctccgcgggcttatacatgtcaacagtaatggattggagtgttgttatgttctcctatcttgagagcagagactaggccaaaaaaagatacctacaactcctaggaagactacgattcccatccagccccacgagtctcgggcaagtagtcctctaagcctcacagcatggaaccacaggttactctaaatgtgacttttaaaaatgaaattcaaagctttctggtttctgatccagaaaatacaacttgggctgatatcgaagctatggtaaaagtttcatttgatctgaatactattcaaataaaatacctggatgaggaaaatgaagaggtatccatcaacagtcaaggagaatatgaagaagcgcttaagatggcagttaaacagggaaaccaactgcagatgcaagtccacgaagggcaccatgtcgttgatgaagccccacccccagttgtaggagcaaaacgactagctgccagggcagggaagaagccacttgcacattactcttcactggtgagagtcttgggatcagacatgaagaccccagaggatcctgcagtgcagtcgtttccacttgttccatgtgacacagaccagcctcaagacaagcccccagactggttcacaagctacctggagacgttcagagaacaagtggttaacgaaacggttgagaagcttgaacagaaattacatgaaaagcttgtcctccagaacccatccttgggttcttgtccctcagaagtctcaatgcctacttcagaagaaacattgtttttgccagaaaaccagttcagctggcatattgcttgcaacaactgccaaagaaggattgttggtgtccgctaccagtgtagcctatgcccatcctacaatatctgtgaagattgtgaagcagggccatatggccatgacactaaccacgtcctgctgaagttgcggagacctgttgtgggctcctctgaaccgttctgtcactcaaagtactctactcctcgtcttcctgctgctctggaacaagtcaggctccagaaacaggttgataagaactttcttaaagcagaaaagcaaaggttgcgagctgagaagaaacaacgtaaagcagaggtcaaggaacttaaaaagcagcttaaactccataggaaaattcacctgtggaattcaatccatggactccagagccccaagtctcctttaggccgacctgagagcttgctccagtctaataccctgatgctccctttgcagccctgtacctccgttatgccaatgctcagtgcagcatttgtggatgagaatttgcctgatgggactcaccttcagccaggaaccaagtttatcaaacactggaggatgaaaaatacaggaaatgtaaagtggagtgcagacacaaagctcaagttcatgtggggaaacctgactttggcttccacagaaaagaaggatgttttggttccctgcctcaaggccggccatgtgggagttgtatctgtggagttcattgccccagccttggagggaacgtatacttcccattggcgtctttctcacaaaggccagcaatttgggcctcgggtctggtgcagtatcatagtagatcctttcccctccgaagagagccctgataacattgaaaagggcatgatcagctcaagcaaaactgatgatctcacctgccagcaagaggaaacttttcttctggctaaagaagaaagacagcttggtgaagtgactgagcagacagaagggacagcagcctgcatcccacagaaggcaaaaaatgttgccagtgagagggagctctacatcccatctgtggatcttctgactgcccaggacctgctgtcctttgagctgttggatataaacattgttcaagagttggagagagtgccccacaacacccctgtggatgtgactccctgcatgtctcctctgccacatgacagtcctttaatagagaagccaggcttggggcagatagaggaagagaatgaaggggcaggatttaaagcacttcctgattctatggtgtcagtaaagaggaaggctgagaacattgcttctgtggaggaagcagaagaagacctgagtgggacccagtttgtgtgtgagacagtaatccgatcccttaccttggatgctgccccagaccacaaccctccttgcagacagaagtccttgcagatgacatttgccttgcctgaaggaccacttggaaatgagaaggaggagattatccatatcgctgaggaagaagctgtcatggaggaggaggaggatgaggaggatgaggaggaggaggatgagctcaaagatgaagttcaaagtcagtcctctgcttcctcagaggattacatcatcatcctgcctgagtgctttgataccagccgccccctgggggattctatgtacagctctgcgctctcacagccaggcctggagcgaggtgctgaaggcaagcctggggttgaggctgggcaggaaccagctgaggctggggaaagactccctggaggggagaaccagccacaggagcacagcataagtgacatcctcacgacctcacagactctggaaacagtgcccctaatcccagaggtagtggagcttccaccgtcactgcccaggtaccactcacagccccttcagctggggtgttcttcagaggtgaaataaagagaggaatcgacctgatctcaaaacctgttttttcctcagtatggaaagagactattttccatagcaaagtctgaatttagatgaataaaagttgtatttcccagtatttgtggattctggatttaaagaaatatttgttttagttggccttaaattatctgagtatagtctgtctgcttatattttga

SEQ ID NO: 110285 - DNA, 2392 bp, Homo sapiens
ttccagttgcggcttattacgtcacagtaattgctgtaccaaggtcagaatcgccacctgaggcctgaatatcagcgtaagatagtgtccaaagcagtcttaagaagaggtcccattaccccactctttccgccctaatggaggtctccagtttaggtaaataaaaggattgttgggaggtggagggaaagaactactatttccaacatgcattgcggaacgaaaggccttggccacactgttccttggaaactgtagtcttatggagaggaacatccaataccaaagcgggcacaattctcacggaaatccagtggatagattggagacctccgcgggcttatacatgtcaacagtaatggattggagtgttgttatgttctcctatcttgagagcagagactaggccaaaaaaagatacctacaactcctaggaagactacgattcccatccagccccacgagtctcgggcaagtagtcctctaagcctcacagcatggaaccacaggttactctaaatgtgacttttaaaaatgaaattcaaagctttctggtttctgatccagaaaatacaacttgggctgatatcgaagctatggtaaaagtttcatttgatctgaatactattcaaataaaatacctggatgaggaaaatgaagaggtatccatcaacagtcaaggagaatatgaagaagcgcttaagatggcagttaaacagggaaaccaactgcagatgcaagtccacgaagggcaccatgtcgttgatgaagccccacccccagttgtaggagcaaaacgactagctgccagggcagggaagaagccacttgcacattactcttcactggtgagagtcttgggatcagacatgaagaccccagaggatcctgcagtgcagtcgtttccacttgttccatgtgacacagaccagcctcaagacaagcccccagactggttcacaagctacctggagacgttcagagaacaagtggttaacgaaacggttgagaagcttgaacagaaattacatgaaaagcttgtcctccagaacccatccttgggttcttgtccctcagaagtctcaatgcctacttcagaagaaacattgtttttgccagaaaaccagttcagctggcatattgcttgcaacaactgccaaagaaggattgttggtgtccgctaccagtgtagcctatgcccatcctacaatatctgtgaagattgtgaagcagggccatatggccatgacactaaccacgtcctgctgaagttgcggagacctgttgtgggctcctctgaaccgttctgtcactcaaagtactctactcctcgtcttcctgctgctctggaacaagtcaggctccagaaacaggttgataagaactttcttaaagcagaaaagcaaaggttgcgagctgagaagaaacaacgtaaagcagaggtcaaggaacttaaaaagcagcttaaactccataggaaaattcacctgtggaattcaatccatggactccagagccccaagtctcctttaggccgacctgagagcttgctccagtctaataccctgatgctccctttgcagccctgtacctccgttatgccaatgctcagtgcagcatttgtggatgagaatttgcctgatgggactcaccttcagccaggaaccaagtttatcaaacactggaggatgaaaaatacaggaaatgtaaagtggagtgcagacacaaagctcaagttcatgtggggaaacctgactttggcttccacagaaaagaaggatgttttggttccctgcctcaaggccggccatgtgggagttgtatctgtggagttcattgccccagccttggagggaacgtatacttcccattggcgtctttctcacaaaggccagcaatttgggcctcgggtctggtgcagtatcatagtagatcctttcccctccgaagagagccctgataacattgaaaagggcatgatcagctcaagcaaaactgatgatctcacctgccagcaagaggaaacttttcttctggctaaagaagaaagacagcttggtgaagtgactgagcagacagaagggacagcagcctgcatcccacagaaggcaaaaaatgttgccagtgagagggagctctacatcccatctgtggatcttctgactgcccaggacctgctgtcctttgagctgttggatataaacattgttcaagagttggagagagtgccccacaacacccctgtgggtaagaatgtcactcatttcatcttgttcgtcttactaataggcacaaaagtaccacagcctagacactggtagtgttttattctgaggaaatggcaaggatttctcccacagtaggatagtaaagcagcaatcatggatccgtt

SEQ ID NO: 110286 - DNA, 179 bp, Homo sapiens
gggatcttatttctccagtgatatgggctttaataattcaaaatagtgtttagcttatttgtgtggtggtttaaatatatttgataactgaatattctaagaagacttgcagcatctgagatggagttgagaaatggagaagcaacactgaagaatatctcagagataactttcactta

SEQ ID NO: 110287 - DNA, 211 bp, Homo sapiens
agcccagaggctcatcaggacttgtaaacagcagacagaagagctatgaccactcaaggtaacaaccttgtgcagtctcttttttcagaagcaggtggatattcttgtattccttctgcttaaaagagcctctcacagtatgtacccatcttcagagagcagagaaggggagcctttgttccgtcttattcttgtttcttctaaaggcttt

SEQ ID NO: 110288 - DNA, 336 bp, Homo sapiens
cctatgcccatcctacaatatctgtgaagattgtgaagcagggccatatggccatgacactaaccacgtcctgctgaagttgcggagacctgttgtgggctcctctgaaccgttctgtcactcaaagtactctactcctcgtcttcctgctgctctggaacaagtcaggtaaaaccctctacatggagatgcttattctctgattgacttcttggttctggtgacagggtatgaatcacaaaactacagatagtctccttagttctgctcattttcaattgatgtgcaataatgaagacagttatccaaagttagtgaaatagaaataatagctat

SEQ ID NO: 110289 - DNA, 753 bp, Homo sapiens
cagtgccttctgaaacttctaacaaattgtcacctcctctaacacataccatattgctattattcaaggaaagactgatatcaagagaaaaatccaagttaaatgtgcaaagcctccatcaaatttgaagtcattctcaacttttatggaccagtgaaaagcaacaaaacatgttctcccttaatctttgctcattactaaacaagacacctcaggtcaattttacagcagagagtcagggtgccatggaacacagtgtgggtggatggcctctgagcaatctgctttggtagctgggtctttgtaaatggcctaaaattatgacacttcctcagtgtttgttgctgcccacacgtgcaccatgaatcaaggaacaatcacttcacatgccagagtgctggcaatgaatattaatcacaaagaaatggaacaaacagtgacggtactcaattttccgaataccattctacaaactgaagccatcctagaaattctggagagaaaacaccatggtaaccctttttcttatgttaactgacaatattcaagttattgaaagaatatataaatgcaaaaaatgagatatctattgccctaaagatttcatttgatttggcttttaaaatgagatctttaaagcattttctctttatctcagaataaaggccagttttgttcagtaacagttctaaattgaacatcctgccatccatcaatggtgtgtactacagctgcctatgctttttcctccag

SEQ ID NO: 110290 - DNA, 331 bp, Homo sapiens
gaggccaaggtgggcagattgcttgagcccaggagctccagaccagactgggccacatagcaaaacccctctcgacaaaaaaatacaaaattaaccgggcatcatggtacatgcctttagtcccagctatggggagactgagagatgggaggatcatttagcctcagaggtggaggctgtggtaagccaatcatgccactgcactccaacctgggcaacagagtgacaccctgtctggaaaaaaaaaaagaaacaaagttgcagatgccacatttggagacaataacaaccagtctaggacagagagtttaagtaaagaaactttagatta

SEQ ID NO: 110291 - DNA, 296 bp, Homo sapiens
tgggagtatatgctgggtaggtgaagaggagaaagggcatttcagtcagaaagaatgcttagtagctggaagtggttataaattaggttctgcaggatggaggtaaaagggaggctgagtctaaagggtcttctatgctatgcacagggctttgacctatatttcatggatgattgaaaaccaccaaagagtttgaaacgtaagatatgtgataagagtctgttttggaaacatttgcacagtgtcagtaaacgaaagaggctgaaaggcagtggtcaagaaagcaaaagcccaga

SEQ ID NO: 110292 - DNA, 721 bp, Homo sapiens
tccagcctgggcgacagggcgagactccatctcaaaaaaaaaaaaaaaaaaaaaaagatagaaattgggtggggaattacagaaggctgtgaacactgcatcttagatgtgggattgttcttcactgtagtgagagctaagaaaagaggcagcacttggcacccttaatcacccaaattaagcaattattctgatcccccattcgaaatgaattggtatcatgagaacaaagaggcaacatgcaattgccaaatatttggcctatattttattgtttcctttctttctccagtactggcagcagcccatgatgctaagaaatatcccgtttggttatgaagttaatgtggagattaaaagtcattccctgttctacccacaccctttttcttgtgtatagcatgtgactgagctgattggaaggcatatagcccagtggccaagcacttgggcctcagtgtgatggctgacacatgtttctgactctgtccatttctattttgttgtggacaagccttggctttctcagctgtcaaatgggggtgacaacagctctacatatagtcctgtagcaattaaatgaaagcatttagggccaggcatggtggcttatggcggtaatcccagcacttagggaggccaaggcaggacaaagtgggctcttgtctttgagccctagagtttgagaccagcctgggcaacatagtgaggccctgtctct

SEQ ID NO: 110293 - DNA, 372 bp, Homo sapiens
cagcggtcgcggactccaggagctccagacctggggtcgtggtgagattcgttgattgactgcgcgatggtggctgagttgcaaccaaatgggtttcatcaccttaaatggttttgaaccaatgaagctatattcccttaaagagacggacagcccatcgtgtgaactatagagtttgtgaacaaatttatattgggttcatagtggcatcatgcacacagactcctgcgagttcccctaagttcttagaggactgctttaccttttgatctgagagttgcaaagttccgtaaagaatggccctgtggataagcgctaagtcaagagacagcgattggacagaatttgtgaaggaattcgccgccagatcac

SEQ ID NO: 110294 - DNA, 264 bp, Homo sapiens
gcagcacgcaagggtgagccctgccccagatgtctcaccccacccttcgtgaagaacttgtaactagccttgcctatgcccatcactcatcacttttctggccagtctctaccttccagaaaaggaaaaatcagaaatctgcaggctttctcagcccctttgtggtgcagacagcatagttttttgttttttgtctttttttgagacgaggtctcactctgtcacccaggcaagtatcttggcttactgcaacctctacctccc

SEQ ID NO: 110295 - DNA, 467 bp, Homo sapiens
tcttgactgtcacagggtaaatctgtagtataaacctatgaaaagctgtcagaaaaaaaattagcatcatcaaagagactgtgataaagcccaggctttctaatactgtgagtctcaaatgtagctcataggaatagggaaaataaatgcacctttctagatgtcccgaagcttatccctttcacctagtgggagaaagacctaagaagaagaattatattggtgtagcaataaggacttcaagacaaagagtctaccatctcaccagcgctcttcagtgggtccatttaatataaatacatttggggtgggtgaaataaaactatgaatattcatagaatcctcttcttctgcccacatccccatccctattgtgtctcccactccagggggaagaagccttggtgttatgaatcaaagtgagagctgtggaagtcagagataccacatttccttgggaggcagaa

SEQ ID NO: 110296 - DNA, 728 bp, Homo sapiens
gagctttacatatatagtctgtatattatttgactatatgtatgtatgtgttagacatatatttatatggcaaatattttttacagtttatttttttaactttgtagtgtcatgtctcatggggatgttgacagtttgcaggtagtcaactttatcaatttttccctttttatgtctttttgaactataagaaactctttcgtataccagtgtcattgatataggttgattcacacatttaagccctttaaaaaatctatctgcaatttattgttaatgttgtgagatgtagatgaatctttttgtccctcccatcatctcaatcctccacacagggggtggacagttgttccagccccgtctgtagtctagtgggcgttttctcttaatttgaatgcttttatcacgtacaaatgtttttgagatgtttttttgaatttacatgttatattctatcaatttattattgtatttctttggaaataagtgattgacttatagctttataatcctcttgctatcagatagagcaaattctcttatttcttttcacaattttttggctattcttgaatattcattcttccaaatgaatttagaatcgcctcttgattctgaatgttgcatttggatttttatctgaattgcatgcaactaatagattcatgtggggaaagttatcataaaatactgattatccatctgggaacattcactccatttattca

SEQ ID NO: 110297 - DNA, 383 bp, Homo sapiens
gacctcactctcctttctcccaccagatcctgaactcctgctctcccttggctcaacctcatcacagccagaaaggatgagagctctttaatgaagtgcatacatgtcagtttcccaggacacaaaccaaagtaaagaagaatggagcatgctcctataaaggaaaataaaaggagatccataaagcaaatccaactcatggacacttactaaacatgcactgtgttcatgtaatggctccaagaatcttagtggacatggacggaagtacacacctggagtggacctacagaagctcagagtcaaatggcagaaagatgatatgggcattgaatacattaaatgaaaataaaagtaataaatcacaagagaagagagtaact

SEQ ID NO: 110298 - DNA, 645 bp, Homo sapiens
acttttgaatttcaatgaaactcctggttcaattagatccctcttcccatccttcttacccctccccagcccattctcctttccccttgctgcttctgcctctgtattcctctctctcctcctccctcctatgccttatatcctcttggcacttttacactgagacatctacaagtggatctgctgtcttcagcagtggtcattgttgtgaaactgaaggatagcaatgaatatttcatatatagcacttaaacctcttcatctagattatgcattttgcttcattgtacccatccataggcacttaataagtgcttatcgattgtctagtgagattgtattataactgattttgagacttttcataccctctgcagttactagtactatatttctttgattctaagatgtacatttttttcaaattttaactttttaaaatctaaaatcaccttgtgatcaagctgtattgtgatttaattgacagtttttttttcaatctttctttcttggtcatgcgtctcacaatcagtggtatcttagattgatgaaatgcagcagtgaaaatatatacctaagtttgtgacttgtataatatgttaaaggccatatatttggaacttcataaagtcttcttttttcctt

SEQ ID NO: 110299 - DNA, 1081 bp, Homo sapiens
agctgaaactgagtaattaaacggtcccctgaagccaagtattccctggttagtcgccaccccaccactccttcctgtctctagtgtcacacttgggctgttgattttcttactcttctcttgctttaatccttccccccggctctctggctcctgtggatatctgtgcttgtttcctggtccaggatggtgatctgactttcaaaccagcttctcaaaaggggtgacataaaatcagttttgatgtttttcctcctgaaaaatcagatgaatattttagtcactgttactcatgcacattgtgttcttatgtttacagaagtgcttaagtgaatggaagcactagacatttggatttccttcctaacgtaatttttaatgattaccccttttatacagtaatttgtggtctttagaaagcagttaaactaattgaccatctaatagttgtactatacatatgtctaaaataatagtcatggtaagtttggcatcatatcttccccaaaaaatgtttattaaaattagattattccagtttaatgctattttgtgaactgtataccctctgaaagcgcttatttttacatgctacacaacagttccaattttaaggagtgtctcctaaaattgggatgaaaatctactgtagtctgttttaaagtatgctatactatgttcattggttacttaactggatattaatataaaggttattacaagaaaaatgatgaagagcaaaaggagaagaaaatatttgcaagtgaatccacaattcttgcagaactatttgagttgatactaaagattttatgttcactcctttaccttagaactgtcaagcttgggaatgaggaaagtgccttggctgtgcttgaaacctgaattttagtgcttcccttattacattcattgttttcaatgattgatttataaaattaagacatactggtagtacaagttgaaagttggtttgaatacattttaattaaatgataatatgttaatatgcttttgttcattgctttctcactgaggtaaaacagcattaaaaagttgtccagaatttaaactgactcta

SEQ ID NO: 110300 - DNA, 445 bp, Homo sapiens
atggggctgcaggggatacctggacattagtggttgcatatatggagatgaggcaacctcacctcaaagtcatgattctcagaccaggtgccagagcagagacagggaagagtgtatgcctgaacacaaccttcttcaagactctgagcagcactgtctcactctcaggcagtgatttgtgtctctgtgcacctcaaaaactttctgcaatctaagtttgtttcttcagccccctggatggcagacaggtttatgggtgtgtggctggagcagatatccttgaagaggagaggaggggagagctgtagctcttagagaggggaggggtggggaaagggtgattccagcaaaacatccacttcccattctcctgcctcactgccttctattaaggcagagtctggaaacagtcctggtaccaaagagatgcacctggctgtagaaa

SEQ ID NO: 110301 - DNA, 688 bp, Homo sapiens
tgccaggaggccttcatccttccagatgggcaccatttgttgggtctttttccgtggtatgaagaaaatgaagcaatgattagaaattggtccctcggccgggcacaatggctcatgcctgtaatcccatcactttggcaggccgaggcgggtggatcacctgaggtcaggagtttgagaccagcctgaccaatgtggtgaaaccccatctctactaaaaatacaaaaattagctgggtgtgatggtgcacacctgtaatccagctactcgggaggctgagacaggagaattgcttgaacctgggaggcagaggttgcagtgagccaagatcaccccactgcattccaggttgggcaacagagcaagactctgtctcaaaaaaaaaagaagaaagaaagaaattgatccctcataataggctgtatagcagattctactgcaaaggctatggttgcacaacagacttctttgaatttgcttgctaaacttttactggataatactgggattacaggtgtgagccactgtgcccagcctctcctgtttaactgtattcattctaatgtttacttacttctttaatttgtaaaattgggtcacttagagttttttagcctatcttgccatttagccactgttactgataatttggatggaaaagaaaaataaattatatcacctctcatc

SEQ ID NO: 110302 - DNA, 727 bp, Homo sapiens
  misc_feature (628)..(628): n is a, c, g, or t
gtgtcatttcttaaccatctatgattacactgaaatatgaacaggtggcttgaacgttatttaggaagtgtgatgagtccgtaaggtctgtcatgtgggcatctcgattcacatcctggagctgtggcctgtgcctcagacacagttgcctgaatgagccatgatctgctcattagcacaccctccacagccattgggtcaatagcacttactttgttcagtttctactctctgcttattaaggatatgtaattttgatttgtgaggttgtgcccatgagtcctttctccattccagttgctgtcagcttaacctggggctcttggcacctctgtgttggacttttgcatcgctctccctgtggattctctcccagctctcccttcctccatatgctttgcagggtgatctttctgaaatgcagatctgattgggatactttgtcgcttaaaacctttgaaagccagcccctgctcccttgccttcaagccacctctgtgtccttagaagagtgtagcaatgaggatgaccagaggtcgctctcgttgccattttggttttggcaggttttgtctgactcctttactgcaacctgttttatcagcaaggtctttatgacctgtatttngtgctaatctcctatctcatcctgtgacttagaatgccttaacttgctgggttgcagcccagtaggtttcagcctcattttttacccagttcctattta

SEQ ID NO: 110303 - DNA, 779 bp, Homo sapiens
gttggtttgtcatcttcataccaaaatctactttatttgcacatcagtcataaaggtgttttacccatttggcttatttgtgtgtttaaaattaaaactcaagccattttccctctccagaaaatgtgacttgtgtagtatgacatcttactggagttgggggaaggcttggtgggcacctgaataaacatcgatctggggaagatgcacctggagggctgcctggacaagtccctgacgctactagattgcctactttcaaaggactaggaaacattttttcagctttaaaagatttaaaagccggtgatatttcagaatagtgctgaaagagccctgctgttgaatgaacattgggagcaccgcatgtgggttgtggcaaaccctttatcccatgaggccctctcttctccatgcctctaagttctacagaccatcagtgccgcccctgaaatgtcctgtcttaaatagaatgccttgaaccatacctctgcatcaaaaatgtggagccgggggagctccaaggactggggattctctgtgccttcaaaatgacaagttagaagtactaaggtaaaagcagaaaagcatctgtgagggactaacttcaggtggtgcctctgacaacacagagcagtcaagttactactgtgcatttaacagggcacaccttttagctctgaaagaaccttaactttttcagtgcttctttaccagcactgtcaccactggtctttacagcgttcttaggaaagcgccgcaaagggatcctctgttca

SEQ ID NO: 110304 - DNA, 259 bp, Homo sapiens
ctgcttgatactggagaggtgagtttctggtcactttcccaggtgtgagtgaggtgagaattctttcagtttatctagctgggggaatgtagtgagcatagctaaagtcacagggcaccacctctccagaagtacaggccatggtgcagagataacgctgtgcatatcagcatccatgccactcacggtcaaatagcagttttctgcaaaacttagtgagggctggtgtttggaagtggagttgagtaattgcagtacc

SEQ ID NO: 110305 - DNA, 787 bp, Homo sapiens
cacagtttcattctttttgaatgaagcagtgtcggtcgggtttatcgcttctcgatctttgaaaagctttatttgggttctgagaaaccactcttcctagttcttgtcttggttcatggtttcacctttcccagatcctttgctggtatctgttcctcactaccataactaaatacagtcatgcatcgatggtgataccttctgagaaataccttgttagccaatttcagcattttgcaaatatcttctagtgtacttacacaaacgtagatgtatgggctactatacacctaggctacaattgtatagtagactgtacacctaagctatagtaggctatacatctaggtttgtgtaagtacactaaatggtgtttgcataatgatgaaaatgcatttgttgcttctaggctaccaacctgcatagcatgttactgtactgaatactgtaggcaattgtaacacaatgctaagtatttgtgtatgtaaacatagaaaaggtaatgtcttgtgcttgaatgttgtgacaactacaacgttgttagacaataggaatttttcagctctgctaccagatcaccattgtatatgtgattcattgttgatgatccaggactgtattggtattgctgggttagtccataaacctcttcactctgatgtctttaatatcacctataatgatgattcacaaatgttaatctctggctaagacctctcccaagaaaacagattttaagaaaaaacacctgcacttataagttaataaacatctcaaaccaaatata

SEQ ID NO: 110306 - DNA, 419 bp, Homo sapiens
ttggatcagggatgattaaaactgaaagagggaaaccagctagtaggctataatgatcactgcagcagttcaggttgggattactaaggcaatggcagtgggaatggagaggagagaattaattcaagaaatgagaaatggaatggaggcaagtatacagagggagtgcacattttaagtcagatagactaaagttcacaccccacttcttagctatagaacaggtcattcaaccctctctgagacttgaggttaaaatctcatctttaaaatggaaatgataatacctaccttgcggagttgtgataattatacaatatctataaagtgcacattagggccccacgcagagtagctagactgttcaactatagctatgaagatgataacaatgatagcatgacgtctggtttggataa

SEQ ID NO: 110307 - DNA, 731 bp, Homo sapiens
ttggaactgtccgctgctctctggtctctggatatgaggcaggagggcttggggacaactgtggggacatggcccagatgatctgatcctggcagtagtgactgttggggaccagccattacagcagcagatcatcagactccaccaagagcttgggagacagaagtctctgtgggctgatgttcatggaaaactccggagtcatatagatgctttgagggagcagaacatggagctccgagaaaagctgagagctctgcagctgcagcggtggaaagccaggaagaaatctgcagcgtccccacacgcggggcaagaatcgcacactctggcattggaacctgcttttggaaaaatttcacctctgtcagctgatgaagagacaatacccaaatacgctggccacaagaatcagagtgccactctcctgggacaaagatcgtcatctaacaattcagctcctccaaagccaatgagtttaaagatagaaagaattagctcgtggaaaacaccaccacaggaaaatagagataaaaatctttccaggagacgtcaagacagaagagcaacacctactggaaggccaactccctgtgcagagagacgggggggtgtctgaagatggaaaggtggcctcggacacctgtgtcactctacactggccccttggaaaattcagattcagataaagttccacttaggtctaataaaagtactcaatttgttattca

SEQ ID NO: 110308 - DNA, 1183 bp, Homo sapiens
ttggaactgtccgctgctctctggtctctggatatgaggcaggagggcttggggacaactgtggggacatggcccagatgatctgatcctggcagtagtgactgttggggaccaggatgctggcaggtcaactcgaggccaggaccccaaagagggcacccacccagaggacccgtgcccaggagctggggctgtcatggagaagacagctgtggcagccgaggttctcacggaggactgcaacactggggagatgccaccattacagcagcagatcatcagactccaccaagagcttgggagacagaagtctctgtgggctgatgttcatggaaaactccggagtcatatagatgctttgagggagcagaacatggagctccgagaaaagctgagagctctgcagctgcagcggtggaaagccaggaagaaatctgcagcgtccccacacgcggggcaagaatcgcacactctggcattggaacctgcttttggaaaaatttcacctctgtcagctgatgaagagacaatacccaaatacgctggccacaagaatcagagtgccactctcctgggacaaagatcgtcatctaacaattcagctcctccaaagccaatgagtttaaagatagaaagaattagctcgtggaaaacaccaccacaggaaaatagagataaaaatctttccaggagacgtcaagacagaagagcaacacctactggaaggccaactccctgtgcagagagacgggggggtgtctgaagatggaaaggtggcctcggacacctgtgtcactctacactggccccttggaaaattcagattcagataaagttccacttaggtctaataaaagtactcaatttgttattcaaaatagacctagtaatttattaaactaattatgtttctatagataaaaacttgaagttcttcagacatgtctctaatgctataaaagcaaacaacttggattgggttttataaatcagttgctttcctgagctctgtagttggtatatttctgcagagtctttaaaaaaattaacccaccttgtagtatggagtgtcgggctgttgggtgagccctggggtcttgctggaaatcgaggatggctgaagatggctttgtgctcccagcctttgggctcaaggcattgcccgctccagggaccttgtgac

SEQ ID NO: 110309 - DNA, 1039 bp, Homo sapiens
ttggaactgtccgctgctctctggtctctggatatgaggcaggagggcttggggacaactgtggggacatggcccagatgatctgatcctggcagtagtgactgttggggaccagccattacagcagcagatcatcagactccaccaagagcttgggagacagaagtctctgtgggctgatgttcatggaaaactccggagtcatatagatgctttgagggagcagaacatggagctccgagaaaagctgagagctctgcagctgcagcggtggaaagccaggaagaaatctgcagcgtccccacacgcggggcaagaatcgcacactctggcattggaacctgcttttggaaaaatttcacctctgtcagctgatgaagagacaatacccaaatacgctggccacaagaatcagagtgccactctcctgggacaaagatcgtcatctaacaattcagctcctccaaagccaatgagtttaaagatagaaagaattagctcgtggaaaacaccaccacaggaaaatagagataaaaatctttccaggagacgtcaagacagaagagcaacacctactggaaggccaactccctgtgcagagagacgggggggtgtctgaagatggaaaggtggcctcggacacctgtgtcactctacactggccccttggaaaattcagattcagataaagttccacttaggtctaataaaagtactcaatttgttattcaaaatagacctagtaatttattaaactaattatgtttctatagataaaaacttgaagttcttcagacatgtctctaatgctataaaagcaaacaacttggattgggttttataaatcagttgctttcctgagctctgtagttggtatatttctgcagagtctttaaaaaaattaacccaccttgtagtatggagtgtcgggctgttgggtgagccctggggtcttgctggaaatcgaggatggctgaagatggctttgtgctcccagcctttgggctcaaggcattgcccgctccagggaccttgtgac

SEQ ID NO: 110310 - DNA, 238 bp, Homo sapiens
gagacagaagtctctgtgggctgatgttcatggaaaactccggagtcatatagatgctttgagggagcagaacatggagctccgagaaaagctgagagctctgcagctgcagcggtggaaagccaggaagaaatctgcagcgtccccacacgcggggcaagaatcgcacactctggtaccaaaagcgcatttatgtttttgtaccgtttgcgttatgtaaaaatagcgtccccataaa

SEQ ID NO: 110311 - DNA, 875 bp, Homo sapiens
ttggaactgtccgctgctctctggtctctggatatgaggcaggagggcttggggacaactgtggggacatggcccagatgatctgatcctggcagtagtgactgttggggaccaggatgctggcaggtcaactcgaggccaggaccccaaagagggcacccacccagaggacccgtgcccaggagctggggctgtcatggagaagacagctgtggcagccgaggttctcacggaggactgcaacactggggagatgccaccattacagcagcagatcatcagactccaccaagagcttgggagacagaagtctctgtgggctgatgttcatggaaaactccggagtcatatagatgctttgagggagcagaacatggagctccgagaaaagctgagagctctgcagctgcagcggtggaaagccaggaagaaatctgcagcgtccccacacgcggggcaagaatcgcacactctggcattggaacctgcttttggaaaaatttcacctctgtcagctgatgaagagacaatacccaaatacgctggccacaagaatcagagtgccactctcctgggacaaagatcgtcatctaacaattcagctcctccaaagccaatgagtttaaagatagaaagaattagctcgtggaaaacaccaccacaggaaaatagagataaaaatctttccaggagacgtcaagacagaagagcaacacctactggaaggccaactccctgtgcagagagacgggggggtgtctgaagatggaaaggtggcctcggacacctgtgtcactctacactggccccttggaaaattcagattcagataaagttccacttaggtctaataaaagtactcaatttgttattca

SEQ ID NO: 110312 - DNA, 1434 bp, Homo sapiens
ttggaactgtccgctgctctctggtctctggatatgaggcaggagggcttggggacaactgtggggacatggcccagatgatctgatcctggcagtagtgactgttggggaccaggatgctggcaggtcaactcgaggccaggaccccaaagagggcacccacccagaggacccgtgcccaggagctggggctgtcatggagaagacagctgtggcagccgaggttctcacggaggactgcaacactggggagatgccaccattacagcagcagatcatcagactccaccaagagcttgggagacagaagtctctgtgggctgatgttcatggaaaactccggagtcatatagatgctttgagggagcagaacatggagctccgagaaaagctgagagctctgcagctgcagcggtggaaagccaggaagaaatctgcagcgtccccacacgcggggcaagaatcgcacactctggcattggaacctgcttttggaaaaatttcacctctgtcagctgatgaagagacaatacccaaatacgctggccacaagaatcagagtgccactctcctgggacaaagatcgtcatctaacaattcagctcctccaaagctcctctttagaacattctcccagccagtgtgtctcttcctgtcccagctttgtgtcaccctcatactcaggaagcaaatctcgtgagtccacagccagcaactgatactgggttgatgtggatggagaaggcgcccccaactcctgaagatgatttatcccctcgcattctttcccaaagcaactgctgagcagataacactttattccctgaaggaagatcagaaatctactccaagcatttgtcacaaccaatgagtttaaagatagaaagaattagctcgtggaaaacaccaccacaggaaaatagagataaaaatctttccaggagacgtcaagacagaagagcaacacctactggaaggccaactccctgtgcagagagacgggggggtgtctgaagatggaaaggtggcctcggacacctgtgtcactctacactggccccttggaaaattcagattcagataaagttccacttaggtctaataaaagtactcaatttgttattcaaaatagacctagtaatttattaaactaattatgtttctatagataaaaacttgaagttcttcagacatgtctctaatgctataaaagcaaacaacttggattgggttttataaatcagttgctttcctgagctctgtagttggtatatttctgcagagtctttaaaaaaattaacccaccttgtagtatggagtgtcgggctgttgggtgagccctggggtcttgctggaaatcgaggatggctgaagatggctttgtgctcccagcctttgggctcaaggcattgcccgctccagggaccttgtgac

SEQ ID NO: 110313 - DNA, 665 bp, Homo sapiens
gaaaaaatatttgcatatcaccacatatctgacaaaggacttttatctagaaaaataaagaactcaaaactcaacaacaaaatatccaaataaccccctggtcaaacgggcaaatgacagcaagagtaagtggatatacggatggcaaataagcacatacaataatgttcaacatcattagccattacagcattacaaattagtaccacaatgagatattactatacacctatcacgacagctaaaataaaaaatagtgacaatgcaaaattgtggagaacctggatcactcatagattagtcgtgggatgtataatggtacagtcactatggaaaacaaattgatcgttctctaaacaaacaaacaaacaaagttaaacatacaactaccacaaaagccagtaattgcactgttgggcatttatcccagggaaatgacaagttatattcacacaaaaacctgcacatgttatagcacctttatttgtaataaccccaaactagaaacaacctagacgtctgtccttcaagagggaatgcttaaacgaactatggtacaaccataccatgaaatactaattagcaatgaaaagaaacaagctattaaaaacctgtaagaataggccgggcgcggtgactcacgcctgtaattcagcactttggga

SEQ ID NO: 110314 - DNA, 420 bp, Homo sapiens
cattcatttaagaaatatagattgagaatctatatttgtgcaaggtagtgtactaggtactgaggctatatctgtaaacagaaattcttacttttttgatgtttagattctgagtaaattatatgttagaaaacaattaatgagatggggaaaaatacagagcaagataagatcaggagtggtaggttgcaattttaactggaatagtgagaatactcattgaaaagttgagatttaagcaaagacatgaaggatatgaggatgtaaactgtatagatgtctgaggaagagcctctaggccaagggaacagtcaatgcaatggctctaaggtgtgagcatgcctgatgtgttgaagaacagtaaggaggtcagtgtggatgtatcagagtgattgagtagaacagtaggagatgaggtca

SEQ ID NO: 110315 - DNA, 232 bp, Homo sapiens
acagcaatggaagccacaaggcaagcaaaacgcacatattcaaagggcagtaaaatagcatctacatggaattacccaccttcaaaagtcatgggcgaggctgggcgcggtggctcatgcctgtaatcccagcactttgggaggccgaggcgggcggatcacctgaggtcgggagttcgagatcagcctgaccaacatggtgaaaccctgtctctactaaaaatacaaaatt

SEQ ID NO: 110316 - DNA, 489 bp, Homo sapiens
tatgctcagtatctttatctttctggaatttagacctataatattctaacattcttggaatgtgagccatctaccactggtttctcttctagtagtagttttaatttataataaatttttgagggatatgatccaaagaaacttacaggcattatccatcttaattgtcccaagtgtgtgtgtttaacagcttgttgagatataattggcaaactgcacactgcccatatttagaagatacaatttgataagttttcatctattttgacacctgtgaaaccatcgctgcagtcaagctgacagaccttctcccccagtggtgccccagcaccccttagcagtgcctcccttcaccttttctctttctgctgttaatcagcagttgatctggctggtttcctgttggctgcaaagcagcttcagatgaaggttgctttctgtggtgtgggctgccgtgggtcccctctcagactcagcctcttagtatgg

SEQ ID NO: 110317 - DNA, 491 bp, Homo sapiens
aaatactagtgggttttaaaaatacatagtctttttgttctgttttgttttggggaaaaaatggtaagctccttagtttatatgtttaactgggattcttcttccaattttcatttggctttttgcattttgatcatttctgttacacactggcatagtaaaaagccagccagctaatctgttcattgcattttgtggtagcaaggctctgaatattggatatgaacgtttgacggactgaaattaggctttgcattatctgtaattttaagtattcttcctttttataaaaccacatatttctatcccctcaatgtaaacattttgattagatgtgaaagttacatttatttaacacaaactgggtatttaaaagcatttaggtgtgtttgaattcagagaggatttgtgcaaattacaaatttcatatgtttacaaggaaatgctcacctgctaagtacaatgtaaatattccaaacatccggcgaaag

SEQ ID NO: 110318 - DNA, 337 bp, Homo sapiens
ggagacgtcgcctcagggagttgtttcctggtggatttagagccaagcaggcacctagttcctgtgaagtccatactgtgattaagaggtggtctgtacccatcccatgtggggtgtaagggtcagtggtacaagtcaaattggttatatcctagctgtcccacagggaggtggtcacccagaatgcagtcgtgtaagaaatatatgtgagttgaccacatggaggaaatgggaggaggtggagaactagaaactgttaagtttgaataaagtttttttccgttatgagaaagttaaatccataaagaaaatgcatgctaaggtaacatataactat

SEQ ID NO: 110319 - DNA, 419 bp, Homo sapiens
tccacatcagagacttcattttgttgataaaccctatgaatgtaaggaatgtgggaaggcgttcagagtgcgccaacagcttacttttcatcacagaattcatactggtgaaaaaccgtatgaatgtaaggaatgtgggatggccttcagacagactgcacaccttactcgacatcagagacttcattctggtgaaaaactctatgaatgtaaggaatgtggggaagctttcatatgtggtgcagatcttagagtacatcagaaaatgcatattggtgagaagccctatgaatgtaaagaatgtgggaaggcttttagggtacgaggacaacttactctgcatcagaggattcatactggtgagaaaccctatgtgtgtaaagagtgtggaaaagcctttagacagtacgcacacctga

SEQ ID NO: 110320 - DNA, 321 bp, Homo sapiens
gctgagcaggcacatcagccggagcctttgttctctcttaatagccatgactgatttctgctaactttagctgcctcagctgcctctgtgtcaattagagctgcaccttttccatagctcactgggtagcacgttgagcaaccatctcttggggtagggcccttctgcaattggctcttagcctttttatgttgattttaccaatttcactgtaagagtgaccttttcctgactggatctcagctatgttataaccatgtgtgttacggccagccagcttacttctgatgggatgacctggttaactgctctgtgccagcc

SEQ ID NO: 110321 - DNA, 720 bp, Homo sapiens
cagcatgattatttttccatggcttctaatttatgtgcttgtcttggagccacgaactttctaatggtctgttaattagtctacttgttgttgacctttatggtgaaagttgtcaaaacaaaatgagtaacagtgtagcactttagaatagctctttactctgttaattctttctataagttcttttaaatttacagtttcatctcaatagtttacaatgcattataattggaaaagtctgattagtattgaattcagttgctgagtggaggggaccacactcttgtcttctactcttaagtgcttagtaattaggagttggaaggaaaacagtatatgaccctgttgttaaattagtaaacttttaattctagggtaaggttagctgctcatcattatctctgtttgctttactttacataaaggtaccataattcgaatcctctaaaatccattaaatgcaatttatccattaaatgtaatccattaaatgcaatttatctattgaatcttcatgcaagtttgaaacttaagtgttttaacattctcctgtcaagatgaagaaaatattttgacaattttctgtccaaatgttttacagtttatgtggtaagaattctcccctcccccaactaaggattttccttcttttaccactagtgtattatcatttaggggtggaatctggcaaacgagtctggaataaaggttgcttttaaa

SEQ ID NO: 110322 - DNA, 162 bp, Homo sapiens
ccccatgttgtttcctctgcctagaacactcttaaccacccttcatctgcctacatctacccaactctctggtttagattaaatgtcacttcctccagaaggctttctttgactccctaacttgggaaggcactcctactacatgttcccatagcacccaat

SEQ ID NO: 110323 - DNA, 274 bp, Homo sapiens
ctctggtaacacagtggcttaatcatataactttatagcaagtcttgattttaagtaggctgagtcctccaactttgttcttttttattactttcactattctagttcctttgcattttcatataaattttacaatcaactttccaatttctataaaaattgttgggattttgattggagttacatttaatatgtatatcaatttagaaagaactgataacttcaacattattgaattatctaatccatgaacatgggctatctcatcctttag

SEQ ID NO: 110324 - DNA, 439 bp, Homo sapiens
aattaaaattaataaaatgtgtcccaccggctagcttcatgactgtgtttcagatgactgtgcactttctagaaaacattttgcctttttgttcaaacagtatcctcaaagatgacttcctactatctgcatcagccttgtttatttccagctgtcacatgctccctccaagaacaaagcttggccacccctgagaatgttacaaagaatgagccaaggctccaaaggagagggctctaagagagacactctggaatgttcagagctgtggcaactatcttgttgcatgtgtgtgtagttttcccaggaaactgcttggaggataactactgccatttggatgcactccttggctacgtgggttttaattaggtgtgcggctttagggtgacacccatactaatgcctgtaggacttatgtagttaagtgttttctttc

SEQ ID NO: 110325 - DNA, 211 bp, Homo sapiens
ggaggaggatcacttaaggccaggagttcaagaccagcctgggcaacacagtgatgtcctgtctctacaaaagaatgaaaaattagcctaatgtggtggcatgcacctatagttctactgtagtctcagctacttgggaggctgaagtgggaaggatcacctgagtcctggagttggatgctgtagtgagctatgattgtgccactgcact

SEQ ID NO: 110326 - DNA, 489 bp, Homo sapiens
ttctatgttcggcacgagcacagggtttcagcatgttggccagactggtcttgaactcctgacccatctagagtaagttaggtgctctttccatgtggtctaggatctcgtacttactcaacacaccgaattgtaaatgcttgtttatgtgtatcagcactgcttaccacctccacctaaggggagggcagggaatgtctcgttttcctcttttaattcctgaggcttagcacaaggcctgttatatgggaagtgtttattaaaatttggagtgaataaaatggatagtaaaggtgctgttttgttggttagcagtggtaggatctaataacgtacccaatacactttgtactaaattttcaatattcgttgcagagtttttaagtttttcttattaaatttatagtatttgtctaacaggtatcaaaaaccactttgaaggccaggcatggtggctgacgcctgtaatcccagcactttgggaggccg

SEQ ID NO: 110327 - DNA, 456 bp, Homo sapiens
atcatattgagacttacattttcatagataaaaataaagaaactactgttaaagaataaaaacaaaacagaaatacagcatagtatacctgcatgtcaaggacccaaacaagattcaaacatacaatttgtgtaagcaaatttccaaataggcacacacacaagaataaacttatcagaatgaataggcaaaaaagagaagaagagcagaaatgccttatcttgaaaataattcacccaaatacattgatacaatgtctgagatttcttaaagtagtccaggggaagtgagtagtagagaaagagagaaaaatgagattggccatgagttaataattgactaacctgggtgatgtacacatatggttcattatactcttctctctacttttgtgtatattggaaaatatctataaaaatatttttaaaatactaaataaatataatgtctaaagag

SEQ ID NO: 110328 - DNA, 401 bp, Homo sapiens
aaccatgttcacatacagcttgcggggttgtgactctgctggctgcactgaacttggctgtcttagcttctccattgccagcagggccactgggaatcttctcagacttactttacccgtttttaatcctcccataatcctctcagcaccactgtctgcaccactgtgggcactcgttttgaagcattcttttccaaatacagtcttgcccatcggtttatatagtgcatttagtgcctgttctgtaccagacgctatgctagatactgaggttaaagatatgagccccttgttcccaaggagcccacggtcctcttttttcctcagaaataaggtcacttagggcaggaatcaattctaccaatttatatcacctcgtgccgaatcctgcagcccggggg

SEQ ID NO: 110329 - DNA, 258 bp, Homo sapiens
atgtggttcaggtttgttttttgttttattttgtttttgagacagggtctcactctgttgcccaggctggagtgcagaggcgtggcgcgatctcagcttactgtagcctttacctccagggctcatgcaattctcccagttctgcctcacaagtatctggaactacaggtacatgccaccatgctgggctgatttttctgtatttgtagagaagagatttcaccacgttgccagggctagtctcaaactcctgagctc

SEQ ID NO: 110330 - DNA, 338 bp, Homo sapiens
aagcacccagaaaaatattaaatcagaatagtaatcaatgatatctttgttttgctcttgactttaatgagcatgtgccagtatttcccactaagcatgatcctggctttggggtagtgaatagatagacagacaaacagatatcttaagaaattactcatctgggccagatgcagtggctcacgcctgtaatctcagcactttgggaggccaaggcaggcagatcactgaaggccagtagtttgagaccagcctggcgaacatggagaaaccccatctctactaaaaatacaaaaattagccaggtgtggtggtgggtgcctgtaatcccagctatt

SEQ ID NO: 110331 - DNA, 343 bp, Homo sapiens
gtatctatcaccagatgctcttgtatctagtacctgcttggcatacagtagatagaaagctttgctgagtgaatagctctgcctttcgtcttttttgatatgtgtacatcttttaaaaaataatgaatagactttgttttagagctgttttgatttacagcaaaactaagcagaaagaaaatatccccttccacaaacatcctggactgtacagcctcccctaccatcaacatcctgcattactgtggaatatttgtcacacctgataaaccaacatagattcatggttacaaaaatgaaccaatatggataaaacatatacattatcagccaaagtccggag

SEQ ID NO: 110332 - DNA, 320 bp, Homo sapiens
ttgatattctccagttgcatcagaagtcttgctgctcttccagcacaccaagattgatgctgcctcagggcctttgcaccagctccttcttctgcctggacactctcgccctggttctgcgcatggctcctttctcctttttgtttggattgctgctcaaattgtgcctccacatggaggctttctaagtgatccagacctacaggctcaggcacactctatcccctcactctgttttcttcttcataatatttacaaccatctgaaatatgtaatgtttacatagccgtttgcttaatacctgtaagattccaccaact

SEQ ID NO: 110333 - DNA, 689 bp, Homo sapiens
cgcggtggctcacgcctgtaatcccagcactttgggaggttgaggcgggtggatcataaggtcaggagttcaagaccagcctggccaagatggtgaaaccctgtctctactaaaagtacaaaaattacagtgtgcctgtaatcccagctacttgggaggctgaggcaggagaatcacttgaacctagtggggcggaggttgcagtgagccgagatcatgccactgcactccagcctgggcgacagagcaagactccgtctcaaaaaaaaaaataaaactgttttaactttaagatgttttatgtaatctccatttttcatgaccattatgaaaatatttatagaatgtatgaaaaacattttaaaaataaagtatgtcactacacaattaaaatttaaattgaagaaaacagaagaaaaaacatctacaggaaacacataaaacaataataataaaatgataatagtagcttcatttatttaaacaatcattttaaatataaattaactaaactacttaataagaagaaatgtaatcccaatattttgggaggccaaggtgggctgaacacttgatcctaggattacaagaccagcctaggcaacataacaaaaccctgtctctacaaaaaatacaaaaaatctagctgggtgtgatggcacttacttgtagtagagatacttgagagg

SEQ ID NO: 110334 - DNA, 169 bp, Homo sapiens
atcattgcataatgatgaagaggtcaatccaccaagaagacagcaatcctaggtatatgtgcatcaaacagagctgtaaatgtgaaggaaaaaaactgatgaaactaaaaggagaaataggtaaatacacaattatagttggtgattttaacatctctccttcaacaat

SEQ ID NO: 110335 - DNA, 366 bp, Homo sapiens
tattgctctatgcattcgcaaacatatacccatttcctatacaaagaaaatatgaacatctcccatgtgcaggaatatgtagttttattaagctttgctctgttgagctttacagatactgtgcttttttaaaaattgaagctttgttggcaactctgcattaaacaagtctattgacaccatttttccagcagcacgtgctcacctaatgtctctgcgtcacattttggtaattcttacaatacttcaagctttttctttattatatctgttatgttgatctgtaattggtgatctttgatgttactattgtaattgttttgggccacaagccatgcccatataagatgggaaacttaatagata

SEQ ID NO: 110336 - DNA, 480 bp, Homo sapiens
agtaccaaaactggaatgatgcagagaagattagcatggttcctgtgtaaggatgacattcaaagtcgtgaaatagtccatatgttagaaaataagaacaaagtacaatgaataaagaatcccattcacaataggaataaaagtataaaacaaaggcataaactcaacaaaaaggaaggaaggaatgaagggagagaagaagagaggaagggagggaaggcataaacaaaggtataaactcaacaaaaaggaaaggaggagaggagagcagggaaggagggagaaaggaaatagcaaacttcaggggaagagcccaaataaaaggaagagaggacatggagaactggagagacagccaggacctggatggaaagagttggcaaagatgtcagtattcttcggggaggtgcagggagagctccccactgtctataccacaggcacccagggaggacccaggagagctgccatccccaaacc

SEQ ID NO: 110337 - DNA, 199 bp, Homo sapiens
actcggtaccccctgggcaacacagtgatgccttgtctcaaaaacaaaaaaattaaaaaaaaaccaacaaaacagctggactacgttaggcaacacggtgaaactccgtctgcacaagaagtgcaagaattggccaggcatggtggtgcatgcctgtagttccagctatttgggaggctgaggcagaaggatcatttga

SEQ ID NO: 110338 - DNA, 211 bp, Homo sapiens
cgctcccccttccccctccgcgggggcgcctcccccggcccccgtggctgcttctcatcgaccccaaaacatgcttgagtcatacaagcttgataatattaaatatttagcagggtctatatttacgtgcctaacagtagctctgggattttatcacctgtggatctaataaagtgtctatttaaagagggggggaaaaggatttaccatt

SEQ ID NO: 110339 - DNA, 351 bp, Homo sapiens
attttccgtcagttctttgtcatagtaaatgcttctcaaggtaataaggcaatatcagcttattgtcatttttctctttcactctgtgtatatgtgtgtgtgcgtgcacgcgtgtgcacacacaatgttgccattcagtttagccaacaggtcattaaattcaagctgtacatcaaacagtgcatataatgtggtatgctgccaggctaactattcaatccaatgcataaaggaattgactactgttttctctgctgcagcccagatactgcatccttaaggccaatgtgcaagcagaaaatgagtgattgactggccgatctcattgagaggtttttggtttatttaagg

SEQ ID NO: 110340 - DNA, 441 bp, Homo sapiens
ttcttatacatcattaccccatcatccagcttcaaaatattggtgttttgtacttcccttttccctttactttcctaccatatcccttcccatcccagcctaaccatatccagtcacaaagttctaggcatagtccctaataatgtcgtgtccctgtatctcaagatacgtccctgtatttttttaatcttctggcttatatgttaatttttataatgggccttaaccctaccctctgctctattcaagatcaaagcatatctcagtggtcagttgaaggcaaattcctggcttccttctttgccaaaaattaccctacctcaaactctctaagattaattgctctcaaaagcctctgttgtgaaaaatctactgagaattcctggtggaccctcaatcctctcttggcagtcccaagctctagtgtcttcaagggcaaca

SEQ ID NO: 110341 - DNA, 585 bp, Homo sapiens
ctggagtctgtgctgaagttcattttcagaaagaatgcctggaaaataaattttttttttcccccctgagatggagtgtcgctctgttgcccaggctggagtgccgtggcgcaatcttggctcactgcaacctctgcctcccgggttcaagtgattcttctgcctcagccccctgagtagctgggactataggcgcatgccaccacgcacagctaattttgttgtgtttttcgtagagacgggggttcaccatgttggctaggatggtctccatctcttgaccttgtgatccgctcgcctcagcctcgcaaagtgctgggattacaggcatgagccaccacgcccagccaataattttttttaaattgtgtgtttgaatttcccattttagccttcacttaatggatgagttggctgtaaaaatctagcttcaaaatagtttttctcagttttaaaggcatcacttcattttttaaaaaaaatcatttagtgttacaattagaaataagcccatctgtttcttgtaagttggtaagtactgctgaggggaatttccctccctcccttcttgccaccttgccgagg

SEQ ID NO: 110342 - DNA, 416 bp, Homo sapiens
gatgtttggctaggatataaaataaggcttcagaatataaaatatcctgcagattgagaagttttaaaagtagttacatacaagttttatttttccaacgttcctgccttttctaatgtctaaggatgaagcagtgtacagagaggaaagaatgttatatgtgtggtctgcttgcaagtgctggatgcctcctctgcctgctccaactaaactgtctgcttatgagaaagtcattgctcctctgagttcctgcctccctatatattcaacattagaattttgccaggttatcttttagggtcgttcaactctaacatatatatgagtctgtgacactgaactcagacacttcagaacaggaaccctggatttctctggatgtggaaatctttaaatctatacctgactggtaggac

SEQ ID NO: 110343 - DNA, 287 bp, Homo sapiens
ttatcctggacatttccttccctgaatctgccattactccagagcgcccaatttccttttattagaaaatggggttgggcatggtagctcacgcctgtaatcccagcactttgggaggccaaggtgggcggatcacttaaggtcaggagtttgggactagcctggccaacatggggaaactccgtctctactaaaaatataaaaattagctgggcatgtggtgacgcacacctgtaattccagttactcaggaggctgaggcaggagaatcacttgaacccgggaga

SEQ ID NO: 110344 - DNA, 306 bp, Homo sapiens
gttggggagatacatgcctcatctatcatagagaggagtcaatagctactacttcatattgatgaatcaagaaatgcaaatataagcatattatttgagttatgaacaaaaccaccaccaatgctttctcccctcaagaaagttgagtgaagaacaggactagcaatggaggtgaagaggaagacttatgttttatttcatacctttctgtactattttaatgatttttccccaggcgcatgtacttaatattcttttctttcttttaactttaaaagaagtcaggattcagagacagcactccag

SEQ ID NO: 110345 - DNA, 160 bp, Homo sapiens
gtaactcagccaacatgctaacattttctttccttcccattaatttatttactagcccttcctatgtttgccaagtggctatgttactgaaaccagcccaattgtcccatagaaccgatgtttacagtcttctaaaataaacatagatattgacccttcc

SEQ ID NO: 110346 - DNA, 443 bp, Homo sapiens
aggcttaagatccaggcaagagtgaggcgcttaggagcccaggaagccagaagagcctggtagcactgaaggaacactcaggccaccttggaacagagaggatgggattgccatgtggttccacatggctctgaaaatagacaatggctaagctgtgcaacagactgcctatgacatttggttgcccagagcttctgtgaaaatacttcaggacaaggctttcccccacccaggggtgggttggggaatagagtgtatgcactttgttttgtccaattttagactttaaaatcctctgaggcatcaactggtgagggtgaggaagtggccccatagactgaattgggcctgccccaccctggtacctttctgttctgtcacagtgacaattcacagctcagaggtcctttgggaaactttctctgacatcgcccctatcctct

SEQ ID NO: 110347 - DNA, 493 bp, Homo sapiens
atttatctacctttaatttctaccaatttttttcaaactttttggattaatgtaggactctactaagaattttgttagatacacctttccaagaaacttggattggaagtttctattaggtgttagataattgcttaacctgctctgaaggaaacttcagccctgggagaattgtgaagctcatggacatttagaaggtggttggatttgtcatggaaagcagccctttttgaaatctttgtcatgggtcaagaccatttcctgctgagctttgtgggataagaaggtaaaatgatttgtcctgggatctcttccttcaaatgatatatgtgaagaatcccacagggaaccagcacatgcatgtactcaacaaatgtagttctttcccattgacaaaagagatgtccgggttatttgaccagttgcctattccttaacctctttgattaaagggcattctacaatcaaagggattagatcccagactacctat

SEQ ID NO: 110348 - DNA, 396 bp, Homo sapiens
agtgatgaagctggaaagatttgaaagtgtgagcacagaggtaattgaagtctggggatggttcttggctcattgtttattggttgcgtgcttctctcctatttcaagtggctctgctggtgaatgcttgaactgttcctcttgtcttcctgtgattgtttaaccccttagtttgggcttcccacctcctcctgtgcacttgaagggtagctctggggtacaaacttgtctttgcaatgctccctcctccattcgtcatcagggctcagcttggaacagccgttgatacctttaagcttcacaggggtcttgaggttagaagacttgagtcctcagaactggaaagaaaaaaaaaataccggactttctgaggtggttatttgggaggaggtaagc

SEQ ID NO: 110349 - DNA, 381 bp, Homo sapiens
ggtctccagccatctttccttcacttctccaaattcatctaaacgtggcatagagcaagacgctcgaatgacgttggacagcttccttttcacacctgagccccggtagccccactaggcaaaatgcaaacaggaaccccgggccttgctccgcgccctttgcttcatgaagcaacagaaaggccaccttcctggctgtaaaggcagaagcgccttcttccccataaacatccttgggcagctcatcattcccctcctgctcgttcttctccctcttcccaggcagcctgagaaacaaaacttaaactggacttgttgcctaatctaaattaggatccctctgctcttctccgtagctccatcttctcccacacaccagtt

SEQ ID NO: 110350 - DNA, 485 bp, Homo sapiens
attcaagtgatcacaatctttcttcaatccgttaatgtgaatttcctttactaacttttcttatgtacaattaatccatgatcttgaaatgaacacaacttggttatctgttttttaaaaaactgctatatttggtttactaaaatattgtttagacctttttaaattattattattattttttgagagtctcactctgtcacccgggctggagtgaagtggcatgatctcggctcaatgcaactgcctcccaggttcaagcgattctcatgcctcagcctcccaagtagctcggactacaggtgcctaccaccatgcctggctaattttgtatttttagtagagataggatttcaccacggtggccaggctggtcttgaactcctgacctcaggtaatccacctggcttggcctcacaaaaggttgggattacaggcatgagccaccatgcccagctgtttagcctttttatacctaggtaatg

SEQ ID NO: 110351 - DNA, 263 bp, Homo sapiens
tatcttctgtgcagctgtttttttaagattttcctttaatgtatttcctctcatttttcttgcgtcttatttggagtctgtagtagcatagttcttaatttgcttatcaagtaatttacatcatattaaacatgaatttcaaccagcaaagaatattattaaaacttctggactaatgttattcacttgtattctttcctactacccggaaatgcttttgctggcaatgatttctcctttgatgttgtggcacatcttccaat

SEQ ID NO: 110352 - DNA, 333 bp, Homo sapiens
tatagattctgagtattagattttgtcaggttcataggttatgaatatttttgccattctgctagctttggggtaagttagtttttatttttctagtttctctaagtgtgatgttaaattgttagtttgagatcattctaacttcttgatgcaggtatttagcactctcaactttcctcttaacagagctcttcctacaacccagacattttgttatattgtgtctcttctatttcaaaatctttttaattttctgccttaatttttttgtttatccaaaattcattcaggagcaagttgtttaatttcaatatcattctgtgattttgtgag

SEQ ID NO: 110353 - DNA, 470 bp, Homo sapiens
tccttctgtttttcctatgctctcgggaacatttgacctttagttcctttctaaatgcctcagttcattagaaatgttttgtgctcattcaataagtcatttatttgaggtcagatttatattttgaaaaggtcattttggcaagttatttggtcttcccaaagtccagagtgtccagtataaaatagggatatcattcctatctgtttcctataattgttgtgaggatgaatgtgttaatgtaagtgaaaatgcttggtaaacaagaaggagatatatgtattattcatagagcgattagcacaatttggttgcagtggatgagtagaaaaacagatgttaggtgaggtgcggtggctcacgcctgtaatctcaacagtttgggaggctgaggcagagggatcgcttgagcccaggagtttgaagccaactctgacaacttagtgagatccccatctctacaaaaagta

SEQ ID NO: 110354 - DNA, 889 bp, Homo sapiens
agctatggctcacacctgtatcccagcacttgggcaggccgaggcgggtggatcacgtgcggtcaggagtttgggatcagcctggccaacatggtgaaaccctgtctctattaaaaatacaaaaattagctgggcatgggggcgggcgccacttgggaggctgaggtaggagaatcgcttgaacccagaagccgacattgtgccactgctctccagcctgggtgacagagtgagactccatttcaaaaacaaacaaaaaaacaaaggtcaaatattgtggccaggcatggtggctcatgcctataatcccagtactttgggaggctgaggcattgcggatcacctgacgttgggagttcaagaccagtctgaccaacatggagaaaccccgtctctactaaaaatacaaaattagccaggcgtggtggcgaatgcctgtaacgcttgaaccccggaggcggaggttgcggtgagccaagatcgtgccattgcactccagcctgggcaacaagagtgaaactccatctcaaacaaacaaacaaaaaacaaatattgctaagactgctccacctccacccttctttattttctcctagaacataactgaatggttaagagcataaactctggagttaggctgtctgctttaacagttattaactgtatagacttgggcaaaccagttaaattctctgaactttcatttcttaaggacacctatgatacctaccatatggttgttgtgaggacaaaaggagtgaatacgagtgctcagatcactacctggcagtattcgttaagtgttagctattattataaatctccagaaaaactttttctcctcaattacagcaagggcttctttctagaaagggtgaaatgtttgtgt

SEQ ID NO: 110355 - DNA, 211 bp, Homo sapiens
gatgatcctgttaataggactgctccatatgccattcatgcatcaaaactttcaaaaaatcatgtgcaataaatcagactttgctgtaaacttaccaacacatttaatttctgatgatctactatttgtttcttgccatgccccagaggtatcctgataatatccttcagccttgcattgtgtatgtgtgcaagaatgagttgatacaatg

SEQ ID NO: 110356 - DNA, 449 bp, Homo sapiens
gctggactgagctgccttccttggtctgggtgggaaggtattcctggaagtggcgagcagcaatccgcacaggacagtgtgctgtgctgagtgccttgtgggtgtttaaattaaatatcccattgtacgactatggctggctgtaataaacccacagtaacagtctagtcttctcatcactctcagattattgaggaatggaggaaaacacaataaaccattttaaaagattgatttgcaagcttttttagccagcgggggtgtagacagcctgtacctttaagtcgcttctccgcgctcttcccggcaggacggggaactgggcggtgaggggaagaattgtacttggctcttcattctgttgacatctttgtcgtgccctaaatgcttatgtgtgtatagagtttctctcctccacctgccagaataaaccatcctcgaagcagctg

SEQ ID NO: 110357 - DNA, 564 bp, Homo sapiens
gcagcatcactctggtcttccattccaaagtccatggtaactgacttgggcacacggaatatttttgtttatcatgttctgattgctggaagagataggattatcctgtgactgcctctgggtcccatggcttttatttgacaattaatggtggtggctcccggtgttccttccttccctggcttccttgttagggatcgtgaatgaatagcaagtgtgggttttgagtattgattcttcactcctttcagagggcttctgagctgggagagctgccaatgggatcgaattttcacttcctgaaacttcaaccaaacctgtaactggggagataggacagccgagaaaccagaggcatgaggatgtgtttggttaggcaggactctttgaaagcaatcttaggatggtactgagttctgtcctgcttatgagacaagaatgcgggatttattgtgttgtcaagcctgaggatcctctctcttcacaaagcagacataggcaaggtctgttaagatgtggctaaaaggcttaaacgtttttgatacattttaaatggtgatcctt

SEQ ID NO: 110358 - DNA, 255 bp, Homo sapiens
gcctcccaaagtgtaaggattacaggcgtgagccaccatgcctgattatctatcggtttttgccttatgtatttggtgctctgtcattaggtgcgtacacattaaggattggttatgttttcttggagaattgacacttttattatatgtaatgctcccctttatgcctgataattttccttgctctgacgccagctctctgtgaaactaacatagctatttctgctttcttttggttagtgttagcatgatatt

SEQ ID NO: 110359 - DNA, 732 bp, Homo sapiens
gcaaatgaattttacctgttgatccaaatgtgatggcacgcttatgaagggttgatagtctacgtgttgccactattcgctgccgtcattttcaatgatgcacagctttccagtgtgtggatgcgccgtcatgtcttaaccacttccctgcgtggatctttaggtcggttttgccttttcattgttataaacagtgatgcaaggaagggagtgtttgtggttaaatctttacattcatcatatgttacaatgaactggatccctggtttgtttagcgccaaacatattttaattttgttctcaattagcttttttatatagcaaactacccccaagatgtaatggcttaaaacaacaaatgtattggcttaaaatttagcccacaattctgtgagctggctgggcttgctcttccgatctgggccagctcagctgatttctgctgggctctctcgtgtatctgtggtcagctggtgggttggctgaggcaggatgctctagggcggcctcactcatgtgtctggaaagtagtaggctatttcctggggcaatgggtcgtttgtgtctaggtcacacgccttttatctgtcaggttaccctgccttctttacttggtagtagtggcaggggttccccagacagcaagaaggcaagccgccatgtggaaacacctttcaagcctctgtttgcatcccttttgctgacatttctggccaaagccagtcatgtgcc

SEQ ID NO: 110360 - DNA, 249 bp, Homo sapiens
caagatcatgccattgcattccagcctgggcaacaaaagcaaaactccgtctcaggaaaaaaaaaaaaaaaaaaaaaaagcctccccaccgccgcccccaccatgtgcccatttgctaacctttcatgtgaagacaagtgtctgtcagtaaatatttagcaggttcttacttagcagatatatttggaaaacacagtctgtccctttgaggtacaggtgacatttgaatgagttagaaagtaactgcaa

SEQ ID NO: 110361 - DNA, 249 bp, Homo sapiens
ctaacatcacataatcaggaccctccctgtccttggcattgatattcaaagatgactgaagatgtggtcccttctgcatggaactcagtctagtggagaggacagaagggagaaaaggccgggtgtagtggctcacacctgtaatctcagcatttcgggaggccgaggcaggagaatcattagagctaaggagttcaagaccagcctatgagaccctgtctctattttttttttaagtagttagaaggg

SEQ ID NO: 110362 - DNA, 154 bp, Homo sapiens
ataatgataatcaacacacatttaatgacgtaagtgtctctaggttacaatcttcaagtccagcctgtgccagaaaacaaagctaggttcaaattgaaatgggtattcttgtcattccggcgagttccacagaaaccatttttctatttctaca

SEQ ID NO: 110363 - DNA, 605 bp, Homo sapiens
gcatgtgagtgcatgcgtgtgtgtgtgtgtgtgcactccctgtctggagccccaggctgtctgtgagactcttgcacacagggaggctggtgggaacaggcagtagttataaaaatataggaaacaaagcatttgtttctatcacgtgtctgatttctacagcaggcttgtattttgtacgaaagatgcttcctgctaaaaaaaacaaaaacctctccagagtaaatgacggcagcccaggcacagccgcatcctttagcaatgcccccaggcctaggagtgcctgtccctcccacacgggacccttcctggcccacccttcccttgagaatcacttgaagccagttcagagattccttaggtgacagtgctcagggctggctgagagctggctgagagctgacagcgcatttgcacagcccgcctttctcttctcaagtggaagtagctcccgtttccgacacagctgcaggcagtggcatgctgagtggaaaaagctatgggctcagtcccagctctgatctccccttcccacatcattggtgatagaggaggggaaatgagggaaagctctgtatagaacaggaggccttcctgtagcatgg

SEQ ID NO: 110364 - DNA, 288 bp, Homo sapiens
tgggaatatacaacaagtttatcttttcttctatgaaaagactttcacctggcaagtatttaattttttttgatgttattataaatggacttttttccccctaaatttcagttttaggttgttcattacaagtgtatagaaacagtttacttttgaatatcaatcttgaatatgcagccttgccagactcgtttattagattttttgtttgtttttgtgaattttttaggattttctataaacaaggccttttcatctgcaaaagagatagttttatttctttctttc

SEQ ID NO: 110365 - DNA, 365 bp, Homo sapiens
cggcacagcacaaagagctaaactaccactcgaggcagttaacctaagggcagggtggtggctacagctccaggtgaacagtctgggaccagaggaaataatgagcccccccttgtactggctgcttccaccctaaagtgtcatccagatggtgtttccaattctttctacttccagtattagctgcagaattacggaatcaaggaggcttctctgcatgaatcaataaaggctatagcactttgagacacaagctttggccctttaaaaatgtgagaaatcaaactggcacaggcagagtgtctcagtggtctccagggagcaagagagaatgaggttcagcttgaaggctacaagggtggagc

SEQ ID NO: 110366 - DNA, 387 bp, Homo sapiens
tccccacaacctaaacaacacttgctgtctttcatcctttttgatgtagctttttttttaacaggcatgagatattatctcctagtggttttaatttgcactttcctgatgattagtgatgttgaacactttttttcatctacctgttggccatttgtgacttggttgtgatttttactgttgaggaattgtcaacattgttttagtcagttctgactttttcttcatggctctggtggattgtgtcatattgtcatacataaggagaaaagaatttatgaatgtgatgaacataatggaatgtggctcccttccttccattctcatctccgctctgttaattgacctctgggttcaatgagtggctaatgtaactgaagtccctgg

SEQ ID NO: 110367 - DNA, 91 bp, Homo sapiens
ttatagcatgagtattgtaccttgattgtgttggaaaagatgtgttctcctttcccgtcacaaaattgagtcctaaatcatatccttagtg

SEQ ID NO: 110368 - DNA, 191 bp, Homo sapiens
aaatctacataaattatgctgagatgtcttcaacttaaagcttttttttgagacagaatctcactcggtcactcaagctgaagtagtgcagtggcataatcacagctcactgcagcctcaacctcccaggcacaagcaatcctcccacttcagcctccacagtatatgggactatagataggcatgtgcca

SEQ ID NO: 110369 - DNA, 508 bp, Homo sapiens
ttctctaccccccgaggaggtaccgtccatgggctcaggagcactgggcttagagtccatgcccatgcattccgtgtctacaagggtactgcttcacagtggccgccgaggacgcacacgagtgcttcacactcatccaggggcatctcgattctcactgggaccctggataagaagcacttttgtagctaaagcaataaggatggtgcctgaggctgcatgaacccccggaacacttttaagtgaccaaaagcatgacaagactctccgacagagtgggcattgcttatgagagggggaagttcagctgtgttacagtatttcataggggacttgtacaatctaccttgtgcctctaaacacttctgacccctaagaatcgtggccggatgctaaggataatctttcgttgtcattgccagagataattattgcattaatgtaacaccatcctcatcatatcttattaggaagaattttagaataacagagcttctactgaatctca

SEQ ID NO: 110370 - DNA, 686 bp, Homo sapiens
gaatttcagtaattcagttaaagacatcttcaagtaagaacatgtcatattttgaggatataatttactattagcagtttatcatgggataaaaattttgcattaactagataacttcttcagaatgcttctgcagaggaaaattatccacaaaataaattttggtgcttgaaagaatatggtgttaagttcagaaataatttgttctgtaatttgagaacaagctcagaagtattatttctcagagagccaattatttatttgttttaaaaacatcaaccctgaatttgtggaagcatgagtaagagtagatatattattattcttggtatctcacttatgttggttatatttattttttgcatatgccttatacatgctttctttgggaactcaaggtagaatttacaggctggagatgctttttaactctcaggataataacctcagtctggtttcatgaactgtgctttcattaagtattgatatgtttaggaaaggagatgtcttaatatttaaatagcagttcaaactccagtttctttagtattcattgactttctaattgtcaaatttgtcaggacagtaaaaattgtattaacatatagtgtctagagaggaagttcttaaatttgccgattgtggtagctgttagaattggcagactgaagacattgatacacatg

SEQ ID NO: 110371 - DNA, 376 bp, Homo sapiens
ctgtgaacaaaccccaacccatttattctgtggttaatccatgttttaataggtgtaatgattcaactgcctccactaacaaatgagttcactggaatgtaagaatttgagtggatccattagaaacatctgtggatagacacagacccatggcatacatcctctatacattgaaatgcaggcaatgcaaagatgaagagaaaagatgtcagaggcaacaagcacagacgctcccccactgggttagagttctggcctgaagtggggccatctcaggcacccacacctgtgtctgctgtgcagtcctctaggactcccctgggagagttgtcggacatgccccagggccagctccctgcctgcccttaccttacct

SEQ ID NO: 110372 - DNA, 158 bp, Homo sapiens
aaaaagagattactttttaagctatttgtctatttttaaataagcatatgattgtgatactaaatcattttgacattattttaataactggcttttactttaaaaaaaactgaaagacttttatcgaggtgatcatttttattttttagatcacatgg

SEQ ID NO: 110373 - DNA, 755 bp, Homo sapiens
ctgatgaacatagatgcaaaaatcctcaagaaaatactaatgaaccaaattcaacaacatatcaaaaagaaaatccaccatgatcaagtgggtttcatgccattaatgcagggatgatttaatatacacaagtaataaatgtgatagagcacatacacagatttaaaacaaaaatcacatgatcatctcaatagatgcagaaaaaagcatttgacaaaatccagcatccctttatgattaaaaccctcagcaaaatcggcataaaggggacataccttagagtaataaaagccatctacaacacaaacaaagggaaacgcatcccatgctcatggatgggtacatatggaaccaaaaaagagcccaaatagccaaagcaagacaaaaaaaaaaaaaaaataggcgcatagaccaatggaacagaatagagaacccaaaaataaagccaaatacagccaactgatctttaacaaagcaaacaaaaacatgaagtggagaaaggacaccctattcaacaaatggtgctgggataattggcaagccacatgtagaagaatgaaactggatcctcatctctcaccttatacaaaaatcaactcaagatggatcaaagacttaaatctaacacccataaagattctagaagataatattagaaaaacccttctagacattggcttaggcaaagacttcatgaccaagaacccaaaagcaaatgcaacaaaaacaagaataaatagatgggacttaattaa

SEQ ID NO: 110374 - DNA, 408 bp, Homo sapiens
ccatggctttatgtaggtcagttagggcagcaaggaaggcttttccatgagatagaaggtatcaataagctggctggaaaaacaaggatcacattgctaacccacatcaggagagctggtgtgccttggctctcccatggcttgtttagagccagcagaatcatctccatgaaactaacacatgaaccttcaaaatgaaccaaatttcacaaagctaagagggaaactccatacaattttgttagcaagactccttaagcacattcactatttgtttcttgtccccttgctgtttctgggttcagaatccttctagagcccgtaagttcttgctgtcattcgcgcttattttcatccaatcagaggctgacatagagtttccaaccttagccggacactattcttgat

SEQ ID NO: 110375 - DNA, 319 bp, Homo sapiens
accagtgaattccctgtaagccatttagagaggttctttgtatattatattgtagaaaatcgacagaaagaacgagaccatttacaggaaggaacttggtgctcatttgatttggatactttgtgcgtctcctgtggcctttgaaatgaaaaatttccaggattgattgggtgtgtgttttaacttcgtagcacattcagtggactgttttgtagagcaggtggtcagcgctgtaacacttatccggccctgtctcagggactttgcatcatccacttggacctgttcccgtgggtttcctgtggttctgtcttacccg

SEQ ID NO: 110376 - DNA, 506 bp, Homo sapiens
ttatcattcatgacgagccaacttatgctcggagttccaaaaatgctatcaaagttcccattgttatcaatccaaatgcatatgacaatctagctatctacaaaagttttctgggaacaagtggagaactctcagtgaaggaaaaaaccacaagtgtaataagccatacttatgaagaaatagaaacagaaagcaaagtgcctgataacaccactagcaaaaccactgactgtcttcaaactaaagggttttcaaacagcacagagcataaaaggggctcagtggctcagaaggttcaagagtttaacaactgtctcaacagaggtcagtcttcaccacagagaagctatagttccagccacagctccccagcaaagatccagagagccactcaagagcctgtggccaaaatagaaggcactcaggagtctcagatggtgggcagcagtcagcaccagagagaaagcaagcacagtgctttctcagattgtggcttcaatccaacc

SEQ ID NO: 110377 - DNA, 290 bp, Homo sapiens
attgaagaggccactaaaacactcaatataaatatcttaatgcagtattttttaaaaatcaaattcaaagaacccatgatgaacaaaaatgccaaaattttaaattgaaggatcagtattgctgatactttgtctcaaactccaaaatggctctgcatgaacagcactattggtaatctcatctttatttaaaattgtgatattttattcatgattttcttttacattaatttttaaaaatattgtatttgtatattatttgacgactaagctttttgtcacccccttcc

SEQ ID NO: 110378 - DNA, 854 bp, Homo sapiens
ctaaaaaattccactgcatgctaatgagagaaacagtgaacatggcaaatcacaccttagtattcccatcatagtagtttcgaactcatgatactctgaaagattcttgggagttcccatgtttccaggccacaacttgagaacctcttggctagagtgtagctgagaagacgcagaaacacagagaaacaaaacaacagcatctggagaccgactaggcttagtgggagctgcaaaggaaatgatctgattcagtatgatgcaatacatcaaacctgggtgacctgggaaatttgcaatgcctcttgcagaatggggaaacccatgggggaaggcaatctgatggggaagttggcaatttctggtttgggtgatttaaatgtgaaagaacatagatatccaagtaaatacagaattaggtcacagaaactgagagactcattgtcaataaaactgaatgtttttaagttaatttaaaaatgaaatagacacatgtactgtaatttctatccagttcatcacaaaatttttattcatttttgtttcttttaatgagtggaacattataggagctcaactgtatttgaaaaatttacttttctaagatgaggagtgaatacatgggcattttccatgttattctttattcattcgatatgtctgggacaatttataatatattaaaaattttaagttcacatcacatgctaacccacacatatttctctctctctctctctctctcacacacacacacacacatacacacacagacacacactatatatattttccttagatcagatgccatcttatttccagatgctagtgctagagattcccatttgggaaaa

SEQ ID NO: 110379 - DNA, 576 bp, Homo sapiens
gtgcgcggtgttctagaggatcccggaagaacatgatcccagaaagcacacagagttacaacatagcaatagcccctccgagctcaacaaaaacatctattgtgtcatgggctgcaaagaaagaggtatgctgggaaccaataacaagatgctaggaatttttttttctgttctattttagcttgaaaaacttgttttccccatatgagttgtgcatttactcttggatcttaaaagaggacaatttattaatctgggtttaaatcctggcccagccacttggatgctgtttgattttaggcaaattatttgactttgtgctattgtgtcgtcatcgacatcatcatcatcgtcatcttttagctgaattctgtgactcttctagggcatttatggtagacagaaatctgttcttgtaatgtagaaatcagtcatttagtgtatctgaaaattcccatcttcaaaaactagggccagatttagtcattcttttactcttaactgttgctaccaggtcatacctaatttgtatttttccaagttacgtatattaaagtcatactaattggtgcctga

SEQ ID NO: 110380 - DNA, 663 bp, Homo sapiens
gaacatatagatcaatggaataaaattcagagcccagaaataaacatgtctattttcaactgactttgcaacaaatgtgcctagaccattcagtatggaaagaatagttgtttcaacaactgggactctgtcaacttgatatctacaaacaaaagaaggaagttgggtccctccctatcttacatcatgtatcaaaattaacttgagttaaattcataaatttaagaggaaaaagtataaaactcttagaataaaatgtgtaaaatcttcatgaccttggatttgatggtggtttttcatatgacactaatagcacaagcaacaaacaataaaaacaggtaaattggacatcaaaatttaaaaattttgaatctcaaaggacactatacagaaagtgaaaagccagtacagatgttcctcaaattatgttggggttacatgcttataaactcatcataaattgaaaatacactgttaaactgaaatgtatttagtacacccaacctaccacacatcatagcttagcctagcctaccttaaacatgctcagagcacttatgttagccttagttgggcaaaatcatttaaacacaaggcatattttataataaagtattaatagcttatataatgtattaattattatactgaaagtaaaaaaca

SEQ ID NO: 110381 - DNA, 243 bp, Homo sapiens
tttttttttaattcccaattgccctgagcttcagaagtatccacaagagtcacaaggtaagacatttggcaaaggaaggcaggtagtaatcttttcaagcaacatatacatcatatgtgaacagaaaatgacaagtcacagatgggaaatagctcacagccaacagccaaggatcgaaaccaacaagaagcaattcttgtagctcccactggtagtcaagaatgaaagagaagctcctttcac

SEQ ID NO: 110382 - DNA, 397 bp, Homo sapiens
cccgggaggagttagcttttaaggtaggatcttttggctattggcataagaaaaaaaagtcagttccacttagtgacattttaagagccaagaattttttttttaagatagtagcagggtaaaccagaaagatcactagatgtaaaggcaaaatacctggattctacttcctcttaacctctctatatctcagcttctcttctgcgaaatgatggcattgaactagctagtctctaaggattcttttagctttagctttctatgttttacacttatgctaagaacatagtagatgttcattataataatgaaaaattggaaatcacttcaatgttcatcaaaatgggattggttaaaccaattatggtgtgaacgcatgcacacacacacacacaca

SEQ ID NO: 110383 - DNA, 522 bp, Homo sapiens
attttcatggtcaatacaacagaggggtgtcgttcctctttgaagcgtttcccaaccgacagtgacgggtttctaccagggagatgttacggcaggcagcgttttggctctgacggccctgttcgttcctgcctccctgggattttccatcccgaagtgctgttcctcactcagcacaacctagaaggtcccacaaaaagctattctttggggcttatttgcaacgcaggggaacccatgaattatgcaaatcgaggtccaaggaggcgttgttggcttgtccaccttcactcagttttagggctggggggccgaatggcggggcaagcagaagaaacataaccaacagaacgacatggcgaaggttgtaggttccaaaaagggcgacagggacaagggctcgagctgaggaatgccttctgaggaccccatagccaaatttttgctgtttccagcctctttttgactcttctcttagaacgtcaccatgctaacttgtggtttggggcccacccatgtttc

SEQ ID NO: 110384 - DNA, 417 bp, Homo sapiens
aactccgactcaaaaaaaaaaaaaaaaaaaagatttatggtttattcacattttaaaataatattatcaaattaaatacagagaataggaagcatcttgtcagtgaacttttaaaaatctgatattggtaaaccactccccctacaacctgttcctgttcatgattgtttaggattattatttataacatttaggttatatactccccaaaaagactcaaaaactatccttgactccttcattcaaaattgtcttctcggttcattaaattgtatttgcaaacagtgtttatcttgttaaattgtttgtaatggtggtaaatgttggcacagagattttcccatctgaagccagggaacctgctgctctctgccctgctctcctgtttcccggctttgtttgctcctatggccatcg

SEQ ID NO: 110385 - DNA, 2595 bp, Homo sapiens
  misc_feature (295)..(295): n is a, c, g, or t
  misc_feature (361)..(361): n is a, c, g, or t
  misc_feature (413)..(413): n is a, c, g, or t
  misc_feature (416)..(416): n is a, c, g, or t
  misc_feature (438)..(438): n is a, c, g, or t
  misc_feature (505)..(505): n is a, c, g, or t
  misc_feature (1165)..(1165): n is a, c, g, or t
  misc_feature (1452)..(1452): n is a, c, g, or t
  misc_feature (2086)..(2086): n is a, c, g, or t
  misc_feature (2238)..(2238): n is a, c, g, or t
  misc_feature (2585)..(2585): n is a, c, g, or t
  misc_feature (2593)..(2595): n is a, c, g, or t
ctaataaagagcatcaatgaaaactctatagcgaatgtcatatttaactgtgaaagaccaaatgcttttcctctaagattatcaacaaggcaagaatgcctgctcttagaactgattagcattgtactagaggttctagttattgcagtaaggcacgaagaaggaataaacccattcaaattagaaagcaagaagtaattctccattaaatttttaaatttttatttatttatttatttatttttattttgaggtggagtctcactctgttgcccaggctggagtgcagggcacnatcttgactcactgcaacctctgcctcccaggttcaagcgattctcctgcctcagcctcctgagtngctgggactacaggtgcgtgccaccatgcctggctaattttttgtatttttngtngagacggggtttcacggtgttngacaagatggtctaaatcttgtgaccttgtgatccgcctgtctcggccccccgaagtgctgcgattncaggcatgagccaccgcaccagccttaatttttaaatttttattattaattttttgagtctccctgtcatgcaggctggagtgcagtggttcaatcatggctcactgcagcatcaaccttccaggctcaagcgatcttcctgcctcagcctccgaaataccaagtaggtgggactacaggtgtgcaccaccacacccagcaattttttttttttgagagagaaagacattccctctatgttgcctaagctggctttgaactcctgggctcaagtgatcctcccatcttggcctcccaaagtgctggaattaaaggtgtgagccaccatgctggcagacaacataatcgtcatctgccattaaacagacatcctaaatttgtaggattagaaaatcctatgaaatctacaaaactgctagaattgatgagtgaatgttgcaaaataattctaaaatgtatatagaaatggaaaagttataaagtagccaaaattacttcataaaagaacaaagttaagggatgtatgttacctgatttgaagggttattatgaagctatcataagcaagacatcctagtattggtgtaaaattagacaaatagatcaatggaacatcatagtgacttgagagatcaactcagacatatttggttaactganttttggcaaaggtgcaatggtaaatggagaaagaataatctttttaacacatgctggaacaattggctagggatttttttaaaaaaagaaaaatgggaaaaaagaacattgacttctattgcaaattattacaaaactaacttgtatcatatatataaatttaattaaaaatgtatcatttcgagacctaaatgtaacatgtaaaattataacatttctggaaaaaattgagaaaatatttgttatcttcatttaggtaaagattttttagatatgacatcaaaaanacagtccataaaagaaaattttgataagttggagtgcatcaaaacataaaactttggtttcttccaaagacaggattaacagaatgaaaagacagcttacatactgggagaaaatatttgcaaatcgcagtccagtaaagagctttatctgcaatatataaagaactgttggaactcaataggaagattgacttctggcataacagcatgaggagttctgctgacacattccccggtgaaactagtgaaagttattattttttctgtctctgctgcttgaaggagaaaaacattgttaaaatctccagccatttagagtctctggaaatggtcctcaggacaaagagcaaatgaagaaacatctcttttagaaaatttagtaagaaaggtgagattctgtgatatttgaaccaagacttcttccaccctccccactcccagctcagcaaggtagtgactccactctagataactgcagccaacaacacaaggctctttccctccttggttcccaatcaaaggctttttttttttttccagtagagatagcacttaacaactctcatcctgccccttcttgcctgttgctgaggttaaatcccaggtgaatgtgactgagaggtggaagctcctntcttctaccgaactcttactcttggaatggaggttctaccttaggtgtagcaaacagaaaatattgggtccttataacccttctcccatgcagagaatattgagcccttattaaggtggtaggtccatgccagaagaggcaagctgagaggnccagactgcagctactccccattcccactgaattctcagctcctagtatgtgagaatcacttggagagaagcttgccattgtccttactctccagctccaaagtcagggaaagatggaaaggagccctaccagtaccactgtcatccccagtgactgtaggcatacccaaagctgtaccatcctgaagagcaacatcagaggctggacactgtaggggagaaatagacttcactaaaataattcaaccagtcactagaccagcagacaagcaacaacaaagctcagagtggggtattcattatccagtgttcctacaatatattatctaaaatattcagtttccaanaaaaaaannn

SEQ ID NO: 110386 - DNA, 770 bp, Homo sapiens
ctatgagataattgacattagagaaacacacattttagcagaacccactgtacttctttcttcattctctgagtctatctctccaagtactgctatgcattaaacagcaatagcagcaaaacctgcctcataataaccagcaaaaaatcaagcagatatcaaataagcattaaaaatttcaggtcagcatttatgtcaagacagcatgtatataccacaatatatattaaatccaaagagaaggaagaataaaagtgtgactagaatgtccttagtcacttaatccttcttgtgccatcaaaagcccctcactccctcgctatggctcctgacttcagaagccctcagctgctgattgagtagacctggggtgttcaatcacaagtggagggcagaggacaacatagtttttaatgccaccaaaattcgaggtagtaaggtaagtatggtttttaaaaggtacacacgtaaggttggatatttataaatacatacgaaacatacatagggcatgacaattaaaaaatgaaaagttttgacaatatgacactagggaaacataaagccactgaagataatattgggtatttttgggaggaggaagaaatgcagatgattaggcttgataaatgcttattgaaaggaagatcgatttagcagggttttttgtagtttttacttagggcatattacacataacggtcatatcggttctaatagagttggggaattatggaacaactaaaaagctgtgctattcaacagcaaat

SEQ ID NO: 110387 - DNA, 429 bp, Homo sapiens
atgagggacttctgtttttagcaattgcaaactcagaaatcaagtgacacctcctcctaaggatgagaaaactcagactaaatatgaaaaatatgcttcaaagcttgaaaaagctcatgatatagtaaatatgttctcagtcagagtccagggaaaggtagaggccacaggaggtgagcctatggtttaggactaggggtgtctgccagttacaaaggagacgattaagcagcaaggtgcttttggagcatcacaggactaggagggcagaaattagagtccgtggtctgccaactgagcacatcctggtgaaccttttacttgaggttgggatcttgaagggaagcacctgaagagtaaatgtgaaccgaagcagacaggccctcagagagtgtgcagtttaccctcagatcatctcagtcactgacc

SEQ ID NO: 110388 - DNA, 792 bp, Homo sapiens
taattatgcttatgtgaatgtctcagcttgattgtgagaattggaattctgcagggctttgcccaaaagtaggtgcttggccttactattatgatagtaagcacctacaaaaaaatggaattaacagagctgcgtctgcaaaatcatgcactactgaaacccccaagtttccaagcttttcaaagtttcctgaccaaacacgttggtaaatgttatttcactatagccttgcaggccggggtgatgcatgtggacacacgtggtaggtgactttgctactactggactgaaaggaatacaaatgatctcatcagttaacccacagcacaggacaaaatactggattcttttgattcagcatgttttcttgatgtcagatgtcctgtgaattagacgtagtcagtgagaaaaattaccacaggagaatttagtaagggatttttgatgccccctagaggtagtgggaggtaaaagaattctcatggtcatcacaaattcttatttagaacactgtcacatgtggggaattttgccacaccagagtcaaagcagttctttactgttctaagcttctcattacagatgagaaaattgaagctcaagatggttagcttgcccagagtttgccttaactcacattttaattttacccacgagaagagtttgaacttaagaattgaaattcatgtaaatggcattgcttatcagatatatgataaggtgtataaaactttcaattttggagtatcctaaagcacttgccatgttaattaaaggtaagttttaagggga

SEQ ID NO: 110389 - DNA, 442 bp, Homo sapiens
tttctttggcccctaggcaattcctgtttagtccaaggcgtaaggggaggggctgtatttctgcatctggcccccaggtgaatgcagctgttttaaactgcgagcgctcagctatcctggaaaaggggaagtggccagagagttcattgaagctgctcattgaatggaatctgagccgcttctaatggtctttgaaggctccacaacagtggttttcaaacctgagtgtgcatctgaatcacctggaacacttgttaaactacagattgctggggcaaccctcagagtttccaattcagtaggtataggatagggtccaagaatatgcgtttctaatgcctgtccaggtgatgctggtggtgctagtctggggactaccatttgagaaccactggtctaggaggaaggacatagtgatggcagatggtgcctgtttggtcaa

SEQ ID NO: 110390 - DNA, 499 bp, Homo sapiens
tcttccccaaggagcccacaggtagagggaaggggcacccctgccgcctcctcagagctggtcttgagtctttctttctccccctgactattcaagagggccccctacctagagacaaatcccccaggagaaatgttttctgggtataaccctgagtgtatataagacccgggggtatctgaaagtcacagcaagactgggatgaaggggaacaaaataagtaattgacaagcagtgtgggtcccaccaggaaacaagagaaatccagtcccgaatcacagattgaggacaaagcaaatataaggcatgttcatcacggaaggtggctgccgagtacacaggtgtccactgtacaaagccttgacgtttccagatgttcgaattttcagagtaaaatgttggggaggggatatccccaaagctcagagatcacagctactgtagtgatgctaaaaataagggggaaatggctgggcacagtggctcacgcctattatcc

SEQ ID NO: 110391 - DNA, 1383 bp, Homo sapiens
cagaccaggttttggccccggtttgctgcagtctacagagctggtgccccctgaccctcagcagccacaggcctccgccgaagccccatttgctgccagagggatctactcggaggagatgccgtcggtggcccggcctcggcctgtcgggggtaccacaggctcccagatccagcacctgacacaggtggggattgccagcagaattggagctcagccagtggaaatcccgccaagcagaggcagccagtatggggggccaggctggccttcgtacggggaggacgaagcggggcgaagagaggccgtgccaaggacttcaggcagggagccctcagctccttccgggaacctcccccaccggggactgcagggccctgggctgggttaccccaccagctccacggaagacctccagcctggccactcctcggcctctctcatcaaagcaatccgcgaggagctcctccggctctcccagaaacagagcaccgtgcagaacttccacagctgatcggcctcgcctcgcagatttgccaagtatccgcttcctgtggaagcaagaccaaaaggaaatcaactgagtgggtgtttggaagaggaaggagcaactctcgggcagcctgcccaagggagggagcaagttgcaatttagaagatgccatacgtcgtgtgacagctcatgagcctttcactgggctggcaattgtctgaacacttgggttcagttgaaatatatgtattttggccaaaagccagcagcacttcacaaaaacaaaacacaaacctaagctaacaaaatgactgcattcgtctcttttttaaaggtagagattaaactgtatagacagcatagggatgaaaggaaccaagcgtttctgtgggattgagactggtacgtgtacgatgaacctgctgctttgttttctgagaagaggtttgaagacattttattaacagcttaatttttctcttttactccataggaacttattttaatagtaacattaacaacaagaatactaagactgtttgggaattttaaaaagctactagtgagaaaccaaatgataggttgtagagcctgatgactccaaacaaagccatcacccgcattcttcctccttcttctggtgctacagctccaagggcccttcaccttcatgtctgaaatggaactttggctttttcagtggaagaatatgttgaaggtttcattttgttctagaaaaaaaaaatccctcccaaagtggggcaaaaagctttatatttatttgattatccaaaatacagatcaaagtttagatctcaaaaaaaaaaacaacaaacaaaaacacgaaacacacataaacaaaaacaactcaacaaacacaaaccaggggg

SEQ ID NO: 110392 - DNA, 613 bp, Homo sapiens
gcctgtgacgtcagactccagaccatgtatttcctgactcccatcttggtagccattctctgcattttggttgtgtggatctttaaaaatgccgacagaagcatggagaaaaagaagggggagcctagaaccagggccgaagctcgcccctgggtggatgaagacttaaaagacagcagtgacctgcaccaagcagaagaagatgctgatgaatggcaagaatcagaagaaaatgttgaacacatccccttctctcataaccactatcctgagaaggaaatggttaagaggtctcaggaattttatgaacttctcaataagagacggtcagtcaggttcataagtaatgagcaagtcccaatggaagtcattgataatgtcatcagaacggcaggtttgtaattgcagatggggtctttggaaatgttagtcaccttactggtgtgactccaacaatggaaaaatgtcaaagtttaaacatagcgaataaagcctagagtgatatgtttatctataaagtcttacccaaatgctgagtgagtgccagaaacacaatgacttctactttccacattttgactattacaagcttcttggaagaagatgtgacaat

SEQ ID NO: 110393 - DNA, 907 bp, Homo sapiens
gcctgtgacgtcagactccagaccatgtatttcctgactcccatcttggtagccattctctgcattttggttgtgtggatctttaaaaatgccgacagaagcatggagaaaaagaagggggagcctagaaccagggccgaagctcgcccctgggtggatgaagacttaaaagacagcagtgacctgcaccaagcagaagaagatgctgatgaatggcaagaatcagaagaaaatgttgaacacatccccttctctcataaccactatcctgagaaggaaatggttaagaggtctcaggaattttatgaacttctcaataagagacggtcagtcaggttcataagtaatgagcaagtcccaatggaagtcattgataatgtcatcagaacggcaggaacagccccgagtggggctcacacagagccctggaccttcgtggttgtgaaggacccagacgtgaagcacaagattcgaaagatcattgaggaggaagaggagatcaactacatgaaaaggatgggacatcgctgggtcacagacctcaagaaactgagaaccaactggattaaagagtacttggatactgcccctattttgattctcattttcaaacaagtacatggtttcgccgcaaatggcaagaaaaaagtccactactacaatgagatcagtgtttccatcgcttgtggcatcctgctagctgccctgcagaatgcaggtctggtgactgtcactaccactcctctcaactgtggccctcgactgagggtgctcctgggccgccccgcacatgaaaagctgctgatgctgctccccgtggggtaccccagcaaggaggccacggtgcctgacctcaagcgcaaacctctggaccagatcatggtgacagtgtaggcagggcccccca

SEQ ID NO: 110394 - DNA, 325 bp, Homo sapiens
tatgtaacaaacctgcatgtgtacccctgaacttaaaagttaaaaaaaaaataaaatatatgtatcctcaaaataatttttaaaaagtaaaattgctgtgaagggccaggcacggtggctcacacctgtaatcccagcactttgggagcctgaggtgggtggattatctgaggtcaggagtttgaaaccagcctggccaacatggcaaaaccccatcactaataaaaataaataaattagccgggcatggtggcaggtgcttgtagtcccagctacttgggagactgaagctagagaattgcttaaacccataaggcaaagcttg

SEQ ID NO: 110395 - DNA, 3352 bp, Homo sapiens
acttcccaattctgtgccttctcaggtccctgagcaaaatgggaaatggttcagtgaaacctaaacattctaagcacccagatggacactctgggaacctcaccactgatgctctgcggaacaaggtgacagagctggagagagagttgaggaggaaggatgctgagatccaggagcgggagtaccatttgaaggagctgcgggagcagctgtcgaagcagactgtggccattgctgaactcacagaggagctccagaacaagtgcatccagctgaacaagctgcaggatgtggtgcatatgcagggaggaagcccgcttcaggcctctccagataaagtgcctcttgaggtccaccggaagacctctggattggtctctctccatagcaggaggggagcaaaggctggcgtgtctgctgagccaacaacccggacctatgacctgaacaaaccccctgaattttcctttgagaaagcaagagtcagaaaagactccagtgagaagaagctcattacagatgcccttaataaaaatcagtttctgaaaagactggatcctcagcagatcaaagacatggtggaatgcatgtatgggagaaactatcagcaagggagttacattattaagcaaggagaaccaggaaaccatatctttgtgctggcagagggtcgactagaggtgttccaaggggagaaattgctgtcctccatccctatgtggaccacatttggggagcttgccattttatacaattgtacaaggactgcctctgtgaaagctattaccaatgttaaaacatgggcactagatcgagaggtattccagaatataatgaggaggacagcccaagctagagatgaacaatacagaaacttcctcagaagtgtatccttgctgaagaatttacctgaagataaattaaccaagatcattgactgcttggaagtggaatactatgacaaaggagattacatcattagagagggcgaggaaggaagtacctttttcattttggcaaaaggaaaggtaaaagtaacacagagcacagaaggccatgatcaaccacagctgataaaaacactgcagaaaggagaatactttggagaaaaagctcttatcagtgatgatgtcaggtcagctaacattattgctgaagaaaatgatgttgcatgcctggttatagatcgagaaacattcaaccaaactgtcggtacatttgaagagctgcaaaaataccttgaaggatatgtggcaaacctgaaccgtgatgatgaaaaaagacatgcgaagcggtccatgtctaactggaagctgtccaaagcactctctctggaaatgattcagctgaaggagaaggtggccagattttcctcatcatccccattccagaaccttgagattattgcaacactgggcgttggtgggttcggaagagttgagcttgttaaagtaaaaaatgagaatgttgcttttgctatgaagtgtataaggaagaagcacatagttgacaccaagcagcaggagcatgtctactcagagaagaggatcctagaggagctgtgctctccattcattgtgaaattatatcgtactttcaaggacaataagtatgtatacatgcttctggaggcctgcttaggtggggagctctggagtatattaagggacagaggcagctttgatgaacccacctccaaattctgcgttgcttgtgtgacagaagcatttgattacctgcatcgactaggtattatctacagagacttgaaaccagaaaacttaattctagatgctgagggttaccttaaattggttgactttggatttgcgaagaaaatagggtctggacagaaaacatggacattctgtgggactccagaatatgtagctcctgaagtcattctcaacaagggacatgacttcagtgtggatttctggtcactgggaattctagtgtatgagctcctaacgggcaacccacccttttctggggttgaccaaatgatgacctacaatttgattctcaaaggaattgaaaaaatggattttcccaggaagataacacgacgacctgaggatttgattcggaggctttgcaggcaaaatccaacagaaaggctgggaaatctgaagaatggaataaatgacattaagaaacacaggtggttaaatggttttaattgggagggactgaaagcacggagccttccatcacctttgcaaagagagctcaagggacccatagatcacagctactttgacaaatatcctcctgaaaagggaatgcctccagatgagctatcaggctgggataaagacttctgacagaagaaaagttgattactgcctgtactctacagaagaggacctcaaggatcaataatccaacacattattttcttttcagagtattataatatctttggaagaccattagggaaaagaaattcctgcacaatgggaagaggagaatggtgtggatatggttctgagttatagtgtcttatttagatgctgtgaattattgatgtattacattatttgcttttctcaactgctagaggctaccccattttcctttccacaatcagagccatttttgttaaagtggcagttttttctgcaatctattgttccattccaatcatatccttctcgtttgagtactactaacgtttaaaaagggtcttgcccttgaataactaagtcatacaaatagaaggaaaaacaatggtgaattttggagagctccccagctctcagcaacttcatataagcatggtggtatcttaaaatggtggtttgcagaaaccatggtagccaacagaacctcctgactttcacctgcttttaacctgaaaatatattaatacgcctctgacatgagtccagggagaggcaagattgagcaatagtcagtggcaccatttcctaaagtaactgaatcaatcaatccagtcaggtaattattttctattggggaacttagaaaaaaaagtaaagcaagaaatattttctctcctttatgatcagtgataccttagagacttttcgaaagtccttgttaaagatagttacaatgtgtggttaaatgatgctaaaatattttcacaaccagagtagaaaacgtgctggaacaaaattgcgaaggcttttgcctcccagtaaatagaaaggaaaatatattctagtaggtaagactgctgactctttgaaaatctgaggtattttgaaaaattctgtgatagttgctattaataaaccaaaattgtatagaatcatcgttaatttttaatataaatcccattgacaaatgttgatgcactgtagtcactgctgagttaatagcg

SEQ ID NO: 110396 - DNA, 355 bp, Homo sapiens
acagggatggaagttctcactttgggcttcagcttttaggcttgaagatggggttttgccgaggacacacccccatctgcctagaatttctctgcctcctgcctctatcaatgtgtgtgtgtgtgtgtgtgtgtgtgtgtgtgtgtgtagggggggaggcagagggagggagggagagagtgagagagagagagagaacttacaaaccaccaagaaaaatatggacaactctctagaaaaataggcaagagactaacacaggtacttcacaaaagagggtattcaaatggtcaataaacatatgaaaaggcagttaaaccttattagcaatgaggaaattttaattaaaaccaca

SEQ ID NO: 110397 - DNA, 2536 bp, Homo sapiens
gcggccgcaacgtgtcgagagccgtaagtaaagtgtcgcaaagcagaaggaaggcgggagtcccgactgcaaacattgaggaaagccaggcagtagaggccgctatggcgaacgttccgtgggcagaggtctgcgagaaattccaggcggcgctcgctctgtcgcgggtggaactgcataaaaatccggagaaggaaccatacaagtccaaatacagcgcccgggcgctactggaagaggtcaaggcgctgctcggccctgcgcctgaggacgaggatgagcggcctgaggccgaggacagcccgggtgccggtgaccacgccctggggctgccggctgaggtggtggagcccgaggggcccgtcgcccagcgagcggtgaggctggcagtcatcgagttccacctcggggtgaaccacatcgacacggaggagctgtcggcgggggaggagcacctggtgaaatgcctgcggctgctgcgcaggtaccggctctcgcacgactgcatctctctctgcatccaggcgcagaataacctgggtatcttgtggtctgaaagagaagaaattgaaactgcacaggcttacctagagtcatcagaagcactatataatcagtatatgaaagaggttgggagtcctcctcttgatcctactgagcgttttcttcctgaagaagagaaacttactgaacaagagagatcaaaaagatttgaaaaggtttatactcataacctatattacctagctcaagtctaccagcatctggaaatgtttgagaaggctgctcactattgccatagtacactaaaacgccagcttgagcacaatgcctaccatcctatagagtgggctatcaatgctgctaccttgtcacagttttacatcaataagctatgctttatggaggccaggcactgtttatcagctgctaatgtcatttttggtcaaactggaaagatctcagccacagaagacactcctgaagctgaaggagaagtgccagagctttatcatcaaagaaagggggaaatagcaaggtgctggatcaaatactgtttgactctcatgcagaatgcccaactctccatgcaggacaacataggagagcttgatcttgataaacagtctgaacttagagctttaaggaaaaaagaactagatgaggaggaaagcattcggaaaaaagctgtgcagtttggaaccggtgaactgtgtgatgccatctctgcagtagaagagaaagtgagctacttgagacctttagattttgaagaagccagagaacttttcttattgggtcagcactatgtctttgaggcaaaagagttctttcagattgatggttatgtcactgaccatattgaagttgtccaagaccacagtgctctgtttaaggtgcttgcattctttgaaactgacatggagagacggtgcaagatgcataaacgcagaatagccatgctagagcccctaactgtagacctgaatccacagtattatctgttggtcaacagacagatccagtttgaaattgcacatgcttactatgatatgatggatttgaaggttgccattgctgacaggctaagggatcctgattcacacattgtaaaaaaaataaataatcttaataagtcagcactgaagtactaccagctcttcttagactccctgagagacccaaataaagtattccctgagcatataggggaagatgttcttcgccctgccatgttagctaagtttcgagttgcccgtctctatggcaaaatcattactgcagatcccaagaaagagctggaaaatttggcaacatcattggaacattacaaatttattgttgattactgtgaaaagcatcctgaggccgcccaggaaatagaagttgagctagaacttagtaaagagatggttagtcttctcccaacaaaaatggagagattcagaaccaagatggccctgacttaatccttgtttttaaagaaaggaaatgtgcaatattgaagtgatctttttccctagtcagacaggcccaattccattgtgatgtttacctttatagccaggtgagtgcagtttgaacttgagatacagtcaactgagtgtttgctaggatcctaaggaacataaagttaattaaaaacttacacctaattatgtaaattgccttgttaaagacatgtgatttgtattttagatgcttgtttcctattaaaatacagacatttctaccctcagtttctaaatgtagactatttgttggctagtacttgatagattccttgtaagaaaaaatgctgggtaatgtacctggtaacaagcctgttaatatattaagattgaaaaagtaacttctatagttactccttctaaaatatttgacttcctaaattccccccacccaaaatctttcccttttgaaaatactaaaaactaagttatgttattataaagtgtaaaatggtttgtcttaattataggagaaaaaggccttgttagaaataaaataaactgacttatttcactaatgaaaa

SEQ ID NO: 110398 - DNA, 435 bp, Homo sapiens
cccatattaaaagaaattatgcaagtatcagttgcaaataaagctgtgtgatagttgcattcactgttgtttatttccccaatagctatgctttatggaggccaggcactgtttatcagctgctaatgtcatttttggtcaaactggaaagatctcagccacagaagacagtaagtttacctttgcatgttttacatagcttttaaaaaaagttttattttgaaattattttaaacttttgaaaagttgcaagaacagaagagctatcatatgcccttctaaatgcaccaatttttagtattttcctcgcttggaatcaaattttatttttctctctgaaccattggagagaaggttacatacattaggctcttttaccctttcatactttagtatatatttcctaagaagaatattttcttacataatcataga

SEQ ID NO: 110399 - DNA, 367 bp, Homo sapiens
cagctattctcaagatggcttctgaatttgccataatggaaagatacatttaatgctgcaattttaaagttatagccaaccatttaaagcctttcagctatgctttatggaggccaggcactgtttatcagctgctaatgtcatttttggtcaaactggaaagatctcagccacagaagacactcctgaagctgaaggagaagtgccagagctttatcatcaaagaaagggggaaatagcaaggtgctggatcaaatactgtttgactctcatgcagaatgcccaactctccatgcagaggctgcgtgagccgagattggaccactgcactccagcctgggcaacagagcgagactccatctctaaa

SEQ ID NO: 110400 - DNA, 2032 bp, Homo sapiens
  misc_feature (67)..(67): n is a, c, g, or t
ctgaagatacataactgctaccaagtacaatgtcatagacaagaacatggactctggagcccaactncctgggttcaaatctcagctctctgactaaccagccgtgggaactcggtcaagttagtcagagagtctccgtcgaactagttcgacggagactctcttgttcagaagagaaacttactgaacaagagagatcaaaaagatttgaaaaggtttatactcataacctatattacctagctcaagtctaccagcatctggaaatgtttgagaaggctgctcactattgccatagtacactaaaacgccagcttgagcacaatgcctaccatcctatagagtgggctatcaatgctgctaccttgtcacagttttacatcaataagctatgctttatggaggccaggcactgtttatcagctgctaatgtcatttttggtcaaactggaaagatctcagccacagaagacactcctgaagctgaaggagaagtgccagagctttatcatcaaagaaagggggaaatagcaaggtgctggatcaaatactgtttgactctcatgcagaatgcccaactctccatgcaggacaacataggagagcttgatcttgataaacagtctgaacttagagctttaaggaaaaaagaactagatgaggaggaaagcattcggaaaaaagctgtgcagtttggaaccggtgaactgtgtgatgccatctctgcagtagaagagaaagtgagctacttgagacctttagattttgaagaagccagagaacttttcttattgggtcagcactatgtctttgaggcaaaagagttctttcagattgatggttatgtcactgaccatattgaagttgtccaagaccacagtgctctgtttaaggtgcttgcattctttgaaactgacatggagagacggtgcaagatgcataaacgcagaatagccatgctagagcccctaactgtagacctgaatccacagtattatctgttggtcaacagacagatccagtttgaaattgcacatgcttactatgatatgatggatttgaaggttgccattgctgacaggctaagggatcctgattcacacattgtaaaaaaaataaataatcttaataagtcagcactgaagtactaccagctcttcttagactccctgagagacccaaataaagtattccctgagcatataggggaagatgttcttcgccctgccatgttagctaagtttcgagttgcccgtctctatggcaaaatcattactgcagatcccaagaaagagctggaaaatttggcaacatcattggaacattacaaatttattgttgattactgtgaaaagcatcctgaggccgcccaggaaatagaagttgagctagaacttagtaaagagatggttagtcttctcccaacaaaaatggagagattcagaaccaagatggccctgacttaatccttgtttttaaagaaaggaaatgtgcaatattgaagtgatctttttccctagtcagacaggcccaattccattgtgatgtttacctttatagccaggtgagtgcagtttgaacttgagatacagtcaactgagtgtttgctaggatcctaaggaacataaagttaattaaaaacttacacctaattatgtaaattgccttgttaaagacatgtgatttgtattttagatgcttgtttcctattaaaatacagacatttctaccctcagtttctaaatgtagactatttgttggctagtacttgatagattccttgtaagaaaaaatgctgggtaatgtacctggtaacaagcctgttaatatattaagattgaaaaagtaacttctatagttactccttctaaaatatttgacttcctaaattccccccacccaaaatctttcccttttgaaaatactaaaaactaagttatgttattataaagtgtaaaatggtttgtcttaattataggagaaaaaggccttgttagaaataaaataaactgacttatttcactaatgaaaa

SEQ ID NO: 110401 - DNA, 2661 bp, Homo sapiens
  misc_feature (2545)..(2545): n is a, c, g, or t
gcggccgcaacgtgtcgagagccgtaagtaaagtgtcgcaaagcagaaggaaggcgggagtcccgactgcaaacattgaggaaagccaggcagtagaggccgctatggcgaacgttccgtgggcagaggtctgcgagaaattccaggcggcgctcgctctgtcgcgggtggaactgcataaaaatccggagaaggaaccatacaagtccaaatacagcgcccgggcgctactggaagaggtcaaggcgctgctcggccctgcgcctgaggacgaggatgagcggcctgaggccgaggacagcccgggtgccggtgaccacgccctggggctgccggctgaggtggtggagcccgaggggcccgtcgcccagcgagcggtgaggctggcagtcatcgagttccacctcggggtgaaccacatcgacacggaggagctgtcggcgggggaggagcacctggtgaaatgcctgcggctgctgcgcaggtaccggctctcgcacgactgcatctctctctgcatccaggcgcagaataacctgggtatcttgtggtctgaaagagaagaaattgaaactgcacaggcttacctagagtcatcagaagcactatataatcagtatatgaaagaggttgggagtcctcctcttgatcctactgagcgttttcttcctgaagaagagaaacttactgaacaagagagatcaaaaagatttgaaaaggtttatactcataacctatattacctagctcaagtctaccagcatctggaaatgtttgagaaggctgctcactattgccatagtacactaaaacgccagcttgagcacaatgcctaccatcctatagagtgggctatcaatgctgctaccttgtcacagttttacatcaataagctatgctttatggaggccaggcactgtttatcagctgctaatgtcatttttggtcaaactggaaagatctcagccacagaagacactcctgaagctgaaggagaagtgccagagctttatcatcaaagaaagggggaaatagcaaggtgctggatcaaatactgtttgactctcatgcagaatgcccaactctccatgcaggacaacataggagagcttgatcttgataaacagtctgaacttagagctttaaggaaaaaagaactagatgaggaggaaagcattcggaaaaaagctgtgcagtttggaaccggtgaactgtgtgatgccatctctgcagtagaagagaaagtgagctacttgagacctttagattttgaagaagccagagaacttttcttattgggtcagcactatgtctttgaggcaaaagagttctttcagattgatggttatgtcactgaccatattgaagttgtccaagaccacagtgctctgtttaaggtgcttgcattctttgaaactgacatggagagacggtgcaagatgcataaacgcagaatagccatgctagagcccctaactgtagacctgaatccacagtattatctgttggtcaacagacagatccagtttgaaattgcacatgcttactatgatatgatggatttgaaggttgccattgctgacaggctaagggatcctgattcacacattgtaaaaaaaataaataatcttaataagtcagcactgaagtactaccagctcttcttagactccctgagagacccaaataaagtattccctgagcatataggggaagatgttcttcgccctgccatgttagctaagtttcgagttgcccgtctctatggcaaaatcattactgcagatcccaagaaagagctggaaaatttggcaacatcattggaacattacaaatttattgttgattactgtgaaaagcatcctgaggccgcccaggaaatagaagttgagctagaacttagtaaagagatggttagtcttctcccaacaaaaatggagagattcagaaccaagatggccctgacttaatccttgtttttaaagaaaggaaatgtgcaatattgaagtgatctttttccctagtcagacaggcccaattccattgtgatgtttacctttatagccaggtgagtgcagtttgaacttgagatacagtcaactgagtgtttgctaggatcctaaggaacataaagttaattaaaaacttacacctaattatgtaaattgccttgttaaagacatgtgatttgtattttagatgcttgtttcctattaaaatacagacatttctaccctcagtttctaaatgtagactatttgttggctagtacttgatagattccttgtaagaaaaaatgctgggtaatgtacctggtaacaagcctgttaatatattaagattgaaaaagtaacttctatagttactccttctaaaatatttgacttcctaaattccccccacccaaaatctttcccttttgaaaatactaaaaactaagttatgttattataaagtgtaaaatggtttgtcttaattataggagaaaaaggccttgttagaaataaaataaactgacttatttcactaatgaaaaaaaaaaaanaaaaacaacattgcggccatcgaccaaaacttaaacaatcgtgggggggccgaggtcagaaagggccacggcccgaagacggcagacgggtgtctcacaaagcgggccacgttgaa

SEQ ID NO: 110402 - DNA, 1695 bp, Homo sapiens
gcggccgcaacgtgtcgagagccgtaagtaaagtgtcgcaaagcagaaggaaggcgggagtcccgactgcaaacattgaggaaagccaggcagtagaggccgctatggcgaacgttccgtgggcagaggtctgcgagaaattccaggcggcgctcgctctgtcgcgggtggaactgcataaaaatccggagaaggaaccatacaagtccaaatacagcgcccgggcgctactggaagaggtcaaggcgctgctcggccctgcgcctgaggacgaggatgagcggcctgaggccgaggacagcccgggtgccggtgaccacgccctggggctgccggctgaggtggtggagcccgaggggcccgtcgcccagcgagcggtgaggctggcagtcatcgagttccacctcggggtgaaccacatcgacacggaggagctgtcggcgggggaggagcacctggtgaaatgcctgcggctgctgcgcaggtaccggctctcgcacgactgcatctctctctgcatccaggcgcagaataacctgggtatcttgtggtctgaaagagaagaaattgaaactgcacaggcttacctagagtcatcagaagcactatataatcagtatatgaaagaggttgggagtcctcctcttgatcctactgagcgttttcttcctgaagaagagaaacttactgaacaagagagatcaaaaagatttgaaaaggtttatactcataacctatattacctagctcaagtctaccagcatctggaaatgtttgagaaggctgctcactattgccatagtacactaaaacgccagcttgagcacaatgcctaccatcctatagagtgggctatcaatgctgctaccttgtcacagttttacatcaataagctatgctttatggaggccaggcactgtttatcagctgctaatgtcatttttggtcaaactggaaagatctcagccacagaagacactcctgaagctgaaggagaagtgccagagctttatcatcaaagaaagggggaaatagcaaggtgctggatcaaatactgtttgactctcatgcagaatgcccaactctccatgcaggacaacataggagagcttgatcttgataaacagtctgaacttagagctttaaggaaaaaagaactagatgaggaggaaagcattcggaaaaaagctgtgcagtttggaaccggtgaactgtgtgatgccatctctgcagtagaagagaaagtgagctacttgagacctttagattttgaagaagccagagaacttttcttattgggtcagcactatgtctttgaggcaaaagagttctttcagattgatggttatgtcactgaccatattgaagttgtccaagaccacagtgctctgtttaaggtgcttgcattctttgaaactgacatggagagacggtgcaagatgcataaacgcagaatagccatgctagagcccctaactgtagacctgaatccacagtattatctgttggtcaacagacagatccagtttgaaattgcacatgcttactatgatatgatggatttgaaggttgccattgctgacaggctaagggatcctgagctacttgagacctttaaatttcgaacgaagccagagaacttttcttatagggtcagcactatgtctttgaggcaacacgagcttctaacagatc

SEQ ID NO: 110403 - DNA, 1243 bp, Homo sapiens
gcggccgcaacgtgtcgagagccgtaagtaaagtgtcgcaaagcagaaggaaggcgggagtcccgactgcaaacattgaggaaagccaggcagtagaggccgctatggcgaacgttccgtgggcagaggtctgcgagaaattccaggcggcgctcgctctgtcgcgggtggaactgcataaaaatccggagaaggaaccatacaagtccaaatacagcgcccgggcgctactggaagaggtcaaggcgctgctcggccctgcgcctgaggacgaggatgagcggcctgaggccgaggacagcccgggtgccggtgaccacgccctggggctgccggctgaggtggtggagcccgaggggcccgtcgcccagcgagcggtgaggctggcagtcatcgagttccacctcggggtgaaccacatcgacacggaggagctgtcggcgggggaggagcacctggtgaaatgcctgcggctgctgcgcaggtaccggctctcgcacgactgcatctctctctgcatccaggcgcagaataacctgggtatcttgtggtctgaaagagaagaaattgaaactgcacaggcttacctagagtcatcagaagcactatataatcagtatatgaaagaggttgggagtcctcctcttgatcctactgagcgttttcttcctgaagaagagaaacttactgaacaagagagatcaaaaagatttgaaaaggtttatactcataacctatattacctagctcaagtctaccagcatctggaaatgtttgagaaggctgctcactattgccatagtacactaaaacgccagcttgagcacaatgcctaccatcctatagagtgggctatcaatgctgctaccttgtcacagttttacatcaataagctatgctttatggaggccaggcactgtttatcagctgctaatgtcatttttggtcaaactggaaagatctcagccacagaagacagtaagtttacctttgcatgttttacatagcttttaaaaaaagttttattttgaaattattttaaacttttgaaaagttgcaagaacagaagagctatcatatgcccttctaaatgcaccaatttttagtattttcctcgcttggaatcaaattttatttttctctctgaaccattggagagaaggttacatacattaggctcttttaccctttcatactttagtatatatttcctaagaagaatattttcttacataatcataga

SEQ ID NO: 110404 - DNA, 593 bp, Homo sapiens
ctgagcctatttctcatcacttattgcttttatattataattgtacatgtgctatctatttaatgtctgcctgtcccactaaaatgtcagtcccaagaaggcagggtctatgtctgtcttgatcactgaacagtgcctggtacctaataggtgctcagctgacattaattgagtaaattaattatacccatttggttgatggggaaactgaggctgagacaagttcaggaatgcacctgaaatcactcagatagaaatcagccatggacctggttcctttttactgatgccaccctggggccagccacctcatgtgccgggcatggtgctggccttggcaagggccccatcatccccagcttcctcgtctgtctcatacagagggaggagactccgaggtaagctgcattcttgtccaagaatagtaatgattcactccagggtgggatccaaaaaagaactgcctggacgtctgttttgagtcggccgccctgctgccgtccagccggcactcagagatgtaaatacgtcctcctagcgggccaaatcgtttccttttgactgcacgccagccatttattggccatggctct

SEQ ID NO: 110405 - DNA, 731 bp, Homo sapiens
ctctgttatttgacaaattttgagactgagactttgagaggttgagtaacttaggtggaatcacacaggagggccaaagccaactccttttctactttcatcacatatctagggactctgacacctagattctaattgctgattcctggaatggttgcttgtctttgtcatttttatggcttctttctcatgatataaaatgcaattctgggctcagccacactctcagagcctaattaagttggtgttttaaatacttacctgggaggcatcgaggtttggacgtatgattgtgtgtcagacaactcctgtttgaatgtcatttgtaccacttcttaactgtgtcagtatgaacaaggcacttaacctcttggattctagtttcctcatccataaacgaggaaaataatagttaccttttgaagtcattttgaaaattaaaaagatactacctatataaagctacttactagtcataaatttatactcttgctaaaaacacttttgcctttttcgttagacgtgtttagcgtatctgtgtttatgtgtgtgttccatttgtctatttataagcatactatgtggtctgataatttatgaatgagaaaaacagatgcagaaaacatctgggagagatgtttttgggagatgttttgggagatgtttgggagatgttttgggagagatcttaataatggttagtagtatacatttaaagacaaagcagaata

SEQ ID NO: 110406 - DNA, 395 bp, Homo sapiens
agaggatcgcattggcgaggagtctcctgagtcttggagtcttggcttaaatgctgctacttctatttctgtaacctgattttcagaattaactcattatttttctcccacacagtgctagcctgatacctctacttatctattttttccttatgactttttagtttatatacatgaaggtctttcctggattataaactccttgagagatgtagaggaaaatcttaatcatttctgatttcctctagtgtgcaatatagtcttttacatagtactcatttgttaaatgtttgactgaattaactcaaaatttacagtctctgatttcaggaggaggaggatagagttggaataactttgtatgagaacttagtgaatccacgtgacacactcag

SEQ ID NO: 110407 - DNA, 2355 bp, Homo sapiens
  misc_feature (981)..(981): n is a, c, g, or t
  misc_feature (1744)..(1744): n is a, c, g, or t
tcagttcttattctctggtcttattggttcctctgcataaggatgcagtcttttatctttacagtttctttgacattttcctctgtcccatcattctctgtttctcaccacttctgtttcattttggtctcaatctttaatattggagacattcctcaaatgcatgaagatcctcagtggtcatttatatttaaaagatgtgaaaagctgaccgaaagctctgggtgtgaagtcagagctcttgtctattggtaaactatgctgtaggaaatcttcatatcacaatttttctttaggttagttttgttttctctagttttgaatcctttccagaggaaatctatagtcttctctgtgggggctgcttatgttttagagaaatactgaagaaagggactttgggtctctttagagttgcacataatcttctggttttagtcatatctacttctgtatctattgaagtccaaagcatcttgagtttagtttttccagaaattatgccttctgatttctgcatgattgggaagtcactgagtacaccaactggagttggagacctggaattccagtagttccaggaacctcctagtcctgaacttaatggggtttcatgagaattgactggcttctttaggcacttaaatttaacattcctcacctctggtgaggtttttgtttgttgtttgttttttctccctgtctttgtatattatggtttagggttacagttttccagcttcatcaaaaaaagagtttttctcattctccttgtttagaaatgattggtgacacaaaggtctgtactctgatattttaagatccgaagtgtattctaccccttttttataaactattttgcagctgttccttcacgactttgctacatcttggagatcttttcatgtcagtacctacaagtctatatcattgatattatcagctatatagtactccataaaatgctttattataatttangtaatcatcttcctattgatgaagattttggtggtttctagtttttgctttcatgaatattgttgcaatgaatattgtttggcttacttttgggtgaatttttacaaagacatccatataataagttcccagtagtggggttgcctaatctaagaataagtgtatttaaaatttgaatcatattgtcagactgtctcccagaaagtttacattcctaccaacaatctgagagagctgtctttgcagttactaggtttcatcaaacttgtttttttcagtatggtaggtttaaaaatggggatacatttttgtttttatttgcatttttaaatattttcttaggttagttggctacttaaatttctttttctgaaaactttgtatttatagccttttaaaattcttattgacttgcctgaactatttgtaaattacagaaattagccctttgtcgtatgtgttgcaggtgcttttccagtttgccagtggtcattcattttggtttatggtacttttgatagaccagaatctttgacttttatttagtgagatttatccatctttttctgtgtggcatcttggtattatagcattaatattctcttttcttttttttttttttttgagatggagtctcactctgtcgcccaggctggcgtgcagtggcctggtctccactcactgcaacctccgcctcctcgtttcaagtgattctcctgcctcagcctcctgagtagctgggattacaggcatctgccaccanacccagctaatttttgaatttttagtagagatggggtttcatcatgttggtcaggctggtctcaaactcctgatctcaggtgatccgcccgccttggcctcccaaagtgctggaattacaggcatgagccaccacgcccaggctatagtttttctttatctgaacaataactaattataaagtatagtggaagagaaaaacccattcagaaaattaacaaaaagatcacttatctagaaataaacttaaaccatagcagagcttacatgaagaaatcttttaaaactgagcaaggatttgttggacaggacacagcactaatctcaaaagaaaatttgatgaataggtcttattcatagtttttgctcatcaaaagacagcattaagaaaatgaatagacaagccacagaatgagttaaaaaaacagaaattcccagcatttacaagggattaaagatgtgtatcagaatatataaagaacctctgaaggccaggtgtggtggtttacacctttaatcccagtgctctgggaggccaaggtgggaggatcatttaaagctaggagttcaagaccagcctggtaacatagtgaaacaagattctgtctttac

SEQ ID NO: 110408 - DNA, 341 bp, Homo sapiens
agcgatctagggcagccctgcagaggtgcctgttctactgtaatcgctatattaaccacatgcagatgcctgcgctttgagcacaaaacataccaaggaccagaatgagaggagatgctcaggaaggagaatgatacaagcgatggacggaagtcacaggattcaggaactaagggaacatgaggggtgaggggtcaaaaacaataaagaggatgcctggctttcaggcatgaatgactggacagatgaggatgaaatcagcaaatgcaggcaacccaggaagatgagcaggcaccaaagaaaagatgacaaatcccatctcagaaatgcctatgtggaga

SEQ ID NO: 110409 - DNA, 379 bp, Homo sapiens
ttggaactcatggtgtgaattctgacagatcagggagaagtttttcttgagcactaatataacttgtcctttcaattcagatttttgagaaaaggtttcaccattggactgtttatgctcattttacagttgagactttttctttttatattacatggaaataatttgcacatatattctccctaactaaaaacatcacctatcagtcttactgaattcctgtgcccagtgtctgcaaggtgcccactgtctgcagggtgcccactgtctgcaaggtgcccagtgtctgcaagggtgcatgtgacaaagtcatccctgcttcagtgagagaatagatggcccaactctccatgcctgtaatcccagcactttgggaggc

SEQ ID NO: 110410 - DNA, 645 bp, Homo sapiens
gcctctttgccagtcacaaagaacccttaattgccttgtaaaatgtagtccagccctcttcacagattcgcagattacagagttattcatccaaacaatttccacgtactgcatagagggtttcatggacagtagccttgattcagaccaacctgtatctctgcaaccctcactacagaccactttttcacagtggagttgctatttggctatggcttaaaggatgacccagaattcctcaagcatagaaagaggggaagggcagtaagaagaccagtgtggttggaacagaggatacaaggatgtgtgtgtgtatgtcaggaagggataaaagttgaggctagattattcacaagactattcacctagttgagtttggacttcatattgtgcaggtcagcatttcacagaagactagcccatgaagatgctaatcaatgctccaagatcaaggagctcacttgtttaataagttggggatttgaatgctgaatcccctttttaaagagtcacagttgattttagaaaactgaaggctctgagaagtcctgcaatgaaaagaaaacctgcttaattttgtataaaggttaatccaactttttttttttttttgcaaggaaatgatttccccccttccccagcccc

SEQ ID NO: 110411 - DNA, 393 bp, Homo sapiens
ctcgtgcgtctaatttttcaatattttccagaaagctcacagaatcataaaaaatatattgttattttaggccacttagtttggggagtttgttgcagagtaatagataagtgaagcagcaaagtacagaggggcttttatctaagagagctgatttatcattggatatctcagaaaaccacaacatttccaaaagaactgtatcagcttgagctgaaaaagattgagacagttcaaaatgaaagaagtttctgggtcctcaaacttctatggggaataagcaggttaagaaactttctccagttgcaagcatgggtcgttcctaatgaaaaaggcaggatgtcacggagggcggaggcaagagccactgctttcttaagcaggttacgaaag

SEQ ID NO: 110412 - DNA, 675 bp, Homo sapiens
tttaaaaaactgataaattagattttattaaattaagaatgtctgctgatcaaatcacatcaagaaagttattaagcaactgtgatggttaatattgagtgtcaatttgattgggttgaaggatgcaaagtattgttcctgggtgtgtgtgtgagggtgttgccaaaggagattaacatttgagtcagtgggctgggaaaggccacgcacacttaatcagggctgccagtgaggccagtataaaagcagtcagaggaatgtggaagggctagactggctgagtctttgggctttcatctttctcccgtgctggatgcttcctgccctcgaacattggattttggactcttgaaggacttataccagtggtttgccagggaatcttgggccttcagccccagactgaaggctgcactgtcagctttcctacttttaaggttttgggactcagactggcttccttgctccttagcttgctgacaacctattgtgggatgtcaccttgtgattgtatgtgtcattactccttaataaactccctttcatgtatacatctatcctgttagtcctgtccctctaaacaaccctgattaatagagcaactaatagactggaagaagatattcatgatacaaatgtctgacaaagatcttgtatccaaaatatataaagaac

SEQ ID NO: 110413 - DNA, 555 bp, Homo sapiens
gcggctcggacccagagtccaaaagggaatccatctcaaataatttagatgctaaactattgaccttccttgtggggaagaccgttaagtgatagctttgtcctaaattggttttgtttgctgtaaataaggcatttcttttatgggtgagtgattgagtgcacagacccacagtagtgagaacattcctgccctcgtaccctggtctagttctgcaggcgcaaagcccagaaagtcactgaaatatggcatatttgggggaggaaaggaaattacataagtaacctcagatcatttgtccttcagctgtctttaccactcaatctgcaattgtcacttgatgcatcactttctgttacttgatggaaaagttttactgaagaacttgagagatttggaaatatttgaacaaatgataatatcagtacactaatgaaacttggagattaatcttgaaagtttgtgaggaaggtggaggtgatgaataaggcagtccaggtgaattcatgcagaggcagaggtgagagaacagggggagagtagttgtagtgagca

SEQ ID NO: 110414 - DNA, 526 bp, Homo sapiens
ccaaaagagttgtgttaaaaaagttactatctccccttccttgtgggcaagacagatgaattttggcgtagccctaaatggggttttttcctggaaatgggggacttccttttatggggcctcctatgatggcaaatacagctcctattgagaacattcctgccctcgtaccctggtctagttctgcaggcgcaaagcccagaaagtcactgaaatatggcatatttgggggaggaaaggaaattacataagtaacctcagatcatttgtccttcagctgtctttaccactcaatctgcaattgtcacttgatgcatcactttctgttacttgatggaaaagttttactgaagaacttgagagatttggaaatatttgaacaaatgataatatcagtacactaatgaaacttggagattaatcttgaaagtttgtgaggaaggtggaggtgatgaataaggcagtccaggtgaattcatgcagaggcagaggtgagagaacagggggagagtagttgtagtgagca

SEQ ID NO: 110415 - DNA, 379 bp, Homo sapiens
ggatggggaggccatggtcaggagcttctgtgctgggccttgcggccacagagagctgaactggggtgacatgcggagcctgggctcataaccaggtggtgcagccgttgggaggggtgtgctgctgcctgagggactcagaggagactagagggtatgaaagagattcctgggagtggcataacaaatgaccacaaacagtggtatagaacaacaggaactgatcgggcgtggtggctcacgcctgttatcccagccctttgggagaccgaggtgggcggatcacctgaggtcaggagtttgagagcagcctggccaacacgacaaaacccgtctctactgaaaatacaaaaattagccgggtgtggtagtgcgcacc

SEQ ID NO: 110416 - DNA, 470 bp, Homo sapiens
tttttttttttgagatgggggtctcactttgttgcctaggctggagtgaagtgatagtcacaggcacaatcatagctcactgcagcctcaaactcctgaccgtaagctatcttctcacttcaacctcccaagtagctgggacaacaggcacgtaccatattttgacacgatctacctggagatagtgtcagatcctataggttgagggctcaagactgcaccccccccttaccccacccccaccttcagatgccagtcacaagctccaggttacctgtgcttctgattgacctgctataaagtggggctcccacgaccacttccttgggttcagttaatttgctagagcagctcccagaactcagggaaacacttactttctttttcacagctatgtgaattttggaacagaaacacttatacttaccaatttatttaaagaatattacaaagaacacagatgagaagat

SEQ ID NO: 110417 - DNA, 259 bp, Homo sapiens
aactcccaatattaataaggtcagaatggcaggggtagaacagaaggaaactgaaagtaagaaaaaaactcaatgatgagaaaaatgtctattaatgacactggaagatataccagtgccaccagttcatagataagtgaccaaatggccaacgttctcactgcttgtccattgcaaggatgctgcagcacagcagggctcctaatgaaagaagcaatgccacacaggtgtggtggctcacacctgtgtaatcccagca

SEQ ID NO: 110418 - DNA, 731 bp, Homo sapiens
gtcaagaagagcatgcttcagttggctggagtgagcaattcaacttgtggaggagtgagaaatgttagtgttgagacaagaaacgtaaaaccccagggtaaggtaggaatcagtgaaaggcagaggaactgccgtccagtaatgagttaggctttgctggcttctggccctacagatgactctttggagaggaaaaaattaagctaggcccgagggcacagatcctaagggaatgctggcagcctaggctgtctatggaagagaagcagagggtggcacctggttgaaagagggggttgggggacagagcttgaggctgtgtttacagatggagtcctctgattcctgtgactggggaaggagatcgtgctggatcagggcacctcaaatcagaactcttcccacccacaccccttcttttcagggcgtctttcattgcaaacagtagataaactagttggaaaactcagcagattctcacggtggtgcctagcaggccaggcctagctgccgtttaagctgtgactgagggtgatgccactggcctgtaaacacacattggacaatctttacgtccgtggacacgccatgccccacagagacagctgtgcatggttctttaggtttggggtgctgtgctggcagttgcctgataaatgtgtaggattaaaatgggatgccctggagcttagctaacctttatcccccctcccccctctaaaatgaagggg

SEQ ID NO: 110419 - DNA, 640 bp, Homo sapiens
gtaattgtgaagcaatagggtccaccagtctgcagctcaaaattctaggctggaggccgaggcgggcgattacctgaggtcaggagttcaagtctagcctggccaacatggcaaaaccctgtctctactaaaaatacaaaaaattagcctggcatggtggtgcacgcctataatcccagctacttgggaggctgaggcaggagaatcacttgaacccgggaggcggaggttgcagtgagctgagatcacaccactgcactccagcctaggcgacagagtgagactccgtctcaaaaaaaaaaaaaatctaggctggaatacttatttgggatctttgttgttcaatacagtaaccactagtcatacactagtatgtattaaataaactactattaaataaactagtattaaatttcatagtaatgaaatttaaatttatatttattaggccgggcgcggtggctcaaacctgtaatcctagcgctttgggaggccgaggtgggaggattgcttgaggccaggagttcaagaccagcctgggcaacaaagtgagacccctgtctctacccccccaaaaatatattaaaattatcatttcagttatagttctttagtgggtctcagtcacactaagaactag

SEQ ID NO: 110420 - DNA, 382 bp, Homo sapiens
ggtatgtgttgtgttgtgtgtgtgtgtgtgtgtgtgtgtgtgtgtgtgtgtgcgcaggtgcgtgcgtgtgtgtgtaagaatatcacactttagacggtattttcacatcagagaactgtgaggctggatgagatcattaaggagaggaggagtacgtagagaagataagttcaagggcagagtgagtttaggggcactccagtgttatgaggttaaggaggtgagatggaaccattacaggagacctgagaggattggctagggaataggagaaaaaccgtaagagtatagagttctggaagtcaagtgtggaaagtgtttcaaggaggaaggtgtgatcaactatgttaaatgctgctgatagatgaggaggaagtattaa

SEQ ID NO: 110421 - DNA, 296 bp, Homo sapiens
agatctagaggatccagagagagaagaagtgtcaataactatggagtatttaaataagacagcaaggcaaagagctcattaaccttggcaaatgagaagtctatcattattgagggcctgctctgccagattcagtttatgcatcaccccagatgaacacaactaccttgctgctggctgaaacagtctgcccagttcctgttgcaatggctgttcctgggccttcatatgttgttgatgcaccagcctgacagtgcattgacttctaccccttctgtcgtcttctctcaatccca

SEQ ID NO: 110422 - DNA, 140 bp, Homo sapiens
ctgttaggaagtgattcagtcatgaagggagagtcttcatgagtggatttagggtccttacacaagggctagagggagtgggcttcccctgttttgcccttctgccttctgccatgtgaggacacagtgcatcccctcct

SEQ ID NO: 110423 - DNA, 280 bp, Homo sapiens
cagtcattcatcaccatagaggccatcacaatcaaaaaccacacatccacctttaggataggcctgcattgttgtgacaaagagtgtgcacacatcaagactatgcaccgtttaaaacgtgttgccaaactgctcctcagaaacacactgatccatgttccttctaacgggtgtgagggtgcccctcaatgcacattatacactgagtattataattcttaagtccacctgggtggtgagtagaaactggcctcctttctgagtgtcttcctcccttctc

SEQ ID NO: 110424 - DNA, 682 bp, Homo sapiens
acctacttgcagaaacacaccaaatcaccataggaaagaatcttacggatatttcatcagattcccacaatgtataatcagataagtattagttcacaaccaaagacatgaagcgacaagaggaaataagccatctatattagaactgttagacatagaaatgctgtttatgaagtacttaaaaagtaaaatataggatcaaaatagtgagcaaacaacagaaaattatcaggaataatcaggcaattcttacaaataacacaatggaatgtctacataaaatacgtaaacattgaaagaaaacacaagacatgttaaaaagcagactagccacagatgaaaagagaattaatgaatttgtaggttgaagtgaataaattaaccagaatataatcttgaaagaaaaagggccagaagaagttagaataatttaaaatgttgaggataaaataagaaggtctaacataagtcaaatcagagtcgcagaagaaaagaattaagtcaaccaagaagtgataataaaattaatcaaggagaagtgttcagaaatgctgaaagctgtgaatccccagtttcataaaggacagtattcccaagcaagacgaaaaagaaaaccaatagctggcatagtggtggctctctagagaaacaaggcaaaaatgtttaaaagagccagagagta

SEQ ID NO: 110425 - DNA, 1985 bp, Homo sapiens
ctggagtactagatacttaggtacttaagaaatagcctttaatcccaaggccttacttaaaacttaagtttaaacacaatctctgatgtgatgagtggaaataattcttttgtgttaaaacatacagacaaaacaaagctatatggccagaataataaccgttattgtatcttgtggaacaaaaaagggcatggtgattgctctgttcctcagggaaacacattgaatgtcttgttttcagacaccacatctgatgcatatacagatgtatgattggagtagattatttctaatgccccttaagctctactactcagattctttccttctccagagtaatggtaatggattttaagctgtgaaaaagcagttaagtactgccttcacccgctaagtaaaggcctattctaggctacttaccttgcacccattatgaggtgtaaaaccaaaaatgttgtgaaatcaaatttcattgaagtctcatataactttatggagatggttgagtatttcttcttggaaagaaggaggagaatcatcacttgattgtgattaattacaacataggaaacaagaaacaatagttttatcctaacctgtccttacgaacattagtaactgtgctgttcattatttttagtaacagcacataggtaatacaggtgttatatcatgttttccttcacactggaagttaataacacattcttcttatggatgaaaatgactgaagaatcaagaattactagcaactcttctttccagtagcttagaaaactgcctttttcaagacagatgcaattttacttaatatctctgaagcttattttatcatctatgaatttaaggagatgagaattaatactaaatgattttttaggtccccttcagtttatgaagtactcctgcagtagaagttcatggccttgaaaaagcgtactcaaaattactctatttccacctagtggtgaaaccgtaatatttctctgaggctttacttgataaacgtgagtagtttttcagcttctcattctgtaatcacacacagctttggagcatattgtgtcatttttatttaaagacaacttcccagttaaagtttatgtacatagatgtgccttccacaaagttgattattgtatattagttcttcctaaggacagttaagtgttggtggcttagcaacaggcagttggtagagaaatggagagtactacattaaattattgcagagaatattcaaagtaatccattttcagggaactgagtcttctctaagtacatggccagatgatcaaaaaagggaaaaaaattaatcactaaggttggagaatatgtttatttaaacctagtgtctcccttaaattttataactagatttttgaccctcactcatctggctttccttgctatagacatgctttgcatacccagcttctagccacatcttccctaagaaaatttcacctggaatcagttccaaaagaaaatcttaagagatagagtatggatctgcatgttgtcagctacctaaagcagcaaaaattcctagatgagaataaaatcagggaaccttgcagtttaaggcacaccttaaatattaaatttttaatccttcaatgcatccagccaaaacaagaaattgcaaatagctaccatccatcaatgcaaggtttttttggtttgtttttcataataagattggttttaattaaagcacttataaagatggagttatattttgaactttgtccttttacttaaagcagttagagtcttacacatcataactgccacggctaaccattaaaattttccagctccttaaatgatccatcataaacttgtgcttgctgagttaactggactagaggatagctggagggaaaatgaggcattgcaaaagttacagtaataaaaagtgaatggcttcaaaataaggcagaggacataatggctcattttataataaaagctttcagtat

SEQ ID NO: 110426 - DNA, 207 bp, Homo sapiens
tgtgtcagaggtttgggggtaggtgttgtagcaggagcttcctgtgggtcaggacccaggtggtgttggggctggtcttctattagcacagaccttcaagatcagggattgggtgtcctgggcaggcagagcctggaggcaggggcatggctgtcatgacctctttgaagaccttcctgcctggagaattctctccccattccctcc

SEQ ID NO: 110427 - DNA, 2884 bp, Homo sapiens
catttgctatgaatattctctataacaaagcaagacaaatttagcagcacttcattgcatctggatgggggagagagctggacaatttcttgctaacaagagatggttaactgccctcacctcagccgtgaattctgcacacctcgcatccggggcaacacctgcttctgctgtgacctctacaactgtggcaaccgggtggagatcactggtgggtactacgaatacatcgatgtcagcagttgccaagatatcatccacctctaccacctgctctggtctgccaccatcctcaacattgttggcctgttcctgggcatcatcactgccgctgtccttggaggctttaaggacatgaacccaactctcccagcactgaactgttctgttgaaaatacccatccaacagtttcttactatgctcatccccaagtggcatcctacaatacctactaccatagccctcctcacctgccaccatattctgcttatgactttcagcattccggtgtctttccatcctcccctccctctggactttctgatgagccccagtctgcctctccctcacccagctacatgtggtcctcaagtgcaccgccccgttactctccaccctactatccaccttttgaaaagccaccaccttacagtccctaaagaggaatgcctgctggctattgagattattgtggcttttgtatttctgcttcagtggaagtgtgtagggtacaaaatttaaagtgtgactcttatgcataaagttttacaatggcctgccaggctagggaaagatagggacgaagcttattcattattagtgcagagcaggggtggtcaggctgaacgcagcacagaagggcagctcacattctctaagcaagactggggagccagcccagcaagaagcttgtttggacttgcattaccctatgctccacctctgtattcagcagaagtgtggttgccatctttttcactttatgtaaaggagtgttgccctcgggcccttggcagattgccaccccagcacctaggttgaagcacctggtttataggccctatctttccctacccctaaagtcagtccctaaggacaatttcccagctgatggggctacacagtagttccaatacagagagttctggctaagattttgtttgcttgtgtctggatgttgaaaaagactgcccgtatctcttactccttccttctctgtgagtattgtaaaaatggctgttgtgatcactcagctcagcttttgttattggtacctcctaaagggaaaagtgcaatattcttgcatcttcagtagtggggaacaggatgtattgttccggaaacactgaaatacacagcaacatgtgagatgttttaagtagatcacttaggagacagtggttctactacatgttgcattattacaaaatacatttgctacaggagatataaatcttatggttgtaattcagagtttaaaaatgttataaattaggttcttgggtcgtgatatgaattgttactaatctttgtgactatttaatcttcaaatattgtgcttaaccccagcaatccgcacgtatcctgcaccccaccccaaaagagtcatctgtattttaatgccactggtcttatcggtccttttgtctgttgagaccagtcatgacagcattcaagattatgaaagtgttacaatgccgcttcaagtctgcaaaacctcaaacgtagccaacttgacaaatatttaagtgttacggcagatttaaaatccatctggcacaccgtggtaggtatttgtacagttcttttaattacacatagctttaaaccatcaacctgatgagtttaaagcttttgcacccatgccttcacttcagaatgaacaccttcattgtgatcttatgttaacctgagaattgatttaaaggaagattgataatcctatactttataacgtaaaaatacaggggctacaggagggtacctaattagacagttctccaaacacagaacacacactggaaaattttccggccaattttgctacctcccaacttgatggattagaggtagcgcaaatgctggtgctcccatctaccttgtagacacttagccatcaagaatcaaggcacaagaagtgcactctctcattaacagtaaatgtttgcaagatattcagtttaactttcagcatcatgaatgttcttatccagattttgaatccgaaaaactataatccttttatgttatacaaaattactatgattttttacagttctgagcatattaaaattctactggatttcaaaaagagactaatacccaactgactaactaaacaaatatcaacttgtaatactcaatgaatttttttgccatttacatttgaccgttggctttagtgaatgtccatatttaattttttaaggcaccattacacagtttatcctacatttatcacatttcttaaagtgttaagattctatggctcatttctatgtatttttcttactttacaaaataacctgaaacagtatagattttgtaacacttaatttgagcagcttttttattacattgaattatataaagtgcatgttaccttagaaaaattaatatttgctgctttactcttttgcaaaacatttgctgtaatgaatggatttgtatttccaatatgtatcttgactgcattttgtaatatttactgctttattcctaattctgctttaaagtactgaactgggcatgaaacattaaaatattaatccagaaactgtataaactggatgttgcttaaaatctgtatcactgccatgttgaaaactcagactgcttttgtgatgtttcaaatgaataaaactatcctcccctcgttatcca

SEQ ID NO: 110428 - DNA, 506 bp, Homo sapiens
agagcagagggaggcagaagaggagggagggagaagagtggaagggagggggaggcggcacttgggctgcagctcgcaaccagaggcagtgtctctcagctctcggaaggaccgagagaggcaaccgcggagtaggatgctctgcggggcgcccagagccgggggcgcttgaagcagcttcggggactggggcaaccgggcagttttcaccatgcatcagtccctgactcagcagcggtccagcgacatgtccctgcccgattccatggttcctgccatcagtctgctcaggtcttctccgatgaatttgcgggaacatctcgagtggagggggcagggagaagatcgaaccccctatataatctccctactgcccgcagaagactcagtgtcaacaaaactcgttcaccggaggggccccagaaagtgttatctcctggatggtggaaagatccgtatcctcaatggttttgcatattcagtataagaatttgctttttcatttt

SEQ ID NO: 110429 - DNA, 3413 bp, Homo sapiens
agagcagagggaggcagaagaggagggagggagaagagtggaagggagggggaggcggcacttgggctgcagctcgcaaccagaggcagtgtctctcagctctcggaaggaccgagagaggcaaccgcggagtaggatgctctgcggggcgcccagagccgggggcgcttgaagcagcttcggggactggggcaaccgggcagttttcaccatgcatcagtccctgactcagcagcggtccagcgacatgtccctgcccgattccatgggagcattcaatcggaggaaacgaaactccatctatgtcaccgtgactttgcttattgtgtccgtgttaattctcacagtgggccttgctgcaaccaccaggacccagaatgtgactgtaggaggttattaccccggagttattctcggctttggatcgttccttggaatcattggatcaaaccttattgagaacaaaaggcagatgctggtggcttctatcgtgtttatcagctttggtgtgattgcggctttttgttgtgccatagttgacggggtctttgctgccagacacattgatctgaaaccactctacgctaaccggtgccattatgttcccaagacatcacagaaggaagctgaggaggttaactgccctcacctcagccgtgaattctgcacacctcgcatccggggcaacacctgcttctgctgtgacctctacaactgtggcaaccgggtggagatcactggtgggtactacgaatacatcgatgtcagcagttgccaagatatcatccacctctaccacctgctctggtctgccaccatcctcaacattgttggcctgttcctgggcatcatcactgccgctgtccttggaggctttaaggacatgaacccaactctcccagcactgaactgttctgttgaaaatacccatccaacagtttcttactatgctcatccccaagtggcatcctacaatacctactaccatagccctcctcacctgccaccatattctgcttatgactttcagcattccggtgtctttccatcctcccctccctctggactttctgatgagccccagtctgcctctccctcacccagctacatgtggtcctcaagtgcaccgccccgttactctccaccctactatccaccttttgaaaagccaccaccttacagtccctaaagaggaatgcctgctggctattgagattattgtggcttttgtatttctgcttcagtggaagtgtgtagggtacaaaatttaaagtgtgactcttatgcataaagttttacaatggcctgccaggctagggaaagatagggacgaagcttattcattattagtgcagagcaggggtggtcaggctgaacgcagcacagaagggcagctcacattctctaagcaagactggggagccagcccagcaagaagcttgtttggacttgcattaccctatgctccacctctgtattcagcagaagtgtggttgccatctttttcactttatgtaaaggagtgttgccctcgggcccttggcagattgccaccccagcacctaggttgaagcacctggtttataggccctatctttccctacccctaaagtcagtccctaaggacaatttcccagctgatggggctacacagtagttccaatacagagagttctggctaagattttgtttgcttgtgtctggatgttgaaaaagactgcccgtatctcttactccttccttctctgtgagtattgtaaaaatggctgttgtgatcactcagctcagcttttgttattggtacctcctaaagggaaaagtgcaatattcttgcatcttcagtagtggggaacaggatgtattgttccggaaacactgaaatacacagcaacatgtgagatgttttaagtagatcacttaggagacagtggttctactacatgttgcattattacaaaatacatttgctacaggagatataaatcttatggttgtaattcagagtttaaaaatgttataaattaggttcttgggtcgtgatatgaattgttactaatctttgtgactatttaatcttcaaatattgtgcttaaccccagcaatccgcacgtatcctgcaccccaccccaaaagagtcatctgtattttaatgccactggtcttatcggtccttttgtctgttgagaccagtcatgacagcattcaagattatgaaagtgttacaatgccgcttcaagtctgcaaaacctcaaacgtagccaacttgacaaatatttaagtgttacggcagatttaaaatccatctggcacaccgtggtaggtatttgtacagttcttttaattacacatagctttaaaccatcaacctgatgagtttaaagcttttgcacccatgccttcacttcagaatgaacaccttcattgtgatcttatgttaacctgagaattgatttaaaggaagattgataatcctatactttataacgtaaaaatacaggggctacaggagggtacctaattagacagttctccaaacacagaacacacactggaaaattttccggccaattttgctacctcccaacttgatggattagaggtagcgcaaatgctggtgctcccatctaccttgtagacacttagccatcaagaatcaaggcacaagaagtgcactctctcattaacagtaaatgtttgcaagatattcagtttaactttcagcatcatgaatgttcttatccagattttgaatccgaaaaactataatccttttatgttatacaaaattactatgattttttacagttctgagcatattaaaattctactggatttcaaaaagagactaatacccaactgactaactaaacaaatatcaacttgtaatactcaatgaatttttttgccatttacatttgaccgttggctttagtgaatgtccatatttaattttttaaggcaccattacacagtttatcctacatttatcacatttcttaaagtgttaagattctatggctcatttctatgtatttttcttactttacaaaataacctgaaacagtatagattttgtaacacttaatttgagcagcttttttattacattgaattatataaagtgcatgttaccttagaaaaattaatatttgctgctttactcttttgcaaaacatttgctgtaatgaatggatttgtatttccaatatgtatcttgactgcattttgtaatatttactgctttattcctaattctgctttaaagtactgaactgggcatgaaacattaaaatattaatccagaaactgtataaactggatgttgcttaaaatctgtatcactgccatgttgaaaactcagactgcttttgtgatgtttcaaatgaataaaactatcctcccctcgttatcca

SEQ ID NO: 110430 - DNA, 3485 bp, Homo sapiens
agagcagagggaggcagaagaggagggagggagaagagtggaagggagggggaggcggcacttgggctgcagctcgcaaccagaggcagtgtctctcagctctcggaaggaccgagagaggcaaccgcggagtaggatgctctgcggggcgcccagagccgggggcgcttgaagcagcttcggggactggggcaaccgggcagttttcaccatgcatcagtccctgactcagcagcggtccagcgacatgtccctgcccgattccatgggagcattcaatcggaggaaacgaaactccatctatgtcaccgtgactttgcttattgtgtccgtgttaattctcacagtgggccttgctgcaaccaccaggacccagaatgtgactgtaggaggttattaccccggagttattctcggctttggatcgttccttggaatcattggatcaaaccttattgagaacaaaaggcagatgctggtggcttctatcgtgtttatcagctttggtgtgattgcggctttttgttgtgccatagttgacggggtctttgctgccagacacattgatctgaaaccactctacgctaaccggtgccattatgttcccaagacatcacagaaggaagctgaggaggtcataagttcctcaaccaaaaattctccttccacgagggttatgaggaaccttacccaggcagctagagaggttaactgccctcacctcagccgtgaattctgcacacctcgcatccggggcaacacctgcttctgctgtgacctctacaactgtggcaaccgggtggagatcactggtgggtactacgaatacatcgatgtcagcagttgccaagatatcatccacctctaccacctgctctggtctgccaccatcctcaacattgttggcctgttcctgggcatcatcactgccgctgtccttggaggctttaaggacatgaacccaactctcccagcactgaactgttctgttgaaaatacccatccaacagtttcttactatgctcatccccaagtggcatcctacaatacctactaccatagccctcctcacctgccaccatattctgcttatgactttcagcattccggtgtctttccatcctcccctccctctggactttctgatgagccccagtctgcctctccctcacccagctacatgtggtcctcaagtgcaccgccccgttactctccaccctactatccaccttttgaaaagccaccaccttacagtccctaaagaggaatgcctgctggctattgagattattgtggcttttgtatttctgcttcagtggaagtgtgtagggtacaaaatttaaagtgtgactcttatgcataaagttttacaatggcctgccaggctagggaaagatagggacgaagcttattcattattagtgcagagcaggggtggtcaggctgaacgcagcacagaagggcagctcacattctctaagcaagactggggagccagcccagcaagaagcttgtttggacttgcattaccctatgctccacctctgtattcagcagaagtgtggttgccatctttttcactttatgtaaaggagtgttgccctcgggcccttggcagattgccaccccagcacctaggttgaagcacctggtttataggccctatctttccctacccctaaagtcagtccctaaggacaatttcccagctgatggggctacacagtagttccaatacagagagttctggctaagattttgtttgcttgtgtctggatgttgaaaaagactgcccgtatctcttactccttccttctctgtgagtattgtaaaaatggctgttgtgatcactcagctcagcttttgttattggtacctcctaaagggaaaagtgcaatattcttgcatcttcagtagtggggaacaggatgtattgttccggaaacactgaaatacacagcaacatgtgagatgttttaagtagatcacttaggagacagtggttctactacatgttgcattattacaaaatacatttgctacaggagatataaatcttatggttgtaattcagagtttaaaaatgttataaattaggttcttgggtcgtgatatgaattgttactaatctttgtgactatttaatcttcaaatattgtgcttaaccccagcaatccgcacgtatcctgcaccccaccccaaaagagtcatctgtattttaatgccactggtcttatcggtccttttgtctgttgagaccagtcatgacagcattcaagattatgaaagtgttacaatgccgcttcaagtctgcaaaacctcaaacgtagccaacttgacaaatatttaagtgttacggcagatttaaaatccatctggcacaccgtggtaggtatttgtacagttcttttaattacacatagctttaaaccatcaacctgatgagtttaaagcttttgcacccatgccttcacttcagaatgaacaccttcattgtgatcttatgttaacctgagaattgatttaaaggaagattgataatcctatactttataacgtaaaaatacaggggctacaggagggtacctaattagacagttctccaaacacagaacacacactggaaaattttccggccaattttgctacctcccaacttgatggattagaggtagcgcaaatgctggtgctcccatctaccttgtagacacttagccatcaagaatcaaggcacaagaagtgcactctctcattaacagtaaatgtttgcaagatattcagtttaactttcagcatcatgaatgttcttatccagattttgaatccgaaaaactataatccttttatgttatacaaaattactatgattttttacagttctgagcatattaaaattctactggatttcaaaaagagactaatacccaactgactaactaaacaaatatcaacttgtaatactcaatgaatttttttgccatttacatttgaccgttggctttagtgaatgtccatatttaattttttaaggcaccattacacagtttatcctacatttatcacatttcttaaagtgttaagattctatggctcatttctatgtatttttcttactttacaaaataacctgaaacagtatagattttgtaacacttaatttgagcagcttttttattacattgaattatataaagtgcatgttaccttagaaaaattaatatttgctgctttactcttttgcaaaacatttgctgtaatgaatggatttgtatttccaatatgtatcttgactgcattttgtaatatttactgctttattcctaattctgctttaaagtactgaactgggcatgaaacattaaaatattaatccagaaactgtataaactggatgttgcttaaaatctgtatcactgccatgttgaaaactcagactgcttttgtgatgtttcaaatgaataaaactatcctcccctcgttatcca

SEQ ID NO: 110431 - DNA, 253 bp, Homo sapiens
gaggaaaatacactcaagggttctgaaatttcttttgtgtaagaaagaactttttataaataataatttcagttatgtccataactaaaaatcaaggattccatttatatgaaatatctgaataggaaaacctatgagatagaaagtgattagtggtagtcaagggctaagaggatatggggagactgggaatgacagctaagggatgtggggcttcttttgagataatgaaagcattctacaaccctgtctc

SEQ ID NO: 110432 - DNA, 735 bp, Homo sapiens
catgttttgaaccacgtccaagcctaacttctaagttcgaataaggatttgaaaatcagcctgaggctcccacggaatctaaatccaggttactccgtatatcttccttataaagtcatgggatatctgtgtttggggaatggaatgagtgagggtgaatgtttcactgcttttttttttcatctcttttcttttcaagaaaacactcggccgttgcattgccaagcaccttgcagttcacaaggaacttttatgcctttcactgcattgttggtccctgagaggggaagggggttccccccattttatagcagaggaaacacaggcccgtggaggagagcctcaagatcgcacagcaaatcaggggcagagtctggactgttgtcttccagctccaagcacagcactccttttgttccaccaatatctccctattaactcgctaccttggctttccacagtcagaggctggatagctgacaataaccttggatagacggagctcataaagtacaactaattcccagtgatctgtacatgtgttttaaaacatactttccttttaaattgtataacctatatacaactatactctgtttattaaacatttcagctgggcatggtggctcacacctgtaatcccaacactttgggaggatgaagcgggcagatcacctgaggtcaggagttcaagactggcctggccaacatggcgaaaccctgttctctaataaa

SEQ ID NO: 110433 - DNA, 274 bp, Homo sapiens
gaacaatacactagcttttctgtaagacaaatacagacactgactgtttattccacaatttatacagccatttattgtttaatcatttctaattatattaacaagaattctaggaataaaggagccctactctagagtattattttctcttaagttctaagtctgggtttcagcttctgtcctctgaagtggaagagcaaggcatgagtctttcctaaagttctcctcacccagcttgttttaccattgctttttaccagccagctggctctgt

SEQ ID NO: 110434 - DNA, 425 bp, Homo sapiens
ctcaaagactccaagatcagtttataattagttattaatctgacagatttttatacatttttaagatatatttaggttgaaaatccattttaaaaaattagcttatttcctggttcttaaagtgtagaccttaaattccagaagactgatatatacatatatatgttttgtttgtttgttctgtttagagatgacgtgttgctgtgttgcccaggctggactcgaaccaggctcaagcgatcctcccacctcagtcttccaagtaactgggactataggcacaagccatggctcctggcttcggagactgatagactttttatccaagttttacagggcaaattctattgctacaaatactatataatttgatttagaagatcttcatttaacatgtgatggcccatttatttcaagccatcttt

SEQ ID NO: 110435 - DNA, 374 bp, Homo sapiens
tccttgtctaggtttcacacctgcccagcactgcccttactgaggggcctcagtttccttatctgtaaaccaggctcctgatagacctatcggggcaggtggggaggatgctttgggagctcccagcacatgcaccagtgactcccaggtcactcttctagcccagggactaacctgggagtcctcaaggggcacaggccaggaaggtcaggcccatcctcggacagtggtgaggcttctcaggaaaaggtcatttcagctctaacctctgtacaacacggctgcaggcctctgtgtgcagggcactcggcctcgtgtcattccaaggggtcttgcacactgcatggtgctggtttttgtgtagacgtggacct

SEQ ID NO: 110436 - DNA, 338 bp, Homo sapiens
cattagcttcagtgtcacccgggaacaggttagaaatgcacattcccaggtaccaccccagaagtactgaatcgtaaactgggggatgggggggtgacctgtgatttaacagtcctccaggttgttgtgattcatggaagtttgagaatccccagacctgagctgttgagctcaaccctgaaagtattccagcccaggagcaggtcttctccaatcccgtgttcattctttccttgagcttctctctagtcctaagaaagacattaattccatggccaaaaaaaatgaattatagtcaagtcattcaatatctctttattgaatatctgttgtactga

SEQ ID NO: 110437 - DNA, 191 bp, Homo sapiens
atcgccttctccagaccacacgtggcactgccttctccagaccacacgtggcattgttttctccgggccacacgtggcatttgttttctctggaccacacgtggcatttgttttctccggaccacacgtggtgtttttttctttatttttagaaacagggtcttgctctgtcacccaggctggagtacagc

SEQ ID NO: 110438 - DNA, 252 bp, Homo sapiens
ctgtggggcactgagctctgcattacagtcattcatagcaaccacgtgtgaaaccacacatacacacacacacacacacactgatggtggctgtaaggggcgtgtgtgtccactcactgtatgtttctccaggtgtatccattgtgctgctgacacactttgtctgaggctctgtgcaaagaggtctcatcctatcctgagacgcaggtgtgtacgaggctgtcagccctaggaaggcagcaatcccaccat

SEQ ID NO: 110439 - DNA, 728 bp, Homo sapiens
tacgtgtccagcactgtgttatgtgtgatcaaaggcatgatagaatctaaaggcaattctcaagagtccttgtctttaagtgggatggcaacaagatgtctaccctctaccaatctgttatttatttggaactaattgttaaatcacccttattctccacttttccaggctaatatttctttaaagtttttagcttttaaagtaattcttaatattcggttctgtcagttcttacaattcttacttacaaacatatgccttttaatagctttaacctagtgcccttaatatttttcaaaggcacctgagaaaagtataagaaaaaatttaaattcattttattctaatttttgaagtagagaggaggttttcggttccactgtggcattctatataatgtcaatcaaccaaacaaaaagcaaagcaaacaaacaccaacccagctcttcatgtattggtattaaatagatataatagcggggctggacgtggtagctcagacccataatcccaacactttgggaggccgatgcaggtggatcacttgaggccacaagttcgagaccaacctggccaacatggtgaaatgttgtctctactaaaaatacaaaaattagccgggtatggtggcctgcgcctgtaatcccagctacttgagaggctgaggcaggagaatcacttaaacacggtaggccaaggttgcagtgagccaagatggtgccactgca

SEQ ID NO: 110440 - DNA, 396 bp, Homo sapiens
agagaccagaggcagggagactagtcaggcaagtattgcagtaacctggcttagtgacggcttgaaatagaaagcaggagaaattagagaagtgagaactgagcagtacttctgtaagccacagtcgtgttctggatagatgtagaatgagggaagagtcagaagtatctcaggattttagcctgcttaggcccaggctcagtgttctgcccctttcaccttcctcttgctcttctgctcactgaagtctggctttgctcctgtcatgttactgaaactgtttctcactaagatgtattacagattctgcaagttcaatgtgggcaaaactaagttctatgccttgtctcacaaatttgtgtctcctgctgctgcacttggtgaacggccccacca

SEQ ID NO: 110441 - DNA, 194 bp, Homo sapiens
gagatataattatattagcaaaattaacaggtaccgaaaagtagagttttacattatttcaaatgtttctgatattgtctgatcccaaaataactacttgattaactaatttgtctcataagaaatgtctctatgtaggtcaggatgagatcatttgaaaaatctactcctttgagaacttttaaaccaccacc

SEQ ID NO: 110442 - DNA, 716 bp, Homo sapiens
tgattttggtatcaaattttactaagtacttgatataacttgtataatacatacttatcattaggatttgatattcctatatatttatactatcagaaacacaattaaaacattgttagccaaggaaaaggtgatacttctacattttaaagacaattttagctatttctgtttaacatacattttaagataataatgggacacaaattttagggaaatagtagaaaattatttttaaaatggaatctctacctgaaaaggcagaccataactgttgtacagatatactatccactcagtgattaaataatcaatgacagagcattttcagctgcaacattttattctaagagttgggggcaggaaacacattttcagctattgacacacagccaccccaaaatcatgacaacatgttgccctttttgaaagatgaaatctttaaaattagaggactttttaaagggtatatttaatagatatgctatacaactgttagaatggtaaaaaaaaaaaaaagataaaacaatttcttacaaaattaaccacatgcttgccatataacccagcaacctcactcttaggtaattacctaagaaaacttaaaaccaatatccacaccaacacctgtgctatgatgttgataatcattatcattaaaaactataaatatcattgtgcattctgaatatcatttatattcataatcattaaaa

SEQ ID NO: 110443 - DNA, 103 bp, Homo sapiens
attgtaaattggagttatatggcctcttttcctttcagcctaaaggatttatgtaatatttcttacagatcaaatcttctagcagtgaattctctcagtcttt

SEQ ID NO: 110444 - DNA, 305 bp, Homo sapiens
tgtcacattttccatagatattgacatcagcaatgacttttctgaaacattaagtggagcactgtcatgaataacattttcaataaaactttttaattgaaatttcaaaatacttttaaaaacacattcaacatccccagtgcctcaatttactgctggaaaatagcatgtttttataagtataggttgtgtatcctaaaatttttttccttactatattatcctatagagttattaattctctggaaataaaatttgtctcatgagatctcaaaaacctgctaaaatttgagtatttttttttc

SEQ ID NO: 110445 - DNA, 1105 bp, Homo sapiens
agcattaacccaaaagtccacagttcaaagcctcatctgagacaagccaggcgtgctttatggacaatgcgctcctcaggccttgaccgcgtacttccccagcgggtacagccgctccttccgctgctgcttcttggtcttcgggttctcctcatgcttgttgagccggcggcgcatggcgcgtgtcttcttaggccgcaggtccaggggcttgtagttcctgcccttgtagaatttcctgaggttttctttctgagtctagttaataacagtgagaacacaggcaatggatttgcggacgactcggatcttagagagcttggaggccgcaccgcctgtcactttggcgacgcgcagctgggacagctccaccttcaggtcgtccagctgtttcagcagctcctccttcttcccgcgaagatctcgagccttgatcttggccattgctgcacaggccgccgacgccgccgcgccgcccgctccgagggaaagagcgtagattcaaatataaacttacctaatgatacggcaagtacatgcccagaaaaaaatgaaaatatatgtcttcaacaaatgtgtacaaaaatatttatagcagattattattttttgagacagggtctcactctgtcactcaggctggaatgcagtggcgctgtcttggctcactgcagccttcgcggcctgggctcatgtgatcctcccatcttcacttccttgagtaggtgggattacaggtgtgtgccaccatgcttggctaattaaaaaaaaaaaattgtagaggtgaagtctcactatattgcctaagccagtctagaactcttggattcaagtgatcctcccaccttggactcccaaagtgctgggattacaggcgtgcaccatggcgcctggcctgtagcagcattattttatttagttactatttaaaatttttaatttttgacaaattataattttacatctttaaggggtacaaagtgatattattatatatgtttatagtttggaattattgaatcaagcgaattacatatccatgtccttaaatacttaccatttattcctcctgtctaactgcaactttatacaatttgaccaacat

SEQ ID NO: 110446 - DNA, 268 bp, Homo sapiens
gtctttcagaggcaaatcttagtattacttatttttttttccatttaatgagagttgcttagcttgattagctcccagttttgtctttacaatggtcataccacagagcttgtgaatatcaattcttttacatttccttattataaacgatacatgttttgagcatcatgtctttacaaaagtagcctgatagtagaaattgttttgtaatagagaaaaaaggatttggttttatgttactaaagatgttacaattaatcaaaagaaa

SEQ ID NO: 110447 - DNA, 162 bp, Homo sapiens
tccactaggacaagagtcactggaaacttccagctaagtccattgaagcaggcagaatcttcaaggtcaatagtgcatcagttactctgatcccagtggtttcagtggaagggatggaagaagtgagggttgctgaagtttctacttggatgcatttctaag

SEQ ID NO: 110448 - DNA, 512 bp, Homo sapiens
tgaggaacaactggaggttctggcccacctacttgtactgcctggtgggtttggcccaatcagtaactgggggcctgagatcttcactgaaattggcaccatagcagctgggatcccagacctggctctttcagcactgctgcggggacagatccagggcgttactcctcttgccatttctgtcatccctcctcctaaatttgctgtggtgtttagtcccatccaactatctagtctcaccagtgctcaggctgtggctgtcactcctgagcaaatggcctttctgagtcctgagcagcgacgagcagttgcatgggcccaacatgagggaaaggagagcccagaacagcaaggtcgaagtacagcctggggcctccaggactggtcacgaccttcctggtccctggtattgactatcagcttccttggccacctgctatgagcctgtctctacagtagaaggagattgtggggagagaaatcttaagtcataatgaataaagtgcaaacag

SEQ ID NO: 110449 - DNA, 430 bp, Homo sapiens
ccttgaacctaggaggtggaggttgcagtgagctgagattgcaccactgcactccagcctgggcaacagagcaagactccatctcaaaaaaaaaaaaaaaaaaaagaaaagtgaccaccaaggactctccaaaaaaacttcagggctaagttcagttaggtcatgggataaaagattaacatacaaaaatgaactgtatttctatatagtaagaatgaatgagtggaaactgaaattaaaaacgctttataggccaaacatgctggctcgcaccagtaatcttagcacttaccatcctgggcaacatggcaaaatcctgtctctacaaaaaaatacaaaaatcagccaggtgtggtgatgcatacctgttgtcctcccagctacccaagaggttgaggtggaaggattacttgagcccaggaagttgagg

SEQ ID NO: 110450 - DNA, 452 bp, Homo sapiens
agctttttatacagaaatagctcagtgagaacaccccagcctactcagactgcagaacaaatcccaggaacttgcttttgtgcaatctcccccttgaagctcaagtctaaacacatcagagcttggcagggctgcatgggtacattagcgaacagacagaacaccctggctcctcaggcgctccttgtttttttccctctggaccagcagatttttcttacagcttacacctgctcctccccgacccccaacaacatgcagaaaaggaaagcccctcaagttttccttgatcaagaggttaaataaaaaaaacaactctctttcacactctaagggaaaggaaaataaaaaccaccagtagctaagacacacacacacacacacacacacacacacacacacacacacacacacacaaaattccccagagtgaacttttgccaactgtacca

SEQ ID NO: 110451 - DNA, 815 bp, Homo sapiens
actcaataaatacacatatattttatgaatgaataaactttttcaaaattcataggcctggttccactctgaaatcctcgtgcagtttggggtagagcctacatgtgtattttggaaaggcctttctgatcgttttgccaagtgctcctggctaattaataaccaccaagagccactaaactcaacaatctccaaggtcccttcacatgcagttgccacatttagcaaacaaaaatgcagagcatccagccaaatttgaatttcagataaacaatgaatacttttttagtgtaagtataggtcatgcagtatttggttgctgcaacttaaataaacataaccagataagacttctgcttagactgatagtttgggccagagagtggcaccttgaaactggcccagatttgaaaatcagacagagatagtcttggtttgagtctctgccctgatcttagcagattgcttaacttcactgggctccacaactacagtgtctaccctgtagagttggtgaaagtattagagataatagaggtaagatgcccagcacttagcaggcatttaataaagcttagctattattactattttttatctgctccacggggtttgaagaaaaataatagtatcaatgagactgttattggcaatactgtttactcgtaaattggcacttgaaataaccaagattatagttaacagttctaggtagagcttggcaaagttagattgaatgctgaccttgtattaaacaatacctctatgtctgggggaacaaaaccgtactaagtacagatcatccagaataaata

SEQ ID NO: 110452 - DNA, 690 bp, Homo sapiens
gaagtaaacaaataattacatgtagagtagtagtgtcaatggtagaggcatgaacacaacacagatttaacactagagaaagagtgatcacaaaagaaatgatgtttcagttgagttttaaatggcagctggagttcatctgaatgattaggtgtctaggacaggtttaaaggttagggagtaaggaagataatattcaaaataaaaagaacctgaggatattcacagaggacatttgcagaggcctgaaatagcattggtacattcctagaaccataaatagtttgatggtaatgtaaattacagtatgttttgaaaaatcatggaagatttataccacgataagaaacttcaactttattctaaagttgatgagcatttgacagattttaagcaagaaacaaatattaaatttatattttagaaagaattctagatacataaaaagcacttattataatccagtatccattcatgataactctcagctaactggaaataaaagggaacttccttggtctaaggaagaacatctacataaattctacaaccagccacatacttaatggtgaaataatgaatgtttttctcctaagatcaggaaaaagaaaaagatgtctcctcttacttctattcaggatggtactggtagttcaggccagtacagctatgcaagaaaaagaaataaaa

SEQ ID NO: 110453 - DNA, 428 bp, Homo sapiens
ttttggtagaattctctgatcccctacctccaatctgaattaggtctttcatgttttcctcacttggctcagtcttctacacctttacatagttgtatttttatatatttgtttaatgtctgactgtcaactccatgagagtgagaatcatgtctatttccttcactataatttatcctctgcctggcacatagtgggtgctcaagaatggcagcttcatcactaactccataaacaacacgcaattgtaagttactgtttcttgctcgatcaagaaagctcagattatttcagaatttgctgacaaactaatctctacaactttaaaacgttccaagaactgtattaaaagagtttctatagttgagtttgcccttcaaagtaagagagatttagagtgtaggataaaataagagtaagaagagagt

SEQ ID NO: 110454 - DNA, 745 bp, Homo sapiens
ctggctattaacaccacactgcaaagaaacttatttagtagataacaagttatatccatatatttttagatatcaatatatatgttgtggatcggtagcttggggcacattactgctttgaattgtggtatcttttattagatattgaaatactggattattgataagaccatgtagcagtgagaaaaatagtttttgctttgatttgtgtcagttatactatgttgttggagcttttgaagtagggagtgatcaggtagagacaggcagaagagattagtttgtatgtgttatcctgaaatctgagttatttgacatttttaaggcaaggcattgattgagttttatgaagataaattggcaaagaaaagtaatcccatctgctcaataacaattctttgcttttagccaagaaaattgatttcaacttgagagtaataatcatatttatcacacttgttaattgcatgaactgtatacaaattgtcaggcttattaaggtagatatttacggtcactgggcgttcctcacattccacattttcattgttatggcattaactattttttctgtttctctctttgtcactgaagacttcacgtagtataatagccagtattttctgtgattatatagcaatattctcaaacctaattgttcatacaaagtacaaatcagggactttttctactaggttctgaagtacttgttctctagatttaaactccagtgttgtactaatgg

SEQ ID NO: 110455 - DNA, 826 bp, Homo sapiens
actcctgacctcgtgatccacccgcctcccagtcccgttttgatggacacttgcgttgcttccagtggctgctgctgtacaccttgctgccgtgattagaccatgtgcatccggagccctttcctttcttttggtggccacctctccttgaggggccttgtgaccgtgccgagagcaagaactctgcaactgggctgactgggttcagattccaaatctgtaatttacgggctgagcaactgagcaagttgcttaaggacgctgttttttcatccagaaaaatggagataatagcagtacttcctttagaggttgttgtgaagattaacctattagtgtctgtgaagcgcttagtactatgaggtgtttaacataattattatgcagctaaaacttgaacatggggatgtgcttacttatttgtgggagctacaaattaaaacaattgaatttatggagacagtagaaggatggttaccagcgactaggaagggtagatggcggggtggagttaggggagaaagaggggatagttaatgggtacaaaaaaatagttagaatgaataagatctagtatttggtagcacaacagggtggctatagtcaacaataatttaattgtacatttaaaaataactaaaataatataattggattgtttgaaacacaaaggataattgcttgaggggatggatacccaatttaccccgatatgattattatgcattgcatgcctctatcaaaatagctcatatgccccataaatgtatacacctaccatgtatccacaaaaaattaaaaatggaaaaacattgagcatgggagg

SEQ ID NO: 110456 - DNA, 422 bp, Homo sapiens
acagcatggggtccagtgatactaaccgtgtggaaatagaactcctccagattacagggcacctgagaatttcttactgacttttgtttaataattcaaaaacacatcaaatcaaacttaatcaaggcaaaagctgtctctggagccttcttcgtgcttcctggagtcaagctcttacagaatcacggcagcacccccctccctagctcacgaaggaagctggaggactccacagctgcttcaggaaacagactgtccccagggaacccttcagagatcttgggaccagacaggatgtacctggactcctggaattccctctccagcctccaggtcccgtgaggatgtgagctggagcagtacgggcttccctgatccttcctgtgtccaggtgagcagcctcctgccacagagctgccctc

SEQ ID NO: 110457 - DNA, 762 bp, Homo sapiens
cgaggcgggtggatcacctgagatcaggagttcgagactagcctggccaacatggcaaaatcccatctctactaaaaatacaaaaaaaattagctgggtgtggtggcgggcgcctgtaatcccagctacttgggaggctgaggcaggagaattgcttgaacccgggaggcggaggttgcaatgagctgagattgtgccattgcactttagcctgggtgacaagagcgaaactcggtttaaataaaatagaataaaataaaagttagagaacaccaattttacaaatatctcatgtgatagtaaagaaaaggaggtaagtacacagcctctgatttcagacttcccaagttcaaactctagctttttcatttctgtgtaacatgggccaagtgtctggggtataaacctctctatgcctcagtttccttggctgcaaaatgggtataatgattgccctatttcctaattttgtgtgaagatttaaggagatagaggtagcatttaggctgcaggctggaacatagtaagctctaatcaaatgttgtttttgttatttttaaaattagcccacaagtgacatatctggccactgagaaaacagatactaatgttttaatcactcaagaatgtttatacaaaacagttcaagtttacataaagcaattaagtgctaaccttattgagctctaaatattcagcagatgttcacccttctaaacatcttgcctagttaaaccaatcctggtaatttcagtccccttg

SEQ ID NO: 110458 - DNA, 342 bp, Homo sapiens
tcgagaccagcctggccaacatggtgaaactccacctctactaaaaatacaaaaattagccaggcgtggtggcaggcgactgtagtcccagctactcaggaggctgaggcgggaggatcacttgaacccgggacgtcaaggctgcagtgagccaagaatgcgcgactgcactccagcctgggtgacagagactatctttaaaaaacaacacaaacaaaaaaaaaaaacaaccctgttgaacacccagatgttcactagaggtgccagaggtactgaattatgcccatccctacaagtgccaaaaattcatcatgacaagatccagcagattgacaagtaagt

SEQ ID NO: 110459 - DNA, 281 bp, Homo sapiens
actgacaccatgtgtatgtttcctccaactcatctccttggtgggttttgagatcttgaaggcaaagaactataactcatcagaaggtccaattcaggtatttgccttgggtgtgagcttggctatgaaacaatagagactactgtggaccaatgcaatgccaggtgaaccactcctttaattgtttatcagtgttgacccatctctcatatatcattagcttcaagaatctttggagtagccccaaattcccatctacagaggatctaccactgtggttt

SEQ ID NO: 110460 - DNA, 368 bp, Homo sapiens
accaccccaacattcaggaactaccaccctgattagtcacaagccatcaacattgagacaagaccctccatcagcaaaaagcttaagactcactaaaggctcagatgatcattagcatcttttggcaataaagtatttttttaattagtatttttcctttttttagacatagtgttattgcacactgaatagactgcagtataatgtaaacagaacttttatatttactgggaaaccaaaaaaattgtgtaattcactattgtgatacttgctttattacagtggtctagaacagaactcataataataactctgaggtatgcctgtacaaactttcagttgttctctcccagtggagtgcttaattc

SEQ ID NO: 110461 - DNA, 1371 bp, Homo sapiens
gctaaaattaattggagtctttttaaatgaagaaattgataactataggaagctttcaccagtctacaaatgtgaccagtaaatccaagaaaatgcagagtgtctgtgtactttgtggaggagcaatgtttatgttctaaggtaataataatggtattattattaaaataataatagctaccttgaaacctttttattttttttttgacagagtctcttttgtcacccaggctggagtgcagtggcgcgatcgcggcttactgcaacctctgtctcccagggttcaagtgattctcccgcctcagcctcccaagtagctgggattacaggcacacaccaccactcctggctaatttttgtattttttgtagagacaaggtttcaccatgttggccaggctgatctcaaactcctggcctcaagtgatccacccaccttggcctcccaaagtgctgggattacagtcgtgagccaccatgcctggcaatagatgccattttgagggcatattgcgtgcttaacactgtgcttttcctgtgctatcttattatacaactctaaaagggaaattactattatactcatcttctagatgaggcttagattgtccactgtcaagcttgttggtagcataggtaggatttaactccagagctcaagttcttttttgtttgtttatttttattttatttttattttttgagacagagtctcgctttaacacccagtctggagtacagtggcacgatctcggctcactgcaacctttacctcctgggttcaagtgattctcatgcctcagccacctgagtggctgggaccacaggcacgtgccaccatgccacgctaattttttaatttttactagagatgcggtctcatcatgttggccaggctggtcttgaattcctggcctcaagtgatccccctgcctaggcctcccaaagagctgggattacaggtgtgagccactgcgccagcctggagcccaagttcttacttgcaatactcttacttctcctccagcaaagaaacatgattatcaaggcactggggaccctgtgcagaacctgctttttcttgaatctcatggatctttttttctaacttgctggaattggagctccagaggtggaggtgtgtgagcaagtctattaatggccatcccttggcaagcttcaaaaccagacagaacaagaaaaacaattgaccaagagagaatagagaccccaatgcttctgaatgatctagttaaagatgcctttcggccaaataggattttttcttaactatcatttttgagcatgtttcttgtgtcttactgattttgagaagtgccttaaaattttaattggcaagttatatgtggga

SEQ ID NO: 110462 - DNA, 294 bp, Homo sapiens
ctgcaacctctacctcctgggttcaagcgattctccctgcctcagcctcccaagtatctgggattacaggcacgcaccaccatgtcgggctaatttttgtatttttagtacagacggggtttcaccatgttggccaggttggtctcaaactcctgacctcaggtgatccgcccaccttggcctcccgaagggcctccctgggattacgggcgtgagccaccgtgccccgcctccagtgtagcttttagtgactgcagaacattctttcaaatgggccaggcacctgtaatccca

SEQ ID NO: 110463 - DNA, 431 bp, Homo sapiens
gaaacagtggattagtgcctggttcttacccaggaaatagaagaattctgtattataataacaccattgtaaacagtagaaggttttttcccacataacattttcctcagataaggttttacaaaatttgggatgcacttccgaactccttcccttttggatgccctggcccttgccagccctccccttcccaggagcatggtgccccctcttcctagctgttcagggccccacccccattagaatcttcctttgcctgagaaccctactctctgctagatgacagcaaatgcagtgaattcatgttgtaattatgactttctgcaccttgaaatttggtgactggaaattttaggcattgctgttgattagtagggaaacatacatttaatttttcttcctctgctcctgtctgcctgcaaatagaattt

SEQ ID NO: 110464 - DNA, 327 bp, Homo sapiens
gccatagaaagctccaggattcaaaaaacatgattttgagctgggtgctggggatacatagactgcaaccgaattcttgtcttgaggagcatgtaatacagcaggaggctgcatggccctgcaaggttggttaaaggcacaattatggagaagagactcagggtagctatattcaacaagtagagcagcaattacagaagcaggacactcagaggcaatgtgcttttagcttttgtaggacctaccctcagacatgccatacatattaatattccaaaacaaaattaagcaaacctattccacaaatccataggaaagataaaatac

SEQ ID NO: 110465 - DNA, 470 bp, Homo sapiens
tttagactgctgtggttctactcagccaggacaagtgtttggtgctaagacaaaatagcatggtgtccaatcagtatgactacttttactcctcaattgtgatctctggttccttatgtattcacttattcattcactcacaaagcatttctcgagcacccactccatagcaaatagtgtgttggagacaaccaagtcttatccctgctatcaaaaaggtggcgtttagagccatacccctgcacttagttaaaaatggaaaaagcacgaaatttgtgggtagaagacgtgaacagaaacgtgttcctgattgacagcaatcaggttcagtaccatgcatggtttcaggcatcccttgagggtcatggaacatatttcccagagaaggagagactgctgtattagaaagcgcattttaattcttaacgtaagtgtagtcaaacaggaactcaggatcttatcatatatgc

SEQ ID NO: 110466 - DNA, 385 bp, Homo sapiens
tgccacttggtcaggtaaaaacacctatactatatgtatgtaaaaaaattcacttactcctgttttttactatcttatctcttacttcaatatggtgataaacaaagattatattcaattttattttatcttttccatgtcccatgatttcaatctagaaatagtgctgttattttttattttattgtaaatactttgtatttttccatggagtctattatcttcaaagtcttaaactcttcttctgtgttcgaacagtgtcatttgttttaacacacattgtcagttgtttttatttttgcaatattataactattgttgctcctcctctgctcaggaccctacaagggttctatgttgcatgcagcttaaaaacctgagataa

SEQ ID NO: 110467 - DNA, 221 bp, Homo sapiens
ttatggtcctaaaactttagtccatcagaattacctgtagtgcttgttaaagttttttgtttctttgtttgggtttttttgcttcaggatactttgtccttaagaaaataataggtttttattccccaagggttgccaaaaaaaaagcccagtttttttgtttgtttttttgagaggagtctcgctctgtcgcccaggctggagggcaatggcgccatctt

SEQ ID NO: 110468 - DNA, 681 bp, Homo sapiens
tctgtacataaaccccttgggagtagctgacagcttgtcatttctattgatattggatggtctacttagattcctctttttacatagttcaaattcttttttttaccatgtgccttgggggaaacatataaaaataaataaacaaggccctctctaacagacatttaagcctttaagcaaagttaaacagactcagcaaatggtattaagccattgagcagagcttccaagtagttcacaaggttgtggcttccggtgatgcatgagagtatgtgtgagattatgagggaagtgacatagtaactagaaatgttattgttttcttccaacaaaaaaaaagtcatatactcttcttaaaaccaaataactttatataagaagtgatggttcttatatattaaggatatataagaagtgatggttcttatatattaaggatatataagaagtgatggttcttatatattaaggatatataagaacctgacaacaagaatatctaacataataatctaagaagtaaacaaacaacaataaagacaaaaactccccaactaatgtaattcactgtagaatgagagtcattgagcttatttttatctttgttcaacaagataaaaacatcacttgttttttattctctgcacatgaactcttaactattaccttagggtgatcaat

SEQ ID NO: 110469 - DNA, 199 bp, Homo sapiens
acctcagccccctgagtagctttgattagaggtgtgtgccaccatacctggtgtgtgcgtgtgtgtgtgtgtgtgtgtgtgtgtgtgtaaagaaagcaattttcctaactcagcctgtcaaagtactgggattacaggcgccatcccctgcacccagcctaaactttgattgcatcactgcactccagcctgggccaca

SEQ ID NO: 110470 - DNA, 430 bp, Homo sapiens
ggcgtggtggctcatgcatgtaatcccagcactttgagaggctgaggtgggcagatcatgaggtcaagagatcaagaccatccaggccaacatggtgaaaccctgtctctactaaaaataccaaaattagctgggtgtggtggtgcacgcctgtagttccagctactcaggaggttgaggcaggagaatcacttgaacccaagaggaggaagttgcagtgagccgagattgtaccattccactccagtctgggcaacacagcgagactccatctcaaaaaagaaaaaagaaaaaaaaaaaagaagaagaagatggacttcttaggctaaggaatggtagaaagccagtggacctctgaatggccacggtgactcacgctttaaaagggccctgaactcagtacacttttctttttaacttctctgcagga

SEQ ID NO: 110471 - DNA, 542 bp, Homo sapiens
tattagagaactgaaatacttgactatcaataggtatatttttagacacaggttttgctgttgctgctgctgtatttttgtcttcaacttgtcttcgagattacacaaattaacaacacacaaacaactcagttttctcctagtctctttaacatcagatacatgtttagagagatagtcaattaatcattctttttttttttttttttttttgagactgagtctcactctgttgcccaggctggagtgcagtggcccaatctcggctcactgcaagctccgcctcccgggttcacgccattctctagcctcagcttcctgagtagctgggactacaggcaccagctcccacacctggctaattttttgtatttttagtagagacggggtttcaccgtgttagccaggatggtctggatctcctgaccccgtgatccacccgcctcagcctctcaaagtgctgggattacaggcgtgagctaccgcgcccggcctaatcattatattacctaaagttaaaactggtctctaatctgtccaga

SEQ ID NO: 110472 - DNA, 1187 bp, Homo sapiens
gatttttgctcttgtttttgtactttcatgttaatttttcaatcaacttatcaaattttgtgggaaaaaaatggcattatgtttagaattataatgaatgtatggatgaaattggagaaggctgacatttttacaatatcaattctttttgaccatgaagatagaaaaactgtggtggccagaattccaagatgaccccagtgatccttacccttacataatctcctcccgtgaataagtcactcccggaattgggatatgttaggtggcacacaggacttttaaggatgggcagttgtcctggtgggtctgacctaatcaggtgaaactgtaaaccacacaggcttttcctagagattcaaagggcgagtgggagtcaatgtgaggcagcttctttgttgctgactttgaagatggaggggaccctatggcaaggaatgtgggtggcctctagtccctaagagcagcccctggctgacagccagcaggaaacggacatcagcccaacacctgcaagcaactgcatttggccaacaacccaagtgagtatgggagcagactcttccccggagctcccagaaggaacccagcccactgacaccccaatttctgctgaacggaggacctaccaagccgtgcctggatgtctgacctgcagcttggagctaagaaatgaggttgtgataagctaccaagtatgtggggacttgttacacagcaacagaaaactacatagtctcaatttacttgtatctacagtcatgggctttaatgaagttttatagttttctgtatataggccttgaatatctttccttccatttatttttagaaaccttaagaatttttaatcttatttaaatatcttttaaaaaatgaatataactgaatccttgaatataatttataagcttattgctagtgtctagaaaagcaattgatttcagtatataatctcagggcaggccaggtgcagtgactcacacctgtaatctcagcactttgggaggccaaggtgggaggatcacttgagcctaggaattcaagaatagcctgggcaacatagagatactccatctctacaagaaataaaacaattagccagacctggtggcatgtgcctgtagttacagctactcaggaggccaaggtaggaggactgcttgagcccacaagttggaggctgc

SEQ ID NO: 110473 - DNA, 120 bp, Homo sapiens
gtatggggctacggccgcttcccctcctgcacagtctccgagcacagcactcacgagcctcacatccctctcccttccatcctccaaggaagaagtggtcacccccatcttgaacaggtg

SEQ ID NO: 110474 - DNA, 540 bp, Homo sapiens
ctaactcagggctcttccagacagtagacaaaaacccacatggattctgacagtctcatagacctctctgcggaccctgttttctgtcagtttagcgagtggtgcctctcccgcctgtggccatgtggaaaaagcacagcttctgcaaagcctgatcatctgggctggccttagtgactgtgcttagtcaacagaatgtgggggaagggatatttggaaatgctgagggtcatacataaggggccttgcagctccaacctgattctctctgaatgataccatgtgtgaagtccaactaccccgagacctgccatgctggctggaaagtacaagtcagccatgtcaagaggtcagagtggaacccaggcagccccagctgttgcatccatcccagcccagtcaccagggtcatacagcagacaagacatggagaagagctgacagactctgcccacagccagagccagtcacaagtggggcaatgtcacactatcacagccactccaactgagttcctgattatggaggaactatcactac

SEQ ID NO: 110475 - DNA, 257 bp, Homo sapiens
atgccatgccatgccatcttttgcctgtattattatttttcagcttttattttagattcagggtgtacatgtgcaggtttgttagaaagagtatatcgtatgatgctgaagtttgggatacagttgaaccagtcacccaggtagtgagcatagtactcaatagataacgttctaacattactcctccttccctccctgttcttgtctctgtctattgtatctttatgtccatgtgtaccaaatgtttagctcattct

SEQ ID NO: 110476 - DNA, 257 bp, Homo sapiens
aagtattggtatactgtcaagttttctgaaattctcatttttacttgaaagatggaattttatttttggcataaaatactttaaattgtttttgttctttaaaaaaatcagttcagagggacctgattagtaataggcagagaccttatcagttatgttttggaagagtataaaggctgaagtactgtggttttattatagaaaccatttaatactaatctgatggcagttctcagtggcttgagtttgcagagcac

SEQ ID NO: 110477 - DNA, 406 bp, Homo sapiens
cggggggaaagtttttcttcacaaagggaagtcaaataatgagtgtacagggaacaagagaaatggagagtcatcatttttacaaccaccatagtaacaactgattctggaaagatgcacctgtggatgctaacctcattaggtgaaaggctattagaaaacaagatattcagaatcttagttattgattgcaaaagagaaaaagatatctttacaatggggaaatctggcaaatacacctttaccaaataatcaagtttaatatcatcaacaaactaacatcataagcctcctggtattatatactatgaaggacacaacaacgcccatgaaggatgcctaatacatttagccaaaatctactcaggaggaaacttcagacacgtcaaaattgagagatactctg

SEQ ID NO: 110478 - DNA, 359 bp, Homo sapiens
ttaaaagaaagaagatattcagaacccagctggttgcagtggctcacacctgcaatcccagtattttgggaggccagggtgggaggactgcttgagcccagaagtccaagactagcctggccaacatagtgggtcagtctgtctctataaaaaaattaaaacaaaaaaattatcccagtgtggtggtgctcacctgtagtctcagctacttggcaggctgaggcagaagaattgcttgagccaggggttggaggctgcaatgagctgtgatcatgccactgcactccaacatggacaacagagcaagatcttatctcaaaataaataattatgaacagtattttaaaatttctcaataa

SEQ ID NO: 110479 - DNA, 309 bp, Homo sapiens
atcctgccaaaaagagatttgtttcctcctctgttcttagaccaattaccaaataaagcactccacagagaatccagatgaaatatttctccacccagttggtaagaaaagtaattaaaccaacctgctgtgctgagcaggcctgcagcaatgtaacacttagttatagcaacagccatagataggaactcagctgcaggctcctgtcagaccgatctgggcatttctaaccactgtccttagcaacgttcacaaagggccccgtcttagactcagaaaggcagctcacagcccttaggggtatggttt

SEQ ID NO: 110480 - DNA, 817 bp, Homo sapiens
gtcaccatgttggctgggctggtctcaaactcctgacctcaagtgatccacctgccttggcctctcaaagtgctggaatgacaggtgtgagccaccgtgcctggccaaattttttaaaaataaaactaatgttgaccaggttatttttttgtaaaagagaaaatacgaatccaaggttattttagctctgcttaattacgtacagcttgttttctgaaaaactctttgtatttgaagatgaggatattgatgatgataggtatggtacaagaagcctgatctatgaacagtagtcctttctgccctatgtctgtacagctttaagactatatttggtcagtagttattggctgagccttgtactatttttgattcagtcttaatcttttgctgaaggcactcctctccttgcttcatcccccactgcacctccatattcttgacttaaaattgaggtagatgtgcagctactgtttcttagaagtttaaaactttgtcttgaagttggttacaggattttcttaatcttgtaagcatcatatttgaacattattttggtaataatgtttttgtcctagcccccaaaattctggcctactaaagttggattgagattattattctttaaaatagctagattttctattttccaaagacttggtaacaaggcacttttcaactcttgagttttaagttaaccatagtcttttcttctgttggtgtgaagggacagtttaagagtggcctggcaacaatggtcttcagcccttggaaggacgctttttttttaaaacccgctgggggcgggcccgggcgg

SEQ ID NO: 110481 - DNA, 319 bp, Homo sapiens
aatgaaaaggtgacggtgcgtttcaagcaaaagaggctaggccaggcctagtgactcatgtctgtgatcccagccagcactttgggaggctgaggtgggagaatcacttgagcccagtaggtcaacactgtgaccagcctgggcaacatcatgagaccatggctcttcaaaaaattaaaaattaaaaaattagcgaggtatgctggctcacgcctgtaatcccagcactttgggaggccgaggtgggtggatcactggaggtcagcagtttgagaccagccaggccaacatgatgaaaccctgtctctactaaaaatac

SEQ ID NO: 110482 - DNA, 333 bp, Homo sapiens
agtttttgaacagagttgagattgatggaaaggaagattgctctgataattctgtagaaaattgattgttgggagcaagaggtgaactggagccccaggaccagtcaagagttggtgaacagtccaggcacaaatttaagaagacctgaactaataaggtagatttcagaaggaatgaatctgagacaatgttaaagaaacagaaaaaaaaaatggaggtgtgactaattggatgtgggagtttacaatcctgttgggatgagaaatcctacccatagaacctctccctgactcctataggataaaattcaaacttctaaacatggtacatac

SEQ ID NO: 110483 - DNA, 467 bp, Homo sapiens
tagaaagccctcaccagttccaccactgtatcctcctacctagctttagtttttgtcatagcacttaacaccatgtgacatacatagcagcttttctgtattgtcttctcccactggaatgtgagcttcttgtgggcaaggccttttctgttcttgggcagtgctgaatccttagagcctagaggacagcccaacacagagaaggtactaagtagtattttgatgagtgaatgatagaatgatagagatagaactattgaatgagttccctgagttcaacttttagtggaatgtttgccctcctaaaggattgtgccctttcccatctaagctgtcctttctcccatggccagaagagggcactgtgtggtcaggaagctcagccacactttactgcatagcacattgcagtttgatagtaaagacctcggtgcaaagggcttttttcatgacaacatttaaaatgt

SEQ ID NO: 110484 - DNA, 404 bp, Homo sapiens
gaaggtggctgaggttggagaggcatctgggaggagccccagtcacagaggagaagcggtgggagcaagtggcacaggggttgggggagccggctgcctcctggaccccctacctctccctagctgttccccgagcccctccaagccagtggttcctttccctccacagcggcccctcctcctgagctctgtctccaccatttacggaagacagaaacctggagtcaccttggccttcctgtctccttggcctgccacagccgatctgtcaggaatgtatttcacctccttaagttccctctaactgcctctcctcctccatccctacagcctgggcttaaattcagattttcctcctctcctgcctgaataatttcaacagtggcccacctggtcttgtcctc

SEQ ID NO: 110485 - DNA, 168 bp, Homo sapiens
agacaggatctcactctgtcacccaggctggagtacagtggcacaatcacaacacactacaacagccttaacttcctgggctcaaggagtcctctcaccttagcccctcggatagctgggactacaggcatgtgccaccatgcccaattaaatttttaattttttgta

SEQ ID NO: 110486 - DNA, 281 bp, Homo sapiens
tgagacggagtctcgctctgtcgcccaggccggactgcggactgcagtggcgcaatctcggctcactgcaagctccgcttcccgggttcatgccattctcctgcctcagcctcccgagtagctgggactacaggcgcccgccaccgcgcccggctaaatttttgtatttttagtagagacttctttccagtttttaatgacagtgtctgaaatgcttcacttgtgtgaggtggacctccaaaatttggtcagcattctctctgccatactctggttatagt

SEQ ID NO: 110487 - DNA, 439 bp, Homo sapiens
aaaccattggagaagctcgatgccacagaagccatgtgcccatgactttaccactttctctggaattgttttggctgtcattcctttgaacccgctctgaatcaactagccaggacatgtggactcgcatacataagcccctcttttcgcactcatcctgctcttttatccttctattcttctgaaaagggtttttttaatgtacaggtttactaattcatatctcgttagaccccagagacaaaactgcgtggaagcagtccagtccactgctttgaacaaggcggtcttcgcggtgtaatatctctcagctgcttgaggtttcacacattcacaaaaataacagcatttttagctgatcccaatagatttttctctgcagctgcatcacttgaaaaagctttttgttccagttcttaaagtctaagtattgaaagta

SEQ ID NO: 110488 - DNA, 415 bp, Homo sapiens
cagtgtgcccatgatgaaaatgcagactaagaatgatgcaaatcaaatggcaagccacagattcctttaagaactgactgagcctaagtcataccaggaagtcaatcctgaaagcagcgagagaggggctgctctggaaggtcctgtgcccggcatgacggggcttggacatctgctgcctccaaacctcatgttgcgaccgattccctttgttggaggtggggcccgaggggcggtgtctgggccatggggatgggtcccttacgaatggcttggtgctcattgcaacgagtgagttctcgctgagttcacgcgagatctggcggtttcagagtgcgtggcaccttcccttctctctcttgctcccgctcttgccatgtgacacatgggctccccttgatcttccaccatgatc

SEQ ID NO: 110489 - DNA, 233 bp, Homo sapiens
ttttgggggtaatggctgaagtagaaagtcaaagatcataaatttagggaatacctgatattcatggccaaatatcaataaaagtttcgattgattagtcagttggctatcgtgtgatgatttcagcaggctgatttacattacatagacaatgtaagaaaaatttgtctgctgctatgtaattaacctttgagtagccacattattagagtggagcggtggtagagataatg

SEQ ID NO: 110490 - DNA, 288 bp, Homo sapiens
ggtcgactgaaaaattcatgtaagccgcgtctttggtccacagtccttgctctgctgcattctgtggccagagcgccgttgaccataaccctgctctgggtctagaactctaaccagtgtagggatcccccacagtcccaacctctcatccaagatgtgtttggaactcaggcttttttgtatacatcatacattatgtggcacctctttggaacctggggctgctcctcataatcagacccatttatattttcggggcaaaacatatgtattcaggtgaactggaag

SEQ ID NO: 110491 - DNA, 277 bp, Homo sapiens
agaaaagaaaaaggatttaaaatcaataacctaagtatctaacttacgaaactagaaaaggaagatcaaattaaacccaaagttagcagatgaaaagaaaaaaagaattatagcagaaatcaatgcaactgaaaataggaaatcaacagagaaatgaaagtcaataaaactgacaagcttctaaccagcttaaccaagaaaaaaagagaaaagacacaaattactaacataaaaacagaaaaggcggccaggcgcggtggctcacacctgtaatccc

SEQ ID NO: 110492 - DNA, 345 bp, Homo sapiens
ggaggagtttgggagagttctgtgctgagaagcagggcacccaggagggaacctaagtcagaacacctctgagtgcaagagcacgtctgaacgctgctgaccactggagggcccctgcctccgttcacaccagcaataagaacaaaccctatgggttcctaccctttggcttccctgcttcattcctctgcactgtggcccagaaggacctatggtaggaagggctgacgcctgctctctggtgccctgtgaggaccaacctgggctcagagcagtgtgtagccagtgggaagtgacccgcaagcagggtccaagaaggctgctcgaggacacgcacctgagctg

SEQ ID NO: 110493 - DNA, 268 bp, Homo sapiens
ataaattgcctaggactgggactgtggcttggatagctattcctgcccttcctatcatcccaggaaggttgggcccacctggggagagaagtagaataaggaattagtacctaccaccctcgatttgttaatctgagcccaaattttgagtcttactggatctgtaaagtgaagtgacaccaggcttgtttttgttcagtgctgtatatagcaactaattgtgagaggattgtagctgagacctttattatctagctttatgtctttg

SEQ ID NO: 110494 - DNA, 358 bp, Homo sapiens
cattatacaaaaatgatgaatgctgaaatgaaaagaacttaaaaatgtacttggaatttcaacaggctatatttctagatacagataaaataagtgatgccacaaaaggcaattatgtattaaatgaaaaaactgccaggggttgaaagcttttttaagcagtagttttataaaagtgtttgttgagtacaacagaaattatgttataaacaagcatttgcaaaggtaggaaatacttttgttcaggatgtcaaacatcgatggctaaacattcttgggccagatttagtcaaaaagttaaattatttttggagatttacatagcagctggttacaacagattaaaaactccatccac

SEQ ID NO: 110495 - DNA, 347 bp, Homo sapiens
agcagttgcccagtatgcagcctcagtggaatgtctcattgaagagctgttcctagatcctcccacaaaaacctaagagcagaggtcaccttccccaggtgattttgcattgctcatcggcagcctagactatggtactcaatagtagcttctgatatcgaacctcacatttctcatgctcaaagaaggcacaacctaagtcagacacagctgtggtcggcttccttctcccactcctcttccaggcttccgccaacaaattggtacagcagagtctcatttccttaggggtcctggaacttccttttcactgtgatttcaaaaacatttattagaggatacattta

SEQ ID NO: 110496 - DNA, 861 bp, Homo sapiens
gagaagagccaggaagaaattttctttcccaacctgtgtccaaggggcacacgcaaatcccaaattctcccctgaaccctcccaattcacctctgcagactcttttccccttgtttttttgttttttgttgttttttgttttttgatttctcatgtctgactttgggtccatcctggaatgagaggagggggctccctcagcactgagccctgtgtagtgaaaggggcttcacagagaaaaaaggaggaagggtcctcagggtcaagttcctgctctctgtcaccaacaattccctttctgtcacttctttgtgttcttttacctactccataagctacaagggacaaggaggttttgaaatgagctcacactttttccttaaatgagaagaggaagccccttgggtgatggaggagcagctcagactctgcccccatctctgctcccagcacccccagtgactgactgaccccaccctgaagccacctaaggtggaaccagggcatatggagaaggtgcccaggtgtctgtcctgaatcaggctaaatcaagatgctaatcaacaccaaagcctcccctggatcaggccgcaggaaaatgggaagacatggagcctcatgacagactgctgagctgtgtcctggctctgaagtcactggctgtataagactgtgggcacagcacatgggacacagcacagaggacagcaagtgacgcacacttggagacatagggagattcagccatggggactctgcatggcagggaaggggcagtgccaaaaagtgtgtatttatagagaggataagactaccagccactatgtatctaatataggacttaccttttcaacccttcca

SEQ ID NO: 110497 - DNA, 256 bp, Homo sapiens
aacctctggatgcccctctgctagcagataatgtgccatgccacgtcttgtttgcactccattaggctaaataattatcttgttcaaatgcactttctggggacgcagagctttttctattcctggtgtcctggaggaaccctcacagctgaagcactggaagtctgactggaggggggaagggggttgaccacctcccaggtggaataaggagtctttcccagagtcaggttccccacaggggcagtcgccccag

SEQ ID NO: 110498 - DNA, 243 bp, Homo sapiens
gtactcaaaaacactcaacagattaactagaaaaagccagtgatccaataggaaaaacatggtaaagaatatgaatagacagttactagaaaggattttatgcacatgaaaaaaatgctcggacatggtggctcacacctataatcccaacactttcggaagcttaaggtgggaagatggcttgagcccaggagtttgagaccagcctgggcaacaataagagaccccatttctgcaaaaagt

SEQ ID NO: 110499 - DNA, 302 bp, Homo sapiens
tacttcctaccaagatcctaacccatacaacatccaatcaaagtttccaatgggaaacttaagtcatccacaacccctttatagcagtcttgaaaaagccacatgcaacttctattgattcctcagggacaacacaggtggaagggggaatgaaagacgtaaaaagtgcatcaaactcttaggtcatcagtgattaaaaagggtttcatcatttgccaactttatgcccttaagaaagttacttaacctccattctttttttagtttttttttttttttttgagacggagtcttgctccgtc

SEQ ID NO: 110500 - DNA, 638 bp, Homo sapiens
ggttcacaggtctcagctgtgaaattgtgtttgtacacggtggctttttctagaaaaatgaaccgcaaagtatttctttcctcgtgaatgtcgaccattttctcgagtctggttgttgttggccagtgacacaaacctgcagcttctccccttcttgcttccctccccgccccttggctccgggcacagcgtggctgaaccggcttatctggcctcgtctctggaggcctccccagctgtcatgtccgttgacatttcactgttcctggcagtggctgtgcccagacgcgccgtggcacgtgggagtgatgctggtctttgccagtgctctgcacacctgtggggaggcctctcggggtttcctgccaggtctctgtgcaccccccggtgagagatctgaggaggaggaggaggaaccgagggcaggtagggcgctcttcagatgtggagggttggaatctccagtttaataacaaactttatcctaccttaagttttcaaaagtcttgtaaagaacgggtccattcatttttagctgctccgtgaaaggtgagaaagctgagtagggggctgtgtcccaagaccagggtttgctgtggcctggctcgattgagaatcccctgggccccaggagggtg

SEQ ID NO: 110501 - DNA, 300 bp, Homo sapiens
cttggcaaccgctaatctgtctctgtaggtttgcctcttctgaacatttcacataaatggaatcatatagtatgtggtcttttgtgactggcttctttcatttagcaaggttttcaaggttcatctgtgttatagcatgtatcagtactttatccgaggactatgattttttgattgcttactgtaaacctatggcataaaaatctctgggaacaaggcctggaaataattcttttttttttttttttcctgagacagtcttactctgtcgcccgggctggagtgcagtggcgtgatctc

SEQ ID NO: 110502 - DNA, 213 bp, Homo sapiens
acagcttataaacagagccacgcggcacggcacctcccgagcctgcttccttccctccgtgagataaagtcaagactcatccaggttgcctgcatctgtaggtcgctgcttttcatccactcattggcagaggcacatgcgggtagtgtgctggctctgagttggtggctggcatggacgtcggctaccagcctctgcttccatcccttgagg

SEQ ID NO: 110503 - DNA, 213 bp, Homo sapiens
ggtcaccctcattaccttagctttgaagcttctcttacattttctttcttatatgtcagttcaagaaacgggctttcagagacaagtacactgaccctctcagccaatgatccaccaagtgactattccacacgtaggcagctgtacacatagccacttgccggggggaaagaaaatcaattcattccagaagattattgaagctattttatt

SEQ ID NO: 110504 - DNA, 723 bp, Homo sapiens
accatgttggtcaggctggtctcgaactcctgaccttgtgatccacctgcctcggatcccaaagtgctgggattacatgcgttagccaccacgcctggctcacaataatattattttaagaagtattttccaatattgaagaatctttgtgtcatccaagaacacatactacttacttctacatcacccgttaagaactctaaataccttattcattagtatagaaaatcttttaactctttcacagagaagaatgacataggcaaatggaatttgtatccccaggagtgtcaatttttttaccaaaatccaaacttaattttcatcagtgtgcccatttttataatgtgcttaccccagttgcaaatcactagttaacagtgtggagtgagaagttatactactgaagatttcaaaatgtgcctcagcttatctaccttattatgactagaataattataagaattaaataatatgcataaagcacttagcatattgcctattatcattactatgtagagagatagaaatgtgtgaaaatgggagtttttaccttaaggatgtaatttttcatccgtgtaagattacccaatattctataaaataagagatgttacataactagaaagttgtagccattcaaccatttttctggaactagctttattatcctctacttttttaaatccagcagattctctccacaatgtctttctgctcttt

SEQ ID NO: 110505 - DNA, 375 bp, Homo sapiens
gtaagcatagttgtaagcgtgctgaatgaagtttatttgcactttgtgtattcccactttttagttatgtactttataagtggaatttatttgactctaacttttgtaatttagataatcattgtttgtgttcaaattcaaatgtgaggaactttgaatgcatttgtgatccaagtcattaccaaaaattgtgtaaatataaatgagataaacaaaatagaaatggtggtctcatatgaaaggtatagattggtgtctgatgttgtatcctaattttatgtaccagattcacatgttaaaattctatctagaggtcctgggattattctctctcccttttttttaacatgtgttttatagtcaagttactaagtg

SEQ ID NO: 110506 - DNA, 646 bp, Homo sapiens
cttaaggatgtaatttttcatccgtgtaagattacccaatattctataaaataagagatgttacataactagaaagttgtagccattcaaccatttttctggaactagctttattatcctctactaaaatggttttggccactataactttggtctttcaaatacagatcattattaagtttttaaatccagcagattctctccacaatgtctttctgctctttacctttgaggagtttttttaaatggcaaattattctatatcatctttttaaaagttatgacaattaaagatttaaaatctcagctaaaatattatatatggatttttagttacattttatgcccaatcgctagttgtaagcatagttgtaagcgtgctgaatgaagtttatttgcactttgtgtattcccactttttagttatgtactttataagtggaatttatttgactctaacttttgtaatttagataatcattgtttgtgttcaaattcaaatgtgaggaactttgaatgcatttgtgatccaagtcattaccaaaaattgtgtaaatataaatgagataaacaaaatagaaatggtggtctcatatgaaaggtatagattggtgtctgatgttgtatcctaattttatgtaccaga

SEQ ID NO: 110507 - DNA, 399 bp, Homo sapiens
tggggaatcagatacagtatatgagggaaaagttcaaatcaagaatgactccaaggtttctggtctaagcaactgggaagagggacttggcactaattaagacaggggagacggtaagtggtacaaatcttgggggaaaaggctaagtgtagtcataacaacaaaaatgtggagatcaataccagtcataagcttacatgcaaaaagccttaaaaatgttagcgacagaatccagcaatatataatataaaagagacaatatacatgaccaaactggatatacttcaggaataaaaggttggtataaaaatgtaatgaactcggctgggcgtggtggctcatgcctgtaatcccagcactttgggaggctgaggtgggtggatcgtggggtcaggagtt

SEQ ID NO: 110508 - DNA, 216 bp, Homo sapiens
gaaaaaaaaaatcagtagcaccaaatggaattttaatacaaatattattttgctacactctttattgccctcctagctaaatcaagttatccaagttaatgaaattttccacactcagaaatttggacagggcagttggtgcctgtcagtaaacatagtaaatctaggataacatattttttcgtgcctttttgagttcgtgtgattttgaatgag

SEQ ID NO: 110509 - DNA, 1411 bp, Homo sapiens
cgggaaacggcaaacagcgagatatccgagcgagagtcccgccctgcatcagtttgcggaaccgccttggtagaaggagagaaggggagtggaggaagcacgggactggagggaccaaagttccccgatggcggcccaggggtgcgcggcatcgcggctgctccagctgctgctgcagcttctgcttctactgttgctgctggcggcgggcggggcgcgcgcgcggtggcgcggggagggcaccagcgcacacttgcgggacatcttcctgggccgctgcgccgagtaccgcgcactgctgagtcccgagcagcggaacaagaactgcacagccatctgggaagcctttaaagtggcgctggacaaggatccctgctccgtgctgccctcagactatgacctttttattaacttgtccaggcactctattcccagagataagtccctgttctgggaaaatagccacctccttgttaacagctttgcagacaacacccgtcgttttatgcccctgagcgatgttctgtatggcagggttgcagatttcttgagctggtgtcgacagaaaaatgactctggactcgattaccaatcctgccctacatcagaagactgtgaaaataatcctgtggattccttttggaaaagggcatccatccagtattccaaggatagttctggggtgatccacgtcatgctgaatggttcagagccaacaggagcctatcccatcaaaggtttttttgcagattatgaaattccaaacctccagaaggaaaaaattacacgaatcgagatctgggttatgcatgaaattgggggacccaatgtggaatcctgcggggaaggcagcatgaaagtcctggaaaagaggctgaaggacatggggttccagtacagctgtattaatgattaccgaccagtgaagctcttacagtgcgtggaccacagcacccatcctgactgtgccttaaagtcggcagcagccgctactcaaagaaaagccccaagtctttatacagaacaaagggcgggtcttatcattcccctctttctggtgctggcttccaggactcaactgtaactggaaactgtgttgctctaaccctcctccagccctgcagcctccccttgcagtcatcattcgtgttctgtgtataccaaatgattctgttatctaaagaagctttttgctgggaaaacgatgtcctgaaaatggtatttcaatgaggcatatgttcaggatttcagaaacaagaagttagttctatttagcaggttaaaaaatgctgcattagaattaaagcaagttattttcttatttgtataatgacacaaagcattgggagtcagactgcttgtatattatcaaacattttaagagaattctaataaagctgtattttacatc

SEQ ID NO: 110510 - DNA, 2022 bp, Homo sapiens
cgggaaacggcaaacagcgagatatccgagcgagagtcccgccctgcatcagtttgcggaaccgccttggtagaaggagagaaggggagtggaggaagcacgggactggagggaccaaagttccccgatggcggcccaggggtgcgcggcatcgcggctgctccagctgctgctgcagcttctgcttctactgttgctgctggcggcgggcggggcgcgcgcgcggtggcgcggggagggcaccagcgcacacttgcgggacatcttcctgggccgctgcgccgagtaccgcgcactgctgagtcccgagcagcggaacaagaactgcacagccatctgggaagcctttaaagtggcgctggacaaggatccctgctccgtgctgccctcagactatgacctttttattaacttgtccaggcactctattcccagagataagtccctgttctgggaaaatagccacctccttgttaacagctttgcagacaacacccgtcgttttatgcccctgagcgatgttctgtatggcagggttgcagatttcttgagctggtgtcgacagaaaaatgactctggactcgattaccaatcctgccctacatcagaagactgtgaaaataatcctgtggattccttttggaaaagggcatccatccagtattccaaggatagttctggggtgatccacgtcatgctgaatggttcagagccaacaggagcctatcccatcaaaggtttttttgcagattatgaaattccaaacctccagaaggaaaaaattacacgaatcgagatctgggttatgcatgaaattgggggacccaatgtggaatcctgcggggaaggcagcatgaaagtcctggaaaagaggctgaaggacatggggttccagtacagctgtattaatgattaccgaccagtgaagctcttacagtgcgtggaccacagcacccatcctgactgtgccttaaagtcggcagcagccgctactcaaagaaaagccccaagtctttatacagaacaaagggcgggtcttatcattcccctctttctggtgctggcttccaggactcaactgtaactggaaactgtgttgctctaaccctcctccagccctgcagcctccccttgcagtcatcattcgtgttctgtgtataccaaatgattctgttatctaaagaagctttttgctgggaaaacgatgtcctgaaaatggtatttcaatgaggcatatgttcaggatttcagaaacaagaagttagttctatttagcaggttaaaaaatgctgcattagaattaaagcaagttattttcttatttgtataatgacacaaagcattgggagtcagactgcttgtatattatcaaacattttaagagaattctaataaagctgtattttacatcatctatattttcctatatctccagcagcacggacactgcatgcttgttgattgcttaagacatatgtatactatataaatgtatgcatatatggtctgcaaagttttcatttttcatttatttgggtataaagatgttcagttaatggttccctttttgttttgagagaccagagtttcgctcctttgcccaggctggagtgaggtggggagatctcagctcactgcaaacctctgcttccaggattcaagcgattctcctgcctcagcctcccaagtagctgggattgcaggtgcctgccaccatgtccagctaatttttgtatttttggtagagatggggtttcaccatgttggccaggctagtctcgaattcctgacctcaggtgatccacccacctcagcctcccaaagtgctaggattacaggcgtgagccaccacatccagccataatagttacttataatgagggaaaaacccaaaatatccagtaatatttacatatttactgaaactgtttggaacttgtattagtttgttcttgcattgctataaagaactgcccgagactgggtaatttacaaaaataaaaataaaaaagaggtttaatt

SEQ ID NO: 110511 - DNA, 1207 bp, Homo sapiens
cgggaaacggcaaacagcgagatatccgagcgagagtcccgccctgcatcagtttgcggaaccgccttggtagaaggagagaaggggagtggaggaagcacgggactggagggaccaaagttccccgatggcggcccaggggtgcgcggcatcgcggctgctccagctgctgctgcagcttctgcttctactgttgctgctggcggcgggcggggcgcgcgcgcggtggcgcggggagggcaccagcgcacacttgcgggacatcttcctgggccgctgcgccgagtaccgcgcactgctgagtcccgagcagcggaacaagaactgcacagccatctgggaagcctttaaagtggcgctggacaaggatccctgctccgtgctgccctcagactatgacctttttattaacttgtccaggcactctattcccagagataagtccctgttctgggaaaatagccacctccttgttaacagctttgcagacaacacccgtcgttttatgcccctgagcgatgttctgtatggcagggttgcagatttcttgagctggtgtcgacagaaaaatgactctggactcgattaccaatcctgccctacatcagaagactgtgaaaataatcctgtggattccttttggaaaagggcatccatccagtattccaaggatagttctggggtgatccacgtcatgctgaatggttcagagccaacaggagcctatcccatcaaaggtttttttgcagattatgaaattccaaacctccagaaggaaaaaattacacgaatcgagatctgggttatgcatgaaattgggggacccaatgtggaatcctgcggggaaggcagcatgaaagtcctggaaaagaggctgaaggacatggggttccagtacagctgtattaatgattaccgaccagtgaagctcttacagtgcgtggaccacagcacccatcctgactgtgccttaaagtcagacggggtttcaccgtgttggccaggatggtctcgatctcctggccttgtgatccgccttccttggcctcctaaagtgctgggattacaggcgtaagccaccacgcctggcccacaccaccttttatgtaatcctttctgagtcatgggctggcttggttgtatgttgttatagtagttgttttgctattataaacaatgctgaaatataatccttgattatatactt

SEQ ID NO: 110512 - DNA, 1503 bp, Homo sapiens
cgggaaacggcaaacagcgagatatccgagcgagagtcccgccctgcatcagtttgcggaaccgccttggtagaaggagagaaggggagtggaggaagcacgggactggagggaccaaagttccccgatggcggcccaggggtgcgcggcatcgcggctgctccagctgctgctgcagcttctgcttctactgttgctgctggcggcgggcggggcgcgcgcgcggtggcgcggggagggcaccagcgcacacttgcgggacatcttcctgggccgctgcgccgagtaccgcgcactgctgagtcccgagcagcggaacaagaactgcacagccatctgggaagcctttaaagtggcgctggacaaggatccctgctccgtgctgccctcagactatgacctttttattaacttgtccaggcactctattcccagagataagtccctgttctgggaaaatagccacctccttgttaacagctttgcagacaacacccgtcgttttatgcccctgagcgatgttctgtatggcagggttgcagatttcttgagctggtgtcgacagaaaaatgactctggactcgattaccaatcctgccctacatcagaagactgtgaaaataatcctgtggattccttttggaaaagggcatccatccagtattccaaggatagttctggggtgatccacgtcatgctgaatggttcagagccaacaggagcctatcccatcaaaggtttttttgcagattatgaaattccaaacctccagaaggaaaaaattacacgaatcgagatctgggttatgcatgaaattgggggacccaatgtggaatcctgcggggaaggcagcatgaaagtcctggaaaagaggctgaaggacatggggttccagtacagctgtattaatgattaccgaccagtgaagctcttacagtgcgtggaccacagcacccatcctgactgtgccttaaagtcgaaactgtgggaaccatgatggggaagatactgactgtcagagagtccaaagatgtaaatgccttccactcccacagcaaggaagccgaaatctccagaggctctggcaagagttgagtcaattgcatgcctgcctagtccagctccgtccacatgaatgctctccacaagcttcagaggaaacaggataaaatggactcccaaatatttagggtggtgaaaatactctgcatgatactagaattgtggatacaggtgattatatatgtgtccaaacctacagaaggtacaacaccaagggtgaaccctcaggtaaactacagaggctgggtgaccatgatgtttcaatgtcggttcattagttgtgacaaatgcaccactccaccactctggtggggatgctgccagtgggggaggctatgtatgtgtggggacagagcgtatgtgggaagctctgtactttctgctcaaatttgctgtgaacctaaaactgctctaaacattaaagcctattcaaaaaaatga

SEQ ID NO: 110513 - DNA, 530 bp, Homo sapiens
gccgaagcaaaacggagatttgtctgtgtgtaaagttctcattcttcctaccacaccacactgccttaaaatgtctctgggtctcacaccacagcagggcagcagccgctactcaaagaaaagccccaagtctttatacagaacaaagggcgggtcttatcattcccctctttctggtgctggcttccaggactcaactgtaactggaaactgtgttgctctaaccctcctccagccctgcagcctccccttgcagtcatcattcgtgttctgtgtataccaaatgattctgttatctaaagaagctttttgctgggaaaacgatgtcctgaaaatggtatttcaatgaggcatatgttcaggatttcagaaacaagaagttagttctatttagcaggttaaaaaatgctgcattagaattaaagcaagttattttcttatttgtataatgacacaaagcattgggagtcagactgcttgtatattatcaaacattttaagagaattctaataaagctgtattttacatc

SEQ ID NO: 110514 - DNA, 632 bp, Homo sapiens
agatcgccaagggcagagaccctgtatgtaacatgctgcaacttcagttgcctacacttcagcgtctggatgtacataggtagtacttccagtagctgatggatgatggatgaatacatacatgcatctaagggaagtcacttgacattcttgagctctcatttgttaaggtgggaaatcgtgtcaaataagttcttgtttccaactttaggggaagagatgatatgaatccagggtagtgtttggcatatagtagatgctcaagacaatgttacttccattctggggacagcctgcccactgtccacagcaggggagtctgggtggctccggagcacagatgctgctcagcttgcaggactagaatgggaaggttgtagtgatttatcaaatatcgtttactttagaagtaacataattttaaaataaacatttaaatttattaaacatatatgtagttcttattgctgctgtaagagatactataaactcagtggcttaaaacaacacaaatttgttatcttgcagttttggaggccagaggcctcagtaggtgaaacgccttcactcccagcactcttggggagagtctgtctccctgccctcctggcttctgcaggctgcctgcatct

SEQ ID NO: 110515 - DNA, 224 bp, Homo sapiens
aaagaataccagcttttttccagatggctgcatgcctgatgttcctttatgtttagctgtcattcaaatatgaatgcccagtgattataagtgtctctttctcttttctggactgaaatgaaaccttttatgcattgtgtgttaaaacagattaactgtttggctcatcagtagggaaattagaacaatagctgccaattcaatggtatagtagaagaatgtcc

SEQ ID NO: 110516 - DNA, 217 bp, Homo sapiens
tgcagtgagccaagatcatgccgctgcacttcagcctgggcgacagagaaagactctgtctcagaaaaaaataataatttaaaaataaaaaaaatgaataataaaaaaaagatgcaatgtattattatttattgtaagatccatgaaggcaagaatgtatctatcttgttctctgctatgtccgtagtgactagcaaaaatgcctggcccagacaag

SEQ ID NO: 110517 - DNA, 444 bp, Homo sapiens
ctccttctaggtcaaaatcttcaagaactgagtcaaccctaaaaatacaaatgaaaaactagctacaaaattgtggtgctatacagtcattttggaaattcctaattcctagcccttcattttaagaaacggcaaaactggtgaaacataaaaattaagtgattgaaatacacagcaggtcctaaaactcaggtctccagttctcttttcttttttgagagggagtctcgctctgtcgcctaggctggagtgcagtggcaggatctcggctcaccgccaacctccacctcccgggttcaagcaattctctgcctcagcctcccgagtagctgggattacaggtgcccgccaccacgcccggttaatttttgtatttttagtagagacgaggtttcaccatcttggccaggctggtcttgaactcccaacctcatgatccacccg

SEQ ID NO: 110518 - DNA, 128 bp, Homo sapiens
ttttgacgcagagttttctgtcttatgaccacattacattacaaaccttgcattttcccaattctatcaacttcaacccccccttgattgttgatcccaacagcattcaccaaataaacttcctcttc

SEQ ID NO: 110519 - DNA, 332 bp, Homo sapiens
atctcttctagactatcagaacctttcaagcaaggaccatgagtttttttattcatcttaacataataataagttgtaataattataataaattataataagttataacaacttttaaaactatcacgatgcctcccacagactcaacactcaagaagtatttgttgaatagacaaatatgatatatttcaaagtatctcacagtttgcaacgcattttcttataatacctcattctattttcatgataagcccctatggtgagtatttaaataagaagaaacctgagacacagagaagctaagaaacttgtctagattcacaaatcctgca

SEQ ID NO: 110520 - DNA, 245 bp, Homo sapiens
ggcctgtgacacagtttatacagtttttgcttcttttcattgcttaagtcaagtgtgcttggttttatgtaacaatgaagaatagtactaattattcagactctaccattccttgaagactgaatatgtcaattactctgagaaattcacgtaattcaaaatgtttgcagtaagtgcaatctcatatattattagccaacatttactgggtgtcagtatggttctaaggttgtcccaaaataatt

SEQ ID NO: 110521 - DNA, 343 bp, Homo sapiens
ctgtcttcagtgttggtcaagattagctgtcttaaagtccaaaggattggaccggctagatattttgttgtacctcagaaaaattatcttaatttcctagatattttgttgtacctcagaaaaattaccttaattttctaccctctccaaattttttcaccacagaatatttttttggagaaaaattatcaatattttatggaactagtgggctatagaaaacacacaggatgtactgataaaacacagtagtaaaacacattggtttatgaatgatctctgtattaaaccatctgtacatattggtttaataaaagttcattgctagatctatctgctgaat

SEQ ID NO: 110522 - DNA, 402 bp, Homo sapiens
attttttctgtagagatggggcctcactatgttgcttaagctggtgttgaactcctggcttcaagcaatcctcctgcctcagcctcctaaagtgctaggattacaggcatgagccattgtacccacccccatggaggtaatttttaaccaagattgtttgtcttctgcccctcacatcccaccattcagagcttagttacatgccacagaaactaattatggctaatttacacaggaaaggatttatttacagaaacttgggggtgaagaactaggataggaagacaagtaggaacaagtgaagcatcagccaagaccacagccaagatcaaaccaccaaggccatccataaagggcaccattgtagccagtgagccctttatggcacagagagccctattc

SEQ ID NO: 110523 - DNA, 290 bp, Homo sapiens
aggaagtctatcatggaaagacataccaccatgtgcttggacaagataacgaccgggcgcagtggctcatgcctgtaatcctatcactttgggaggctgagacaggcggatcacgaggtcaagaggtcgagaccatcctggccagcatggtgaaaccccatctctaccaaaaatacaaaaattaactgggcatggtggtgggcgcctgtagtcccagatactcaggaggctgtggcaggagaattgcttgaacctgggaggcagaggttgcagtgagctgagatcgcacc

SEQ ID NO: 110524 - DNA, 439 bp, Homo sapiens
aggtcatggtgaggagagaaaggaaagtagtgagctgtgaagtgtatctggtggcatgagcttattctagtgggagagtgccaagcatccctgaatatttcagagttaatgtactggggcaggaaatcaatatgtgaatacatttttattttgctgcagaatgattcaatctgtgttcttgccagcaaagggatgggttgggaggggcaccagggaagaaagcttatggccatgctcaggcttccccaggcacccaatgggaggctcccagagctggaaaacttgttctagccttctcatttaccctctagagggcaaagatactgcttgaaaagccttaaaagttaaactcaagtttgtttcaagcctgccaagacctctccttaaaccaaaggcagtattttttcctagaatgcctttaaggtgtcctcaatggatg

SEQ ID NO: 110525 - DNA, 189 bp, Homo sapiens
cgtccccgcgcacggccggggtggagcacgggagtggcgagcttcaggtccaccggctgccaccgaaagatgggacctgaagacaggagaggtcgctcagccaagagccccggggaggcggtggtgtctcggcggggtcagcaacggtctgtggggggtcccctgcagcgcgcagccggtttccgcctc

SEQ ID NO: 110526 - DNA, 478 bp, Homo sapiens
  misc_feature (179)..(179): n is a, c, g, or t
cagaacattatggtatgttaagaagcaaggaaaaattgaatagtaatattgggccaggtggcaaccaggaagtactgagaatcccataagcaaaagttcctggatattttctgccatttataagattcagatccagcgactccagatcaggttgagacatggctgctcagagcctcccnttatgtactgggagcagttccgagagaaggcagaacaatcatgggatggacagccattctaaggggtactttccagctttcaccccttcatgctacacatcaaagagcagcagactcagctctaccaggcataactgcaaaccctttctcactaataggagacagtacaagctcagacagtaatgagatctggagtgatgccataggcaccctgttctttgagtcgttgctgagaagtttttttttcttgtcctattacaacattttataaccttatgaatcaatggatacttttattg

SEQ ID NO: 110527 - DNA, 720 bp, Homo sapiens
aaaagagtttgtatcttgagatacagacattcctgggagtttaaaaaaaaactgaaattattcagtttaaaaaatatctgttgtgggtagggccttgtgctgagtgcttggtgataagacttagtgactggagcctcagaggtccccgtgtgagtgagagacaaatacatagaagacgctaatagaatactcagtgtgtattgattccttattgtgtgccaagcaccatgctaggtgcttaatataatcatcttactcaattttatttcatcctcagaatatctctatgtactttgttctataattcctgttttatccataagaaaacttagatatagagaggtcacattctctactctgtcttttacacataaggaaacttagagggatcaagtcacgcttccaggtatacagagttcgtgagtggtgggctttggattcagccccaggtccccttgatgccagaaatctcaaccactgtgcaaaaatcaggtgaatgttggatggctgtagagaccacattctcactctgaccgaggtgctcaggagagtctttccagaagacagcatttgagctgaggctttggaaaatgcaggagagcagtgaaaggggcccttctcatcctgggttgcttactttaataacttggcttttgtaaattaagaaggaggaagaaaagagagaattgcctttccaaattcccttttccttcattattt

SEQ ID NO: 110528 - DNA, 717 bp, Homo sapiens
gttgtgagagttctatatacgtgtatcccggatgcaggacttctcagctgagcgatttgcaccacctgggatgttttcagcgtgtaatgccagtgcatttccttcccgtctcttctctctggctagattcacagccaccgctagataaaaataaagctgtgaggatactgtagatacagttgaatatcctgcttctgcacttcatttttccgtttttttagaaagcatgatttaaagtacatcactgggctgttgtaattcattctagccatttccgcattgctgagcgtttaggtcctttccagttttcagttgcatagataatgcagtgatgttcgtccttgtccataaatcttcatgctcatcacacgggtagccttcttagaaaaaattcttagaaggtgattttaccaggtcaaagggaaggaacattggaagtctcagatactggctgtgcccacattggacagtgagtgttgagggctagggttctgtcgtcatagtcaccactgtagctttagatttttttctgagagagggtctctctctttttttctgcttttgaggtttaaaccatggccagagacagggtctcgatctgtccctcaagctggagtgcagtggcgtgatcttggctgactgcaaactccacctcctaggctcaagccattctcctgccttagcctcccgagtagctgggattataggcgcgcacca

SEQ ID NO: 110529 - DNA, 387 bp, Homo sapiens
ccttgcactctccatgcccttactcactgtaaaacctggcatagggctagtccagcagcctcctctcacactcccaccccaggcttctggcacagccatcagaccccctctccagtgaccatcacaacaggatcaagctttctaacctcagctgagcctcggttgctgcttgatagacttttggtgtcctgctccattttctctcccagtacccataacagcaattccaaaccttaagcatggcaatgtcctctccactctccacagagaaacctacctgcttctgaggagagacctccagagagaagcatcagcttccccagccccacacctacaagcatgcttgcacccagcccatctttgttctcctcactccaggtagacggg

SEQ ID NO: 110530 - DNA, 476 bp, Homo sapiens
ctggtggaaataggaattagtgtgataaccacttaggaaaattctttggcagttatttcagttatctatcgctgtatccaggccactctcaaagttggggaaataattggcatcctgttttcagataatatttagagcagggaaaatgaaactattatttgaatggagaaatttaggaaaattttcacattaacaaaagaaaaaagttggaaagaatggcagtttgactagcccaacacaaatagagggaagaagaggaaacattatacaataataaaagtaaggggaaggaataagatcattgtatcaattattaggctaaatgtgagcagactgaattttgccattaaaaagggcatgtcaggttgcacgggtggctcacacccgtaatcccagctctatgggaggccaaggcaggagggtatcttgagcccaggagttcgagactagcctgggcaacatggggaaaccccatc

SEQ ID NO: 110531 - DNA, 394 bp, Homo sapiens
  misc_feature (361)..(361): n is a, c, g, or t
  misc_feature (377)..(377): n is a, c, g, or t
  misc_feature (379)..(380): n is a, c, g, or t
  misc_feature (382)..(382): n is a, c, g, or t
  misc_feature (385)..(385): n is a, c, g, or t
  misc_feature (389)..(389): n is a, c, g, or t
  misc_feature (392)..(392): n is a, c, g, or t
  misc_feature (394)..(394): n is a, c, g, or t
ttttccattataaaaatgatatttgtccatcatggaaatttggaaaatacagagagaaaagactgtggcaatggcttgtattttcctcccccaggtgaacaaatattactttaagggttttccccagtgtctccccttcacttgagggtcctttgtggaaatgtgtgtcttgcgttggctactttgtgtgttaatgagagacccttactggacgcattaaaatttgagctgggcacagtggctcgtgcctataatcccagtgctttgacaggccgaggtaggaggattgcttgaggcctggagtttgagaccagtaaacaacaacaacaacacttgagggtaggagatagttttttttccntttttttttttttttncnncnttngganaancn

SEQ ID NO: 110532 - DNA, 259 bp, Homo sapiens
tccttcctgagtatatgattagttttgaaaaacatacatttaggcctttgtttcagtaagataatatgtgcaaaatgttttggaagactatttgattcctaccaaatttttgtagcctttctgttataattgatcattttctgcttggtacattattgattgtggcatcatttttgtctatgttatcaacgcctatttatgttgtttctactaataggccagtacttcgctacttataaggaggcacacaaaaaaggca

SEQ ID NO: 110533 - DNA, 421 bp, Homo sapiens
cagaaaaacagaaaccacactcctatttcaaacatagggaaatataatacaggaaattggttatataggtgttggaaggcaaaaagagaaaaaaaagggagtggggggacacagttattaaaaagatagtaactgcaagaagcaactaccacactaagagctgggaaataaaagggatgaggttatcattactcgggagctacagggatccctaagctggcacccagacttctaaggaggggacagtgttcaactgctgcttatattgaagtccatattactaaaagatgttcatatacataagaaatctaaatatttaaattgtgtttgaacatgtcttccctctcaaatgtagttctgaaaataaagcataaagctaatttgacttttatcaaattaatgatctatgctgcttctgtat

SEQ ID NO: 110534 - DNA, 365 bp, Homo sapiens
cgtgccctccagcacatattagtacaaagtaagcaggaaatgcagaagttattcagaagcttaaactaagacaactgatgaaggtggctgcactaaacaacagctcaggagtgtgaggcaaccaagccaggagttaaggcaggcaggaaccacaggtgtggcacattcagctgatttagggatgaagaactaaattgaaagctggattaagaacccttgcagagaaagacttttgtgaagctctgcccaaggcagcactaatgacaaagcaccaaagggtcacatgatgctcttagtgaacatgtgttattgcatgtcacacccctgtcctggaacataagttctcggtagctggagacagaatg

SEQ ID NO: 110535 - DNA, 767 bp, Homo sapiens
acaggtgggcatgaaaacacggaaaatcacagacgcacaggtgggcatgaaaacacagaaattcacagacacacgcaggtgggcatgaaaacacggaaattcacagacacacaggtgggcgtgaaaacacggaaattcacagacgcacaggtgggcgtgaaaacacggaaattcacagacgcacaggtgggcgtgaaaacacggaaattcacagacgcacaggtgggcgtgaaaacatggaaattcacagacacgcaggtgggcgtgaaaacacggaaattcacagacgcgcaggtgggcgtgaaaacacggaaattaacagagacgcacaggttggcatgaccaggctcgcatgggcaagatgtggtgtttcttccagattaccgggcagcagagcggggaccctgtagggagtccccactgggagtgtcttgggccctaaaaattttgtcagaatgtttattttctttatgacctaaggaagttttaaaaaaatctgtcattttccaaacccttagcaatataaggtatctggtaagaggcagacagtttagaagcatccgttttattctagaattcaacatattgcatggtaaagtattttcaagcctacttattttggttgttttagggatgtttgttgatacaaacataataaagtgtttcttgttccgtgagcgctcactcagcctcgctgcagtgcggatccctcggttatgtgcacggatctgactccagtgtgaaatcgtagcattttctttgattgt

SEQ ID NO: 110536 - DNA, 386 bp, Homo sapiens
tctagaggatcccgagaagacgacagaagggaggaagagaaggaaggaagtatctcaagcagaaggggggaagacgacagaaggagagaagacgacagaaggggaagaccctgctgctcccatctcagtaaatgcacatcatccactcactcacttgtctgagtcagaagtctggacagcagcctcgattccttatttacagtcacagcagtggggaaatagagcagtggacagatgaatggattccaaagatgtcctaggtcctagtggtctattcttttccagtccaactcattcattatcaaagtcctgttgatcacagggcctcactctgtcacccaggctaggagtacagtggtgcgatcatagctcactgcagcctcaac

SEQ ID NO: 110537 - DNA, 489 bp, Homo sapiens
tgctgttgttctggggaccacacctagaaccattagttgtaaagcattacgtgttgataggtaaagtttttaatgattcatacacacatgtatttatacatatacacacacacacgtatatatacgcacatactttttaccataaaaaagctaatgttttcaaatgtaaattgtgattgagggtttagagaatgttacgattagagaatggtccccacgtgcctgtgatcctaattggtacttttagggataatcatgggaaaatctcatggacctatggaactggctaattactcctagaggtaatacttgcagtttattagggtcaaatagtaattgtattgcttctttttatggttggaagtcttacagaaggtggggaaaagatcacaatttgttaggttagttatgaaatgttcagtaggccctcaaagtatgagcagtttaacttgagaatgttccaacactcgggtgactaattctattatg

SEQ ID NO: 110538 - DNA, 547 bp, Homo sapiens
  misc_feature (146)..(146): n is a, c, g, or t
  misc_feature (467)..(467): n is a, c, g, or t
gagtgttcttggagtccggggaagttggcctttaaaaatcaaactgccatggacactgctttacccaaaatttggttcacattcttcactggattaactattggggcaaacaacgtataaccatgtaaaaccagtacgcttgtatnggcatttcatggctagagttctaagtcacaagcacctcttcggcaaagcccacctccctctctcgcttgattccccggccatccttatcaaagaccttccaggtgaacaggcagccatcctcagcagcagtcagcaggaactgatcatcaaagaatcttgctctgttgcccaggctggagtgtagtggtgcgatctcggctcactgaaacctccgcctcccaggttcaagcgattctcctgcctcagtctcccgagtagctgggactacagaaacttgcaaaaatagcacagagagagtggacttctggaatggcacggcnaacaaaattttccccccttaaccggggcaagcacccaaaggcttgaaattcagccaatttcccaaaaagggttgggatgg

SEQ ID NO: 110539 - DNA, 510 bp, Homo sapiens
ctcaaacgaatcacccaccttgacctcctaaagtgctgggattacaggcgtgagccattcgtgctgggcccaaattttaaaatacagtataacaaatatttgtatagcatttatattattaggtattataagtaatctagagattatttaaagtatacaggatgacgtgaatttaagttacatggaaatactacacccttttatgtcagggacttgaacatctaagggtttttagttagggggagccggtcctagaaccaatcccctgtaaatgccaagggatgactatatatatatatatacatacatttctgtattactattattatttttgccctcattttaccctatttcacaatttctcttcggttgttatatgtttggaatttattctacaaaattgtgaggtttttttcttttgcagtattccttatgatatgttttagtcaaactgcagaagctaaatatatagttttccagtgaaataagtagtcttttgactctatggtc

SEQ ID NO: 110540 - DNA, 362 bp, Homo sapiens
aggggacaagatccaggctgaggtagcagtccaggactcagatcagccagtccctggccctgtatgctcccctccatggccagtcctgcccttttgttcttgtagctataaatcacactttagtattttttccatctcttctacatttacaaatcaaaatcatctcaagccataacaacttgcctctttccttacctttcgcaaagcaatgaacttaatgcactaggcattagcaaagggaatcgttcactagctgcttccatcactgggcctgccaatgtcccagcacttcacacctggaacacaagtgttattgccacaaagcacacccaggtgtgctatcacacacttgtgtggagatg

SEQ ID NO: 110541 - DNA, 317 bp, Homo sapiens
tgagtgggggagatgatggtgaggggttagcagtgtctgcaatttcagaggggttgatcccttcattctagatagtcaccttatcacccttgtttgctgtcgttactgtatatcatgtctgatttcagaaattttatttcacccaaagccttcagaccagcagctcttgggttgagaggaatggttcccagccctttttgcacatcagtgttcccagggttgctttgaaagagtacttgggccacttttgagagtgtgcattcctgaatctcctttccagagactgtgatttgaatggcctgagttgctccaagctg

SEQ ID NO: 110542 - DNA, 303 bp, Homo sapiens
atggtgtgtgcctgtagtctcagctactcaggaggcttgaacttggggcttggagaccagcctagaagtaaatctaggcatcttcccccttcccatagcctattaccctgcatgtgaccctgccaacagaagacaagacaaatggacaagaatcctctaactttaaacatcagtatgagggtgaattaagcacctggaacagaagtagataccagatatacataacacagccctcatttccatcttcacacctccccaacctgttttttttcataaaaccaccagtctacaactcagcaacag

SEQ ID NO: 110543 - DNA, 714 bp, Homo sapiens
ataacaggcatgcaccaccatgcccggttaattttgtgtttttagtagagatggggtttctccatgttggtaaggctggtctcaaactcccaactcaggtgatccgcccacctcagcttcccaaagtgctgggattacaggcgtgagccaccgcgcctggccgacagttgtatttctcactcctgcttgggggtagagaggaatgctgtctccctttgggtgtaaggtcttctccagggtgattctaaaagccctgccccccacttctaccccaccccactgcatcctgttattgcagtcactactacatgctttcagcccttgctgatgggggtgctgcttggcaaactgccagcaagccagtctatattaggaagtgttcaagttttccctagaatgaaaacagagagataagggctagtgtcaggcttggaagaatgatctcattaaagtattaaaacctgcatcctacatagctgagaaaataatatcctttccaaagcacatggctttcttttccttggaaattcagtgaatccccaaaacttgtggtttttaatgcaggagactcagctccctttggcatctcagcagacacagaaagatgtaaaactgtcaccccacagacaaattccttttgatgccttctcttggccaccacacgtggaccaggagataaggggagctacgtgctcatccgtgtagccactgcca

SEQ ID NO: 110544 - DNA, 248 bp, Homo sapiens
cagacacccttacacacatgcatgcacgttccgtgatctgattatgattttcaagatctctctgtagtcgtaagctagatgtgaatacctaggtgcttattatagcatcatctatactttgttatatgcctgacacattccacagttttcaaaagctattattatggaagtctaagcaagaaataatagtggcagcgagatgcataaaagaacaacctggggaggtaaagtgaataggacttggtatt

SEQ ID NO: 110545 - DNA, 408 bp, Homo sapiens
ggtttcctacaattcaattcaattatgacactgattacccagagtaagcattcgaatccacaggtttaagggctcagtcccaaagactgctcccactttaggcactagtcataaatatcaggtctccaggctatccatatttttgtccaacatggctacaaatttggggtttcccaccacctcccttcaggtttgatgatttgctagaatgaatcacagagctcaagaaaacactgcgtactgttacaggttgagcatcctaaattggaaaatctggaattcaaaatgccccaaaatccaactttttgagtgtccacataatgctcaaaggataatgcttattgggaagtattttgcattttctgacatagaatgctcagttggtaagtataatgcaaataatctaaa

SEQ ID NO: 110546 - DNA, 608 bp, Homo sapiens
tgagacagagtctcattctgttgcccaggctggagtgcagtggtgcaatcatggctcactgaaacctcgacctcctgagctcaagctattctcccacttcagcctcccaagtagctaagagtataggcacgtgccacaatacctggctagtttaacaattttttgaagagacagttcttactccattgcccagactggtctcaaactcctgggctcaagcaatcctcccatctctgcctcccaaaatgctggaattacaggtgtgagcccctgcacctgatacttatcataccattttctacccagtcacctaaaccagagacctggtagtcactcctgactctgccctctctcaggctcatccttatccccattctatcagtccatatcttatcaattctaccttctaaacaactgaatgcttctctgtatttcccagaaaaaatatctctgcctaggcccttaacatttctcacccggaatactgcaatcaaaggccagtgacctgatcatgtcctgaccctcctcccagtccagcttccatagctgccaaagttatttctctaatatgcaattctgagcacagcaactttacttcaaatcttcat

SEQ ID NO: 110547 - DNA, 302 bp, Homo sapiens
cgtccctcaagttccctaagcttgccaggggctgaaacccagatcaaagctttttggaggaatcagccttctgaggactttcctctgcatctgctcagtgggtggcatctggaaatgacaggcacttctcgcctctgtccactgctctctgtgggcatcccagtctacctggacagtcctcctgcccaagcagggcaagcctctgacggattcccctaatgggcagcatggggctgggcagggcaggccatccagagtgagaccaagcctgcagcaggagagaaggccggtcgctggttggt

SEQ ID NO: 110548 - DNA, 462 bp, Homo sapiens
gtgccatgtacttacttcctgccgggctttgactgaaacaccaggcttgttccaactggatggctttgcacgtgatggctcccttcttgaacactcttccctcagatctcagcacggtcggctccttctgagggtgtccagcctcagcacacatgtcagcgcctccgaggggcctcgtctgtttaccctctcatcgtccatcctagtaccatgcgtcattttctttatatcactttgaccctctgaaatgatcaatacttggttggctgactgggcttgtccagggcatccacaccctcctaagtagatgaggagttggcaaatatattctgttgaggggcagagggtaaatatttttggctttgcaggccatatggtctctgtcacaactactgaagtctgctgttgtagcaagaaagctgccagagacattacataaatgagtggacatgcctgtgttcc

SEQ ID NO: 110549 - DNA, 333 bp, Homo sapiens
aactgtacaggccaccaggaggcaggaggtgggccctcagagcttggctggagaaagttcggggcctacaaaggcggttgggagctgggcaggagttgagccaaaagagcttgcttacttgctgggaggcagggccgggagagcccgacttcaggacaacttgggcctgcggcggtcgccgggaggcccaaccttggcgtggaggagcccaccgaccggagaccatttggggcctggagatgccatcggagggcaggagctcatcctggagaggccaccgtgaggcctgacctgggcctggggagcttggcttgaggaagctgtgggccgacc

SEQ ID NO: 110550 - DNA, 236 bp, Homo sapiens
gacctgagtcgggccagagtccggcctggagatgcggccgggagagcccgacttcaggacaacttgggcctgcggcggtcgccgggaggcccaaccttggcgtggaggagcccaccgaccggagaccatttggggcctggagatgccatcggagggcaggagctcatcctggagaggccaccgtgaggcctgacctgggcctggggagcttggcttgaggaagctgtgggccgacc

SEQ ID NO: 110551 - DNA, 192 bp, Homo sapiens
taccaagctcacattttaggcacttacttactccatttgggacatttctttttaaaatcatttttatctattcacaagaatgattagtcagaaaacatagtttggaaacctattaattatctcccctaactcaagaatggtggggagcagaaataaataaaacaaggttttccattgtaaaagactaggggg

SEQ ID NO: 110552 - DNA, 637 bp, Homo sapiens
tgtcttgagataaatggacaacaaatatgagcaattaacaaaaatgaagaatgataagcctgtagaaaaaatgttcagcttcactgataataaagaaatgctaatctaagtaatgaaatatcatttccatgatgaaaatttaaaagatgaacaggtagtaagaattcctgatgctagcaaggatatggtaaagaactcttataccccaaatatgaatttgtatggccatcctttgacaggttgtccacaaaaacacccagaagtagaaaacttctaggccctgcagcaaaatatagataagaattcattgccctagtgcaacaaagcagtatttcaaagccaagaacctagactttaggcctagatgacacttgctgaatagccaagcaattgccttatatgttgagggaggagacccataaagggtaagaccctacaattctagtcttctctgacctggctgagatgttacttcacttttagaccaagaccactaaagttcagtgtgtctccaagagatacaaggaaagcaagcaggagcaaactgagctgcatcactttctggtatacattctgcaaactgcttcagggctaagccaacaccatgttcccattttggcctgtctttgaatcccaa

SEQ ID NO: 110553 - DNA, 312 bp, Homo sapiens
caactggttttaatttttcacttaccaagtaagtgatttaaagtccaacaagatcaagtatcagtaagtatactagggaaatggcaactttcaaacacttggtgtaaggataaactgatataacctctttggagagcaatcagacagcatttattaaaatatgtgtttcctcccatccagtgattctgtccaaggtaagtactccagagaagttctcccacctcatggcagagagacatgcaccagagtgttgatgaaacgctgaaaacaccaaaatggccccagtgcagtggctcacgcctataatcccag

SEQ ID NO: 110554 - DNA, 258 bp, Homo sapiens
ctcccaacaaaataacccagccagaacaccccacattattgagtaccacaggtgcagaacttccaattgtctttttagtgtcacagtcttaaatatgggcaactaaggcacaacagatacttgagggacaaatctaatattaaaaagcagagaaaaaatcaacagattcaatgaggaagaaacaaataatgaggggagatgaaaatttcaagaaattattaatattcagagagaagagaagatactgtatccatgaaa

SEQ ID NO: 110555 - DNA, 322 bp, Homo sapiens
tctgttgttatatgcatccaaacagaggccggaaaatcatttgtctgagatgaggtagtgatttctgcaaatagggatattacactgatgacttctacgtttctggatgtaacatctcatgattctattcccagttacgtggacttgggaccatccttctcctctctagacctcatttttattccatggagttatatgatcattaaggtgccttgtaggccttgcattaaaaggttcctagttttaaagggcagagatggaggccaaggacactgagcactggctaggatttctctcactgagggtcctgtttagccaaggg

SEQ ID NO: 110556 - DNA, 236 bp, Homo sapiens
gggattatagatgagccacggcaccaggccggttctttctgttttgtttttgtgataagtagcagatccagtcctgcactttcctgtaggggagagtctctttctttcaaatggttgatcttcagaaataactggccacacccagatggaaatagcttgatttgttttcttttctttttttttgagatggagtttcgttcttgttgcccagactggagtgtggtggcgtggtctca

SEQ ID NO: 110557 - DNA, 182 bp, Homo sapiens
cactgaagcctctgttcctcagattgtgttccactgtgttttggcagagatttctttggaagcctggagctaagcaaacaaaacaaaacaaaacagagcacttctcctagtttttgcatttaactctgtgactccaggtttgcattgagccaggtgatcagtctgaggtgaaagccgagaaa

SEQ ID NO: 110558 - DNA, 230 bp, Homo sapiens
tctaccccagggcgtcggactcctgaacccaactctctttactgtgaggttgtgctgtgttgagcagcatggagggctgaaggcagggaaatgttagcctggatgtatttctctctggatatatttcctataaattacatcctccccctcttgtatatgagcatctggtaagaagacactgaataaattagcttttttttttttaagccttataaattccaagtgttagt

SEQ ID NO: 110559 - DNA, 284 bp, Homo sapiens
cccttcctctcacccaggcccaacccatggagcgaagagtgaatgcacctggctcagctttcagactggaggctgctcgagagcaaggcctgaggccgaggtttcttgggggcccagcagcaccagtgtgagggggcgccgaggagaagaccagcaatttctgcctgtgggccattgaggcatcaggcctccaggtcaggggggataccaccccacccaccaataataaagcccctgtgatttaagcccaataaaaaggcccggggaaggaattcaggcttggc

SEQ ID NO: 110560 - DNA, 258 bp, Homo sapiens
gacacagccacgccaacacccaggcaacattcaaggatgtgcatgcagtcacacaaacacctaaaaaaacagccacaccaacacccaggcaacacccaagggtgcacatactgtcacacgaatacctccagacacagccacgccaacaccccaggcaacactcaaggatgtgcacactgtcacacgaatacccagaaactcccacagttacatggatgataaccaaagactgtttatttttgtttttgtttggagaca

SEQ ID NO: 110561 - DNA, 406 bp, Homo sapiens
aagctaccaacactggctcaagaagagatagatagcatgaatgctcctatatctgttaaagaaattggatttgtaattttaaacttttgacaaagaaaactctgggcccgtatggtttcattgacaaattctaccatttaaggaataaataataccaaattctacaatttctttcagaaaataaggaacacttctcaacttattctatgaggctcacattatcatgataccaaagaaaaaaacttagaccaatatcgtaagtatagttgtcaaaattttcaacaaaatactagcaaatccagcaatatataaaaaggataatgcattgttacgtagtacagtttattccaagaatgaaaagctgtttgaatatttgaaaaagtcaatgtaattcactaataatgac

SEQ ID NO: 110562 - DNA, 446 bp, Homo sapiens
gggggcgattgatacggcttccacagtgctcccacccacagagcccagggcagaggcccgaggtgcgccaggcttattttacagctttaattcccatgagcaggattggagaaagggttagtaaaggagaaaaggactcagatgtgtcgggtttcagggaaggaactagtgagatcggggtgacaaggggttcatttgtccatttggtaagtgtttattgaaagtccactatattatgtgtaaggtccttttgacccagaaagtctgaaatttgggtagcagtcattaatttgtattagataccacatatgttatagaagtggtagaaataatgttaataatgtcatacttccgttcccgatggtcacatgctaagtgcgtcacatctattccattgaatcctccccacaactgggatggggtggtattgtcctcgctgtgcaggg

SEQ ID NO: 110563 - DNA, 1094 bp, Homo sapiens
ttatggatattttaactggaattgcagttctgatttttatgttgtgtttcattaaggcagtttttgaagttgatctcaatgaagaccagagagaacaaagttcatgttcacttgtttttctgccagctctggaagttatggatacagtttccttatgcaaatagaataaactttcttcctgttatcaaaaagtcttggggctaaaatatttcatacttggtccttgcctcaaactatttgttatgaatatagaacagtgttccatgtatggaaaaatagctgcttcttaaatttccaaattcactaattcactgtatagaaaaatagctgcttcttaaatttccaaattcagtaattcactgttccaaatccaaggcttgtcttttcagtaatggcttttccttcttttttttttttctttctctctaaaacagatagtctgtactactaaaagttaaatgcttaacatggtgcagttctcaaagttataatgtatctggatactgaataatttgaatattactaatttgtcattttttgcatgtaagcagatagctaggatacgttctcataatgatttgtcatttaaaaatatacattttttattgagtatgaatcagattgtctgaaataggtactagtacaaggctatgaagagcatttctagtttcttattatatatattaccaattgcttcctaaaagtggtgacacttttactgatacacatagtaatcattttactatgatatgcatagtagttacatcttttggcttctagttggattactttttttttccctgcaaatttgggttttgattacttgagcatagtgatcaaaaaagatcactgggcatccatataccgtttcattaatgattaatggactacaatattgacttgtctcatgttatcaaagttataatctgctttatatagcaagttcactttgctttaaacagcttttaatttatattattgttcttgaaaaggtgagtaaatatgcaaattgaataattttaaaatccaaggcaggttttgtaagaaacttagaggcagagagaatttttgtaaagagaaaaattatttatttt

SEQ ID NO: 110564 - DNA, 154 bp, Homo sapiens
tgcagtgagccaagatcctgcctttgcactccagcctgggtgacagagcaagactccaactcaaaaaaaaaagatttcttcttgtattaggggtgttcacagaataaaaaagaaagtttattaattaaacaaactgaagtgaattacacatcta

SEQ ID NO: 110565 - DNA, 325 bp, Homo sapiens
tgcagcttctacccaagtgtggaaaatgaacccagcagggacctgcagcttctacccaagtgtgaacattgaacccagcagggacctgcagcttctactcaagtgtggacactgtaccaagcagggacctgcagcttctacccaagtgtggacactgaacccagcagcaacctacaagtgtggacactcaaactgctttatgacctaagtttactttttctttcttttttttttttttttgagactgagtctggctctgttgcccaggctggagtgcattggtgcgatctccgctcactgcaagctccgcctcctgggttcacgc

SEQ ID NO: 110566 - DNA, 301 bp, Homo sapiens
cctattccaccagctcattccagcctctcatatctaatatttgcctccaaattactcaaaatggcaatcaggaaagttatgaatgcttcctgatttaacgaaaacctactcaataacttgatattaataaatttccttcccattatcatcagcttttttccagtatacctactttggcaccaattatttttcattctctactcaccgtcagaagttaaagtatctacagctaggagtaatataaaaacaacagtgaaagtttctttttttttttttttttttttctgagacagagtttcac

SEQ ID NO: 110567 - DNA, 424 bp, Homo sapiens
acaacaacttcctgtggaatgccaaatataatgtgaaataccaaatataaagcattgcgtctttacatacttcagcctttaccacatacaaacaattctaattttacacagagtcctttctgagaaattttacttcaaaccaaacttagaatactcagtgagtgagggatccagagagccactaacaatcccttgtggttgactgaaatatattagttatcccttacttaacattccttggtgatgaactcatgatcagaaaaaccagtttgtaggtagacggtatagatacagatataaataggcatatacatatgctataataactctaatgcacttaaaataaaacctgtagttttttaaaatatttatagggtagacctagtaacaagaaatcaaccaactcactcatccattatctaag

SEQ ID NO: 110568 - DNA, 930 bp, Homo sapiens
agtagaattttaccttaattcacttaaagaaaattaaccattttttggtccaacttcagatattttcttaatccagaagctgtgactgttcccagaagaaacctcttatatcacatttaaaacataaaaaataattacactttcactcattctaatgggtaaattgttgaattgtaataaacaactgtatatttacaaacaggtttataaggtatttgtctatcaaattaataataaaataaaacttacggggtctgcaaggaaaactatgaaggccacttaaagtggttcaggtatccctttgtcttgtagggcatagctgttggtttagccaggcttttacagtatttaattttaaagtatcctataactatcaacttcccaggttgaagacgatgtgttgagtttcctactgattgattgattcctgtcctccccagtgtttccgtcactggttcactaaaacagtatttatatagctccactggctctaaagctcttagtccttctaatattttggattttacaagtaaaaatggaaaaaaaatagaaaagagacaatcaaatgcctggagcttaaaacaaagtatgtgcaacctaccatctcacttgaaatttaataaaataataagtaattatgtaaatataacatagagttatagatttatattttgttcataacacatagtgtaatataagttgtatattttcatgtttttggttttatgttatcattcatgccacaataaaaataaaacaggagtttatgtgctcttaaaaaaaagatgtgggttgccaccaacctgtttttcgtttttgttttttgtttattttattttatttttttgcattctcctttttcagtattactgccatgcaaggcaccaataaaaacagcaaatgtgttcttcacttattatactgtgtttc

SEQ ID NO: 110569 - DNA, 383 bp, Homo sapiens
agtgatttttatatttaaaatatattaattaatggtcttatggttgtatagaagaatgtccctctaattaggaagcacgtgctaaaatatttaggggtcaagtgtcttcatgtctgtgctttcaaatggttctagataaaatgaacatgtcagaatgctaataattgatgaatataattatggatgtcctggtgattattatacgttttttcaacgttactgtatgtttgaattttttaataataaatttggggtctgggcacagtggcggtaattccagcacttccggagaccaaggtgggaggatcacttgagtccaggagttgagcctggggaatatagtgagaccctgtctctaaaacaaaacaaaacaaaacaaaacc

SEQ ID NO: 110570 - DNA, 1608 bp, Homo sapiens
ggcagccgcggcggcagcaggagaaggcggcggcggcggctagggatcagacatggcggcggatctgaacctggagtggatctccctgccccggtcctggacttacgggatcaccaggggcggccgagtcttcttcatcaacgaggaggccaagagcaccacctggctgcaccccgtcaccggcgaggcggtggtcaccggacaccggcggcagagcacagatttgcctactggctgggaagaagcatatacttttgaaggtgcaagatactatataaactgaatagatttccttttcattcttcctgggaatagaagatgtaatggaagttccagtatctgtatgcaggcctatgactagcttcacttcttggtgactaatactagttgacaaaacagcatattctaaactgattgtcttcgttatccagtagctttcctattctccataacaaatgttccaaatctttgattactcacctcagaatgcttgtctcactcctcttttcctcattcctagtagatcataccttggagaagaaagtagaaactatcaggcctgaacttcattagctttttcttcctcttcaatccaaatctgtctgtatcttcattcatttttcttaaccctttccttgcttgctatttctgctttccaaaaccaaggaaggaattttgacagaggtacccaaggaattcactgggggaaaatgaatgattcaataaatgatgttatgataattagatagatagctatatgtaagcataaaaaatttttaaaaccttaggcccttattatcatatcatgcacaaaaattaagtggattattgatttaaatgtaaaaacaaaaagtataaaacttttagaaaaaagagattatttgtgacattgggtctggcaaagatttcttagatgcgattaaagatttacaaaagaaaaaattgataaattagacttcatcaaaatttagaaattttgctttatctgtgtaggatactgaagagaatgaaaagacaagtcacagactgggagaaagtacaggcaaatcacatatttgtcaaataactcatatccagaatttttaaagaacttttacaactcaataataacaagacaaacagctcaattttttaaatgagggaaaaatttaaatatatttcacatgagaatatactcaaatagccagtgagcacatgaaaagatgttcagcatcattagacattagcaaattgcaaattaaaaccacactgaggaacccactaggaatggctataatcaaagacgatcagtatcaagtattgcggagaatgtggagaaactcaaactctgttacactagtaatagaaatataaaatgttagaaccactttggaaagagattggcagtttctggaaaaaattaattgtaaatttgaccaagcaattttactacgtaagtatgttaagaatgaaaacgtgtgcacacaaagatctgtactaaaatgttgatagcattattcataacagcctaacagtgcaaatgtctgtcaactactgtgaatggagagacaaaatgtgtttattaatacaacaaaactacccagcaataaaaagaaataattgactgat

SEQ ID NO: 110571 - DNA, 427 bp, Homo sapiens
gttgctatatgatttttttcttatagctgtcacaagatgaaggtagaggcacattatacaaatacagacctgaagaagtagatattgatgtaagtattagtatgatatatgtggtcagtactctgtcgtattctccgccaaaaacactggaaataagcatgaccaaaaaacttctttctcccaagtcctccaaagtgacatcaggtaaattcatattttatgtgtgtgctctaaattattattccctgccctctacgtcccactgctccctattgttagcagtccaacgttattaagcatcacttaaatgaaagtaaaaactgtttctgatttttagaagttacagattggctggtctcgacctcctgacctcaggtcatccacccaccttggcctcccaaagtgcagagatacgggggtgagccac

SEQ ID NO: 110572 - DNA, 368 bp, Homo sapiens
gaaacaaagacaaaatgcctgaggatgttacattcagccctcaagatgaaacacagaccgcaaatcataaaccagaagagcatcctgaagaaaatacaaagaacagtgttgacgaacaggaagaaactgttatttcttacgaatcaactcctgaggtttctagaggaaatcaaacaatggcagtgaaaagtctgtccccatctcctgagtcctcggcatcgccagttccatccactcagccgcagctcacagaaggatcacatttcatgtgtgtgtagtcttagaagaactatactgacttctgttgaaaccattcaaagctaaagacatggaccttcagcagtaccacgattcgctaagccctggag

SEQ ID NO: 110573 - DNA, 3756 bp, Homo sapiens
gcgtcggtgactctagaggaccccgtcaatttctacacagacgaggttggctttataaacaggacagtactggcatgaaattgtggaagaaacgctggtttgtgctttctgacctttgcctcttttattatagagatgagaaagaagagggtatcctgggaagcatactgttacctagttttcagatagctttgcttacctctgaagatcacattaatcgcaaatatgcttttaaggcagcccatccaaacatgcggacctattatttctgcactgatacaggaaaggaaatggagttgtggatgaaagccatgttagatgctgccctagtacagacagaacctgtgaaaagagtggacaagattacatctgaaaatgcaccaactaaagaaaccaataacattcccaaccatagagtgctaattaaaccagagatccaaaacaatcaaaaaaacaaggaaatgagcaaaattgaagaaaaaaaggcattagaagctgaaaaatatggatttcagaaggatggtcaagatagacccttaacaaaaattaatagtgtaaagctgaattctctgccatctgaatatgagagtgggtcagcatgccctgctcagactgtgcactacagaccaatcaacttgagcagttcagagaacaaaatagtcaatgttagcctggcagatcttagaggtggaaatcgccccaatacagggcccttatacacagaggccgatcgagtcatacagagaacaaattcaatgcagcagttggaacagtggattaaaatccagaaggggaggggtcatgaagaagaaaccaggggagtaatttcttaccaaacattaccaagaaatatgccaagtcacagagcccagattatggcccgctaccctgaaggttatagaacactcccaagaaacagcaagacaaggcctgaaagtatctgcagtgtaaccccttccactcatgacaagacattaggacccggagcggaggagaaacggaggtccatgagagatgacacaatgtggcagctctacgaatggcagcagcgtcagttttataacaaacagagcaccctccctcgacacagtactttgagtagtcccaaaaccatggtaaatatttctgaccagacaatgcactctattcccacatcaccttcccacgggtcaatagctgcttatcagggatactcccctcaacgaacttacagatcggaagtgtcttcaccaattcagagaggagatgtgacaatagaccgcagacacagggcccatcaccctaagcatgtctatgtgcctgacagaaggtcagtgccagctggcctgactttacagtctgttagtccccagagcctccaagggaaaacgctgtcacaagatgaaggtagaggcacattatacaaatacagacctgaagaagtagatattgatgccaagttaagccgattatgtgaacaagataaagtggtgcatgctctggaagagaaacttcagcaactccacaaggagaaatacacgcttgagcaagctttgctatcagccagccaagagatagaaatgcatgcagataacccagcagccattcagacagtggtgttacaaagggatgatttacaaaatggactgcttagtacgtgtcgagaactttctcgagccactgccgaattggaacgagcatggagagaatatgataagttagaatacgatgtaactgttaccaggaaccagatgcaagagcagctggatcaccttggtgaagttcagacggaatcagcaggaattcagcgtgcacagattcagaaagaactttggcgaattcaggatgtcatggaagggctgagtaaacataagcagcaaagaggtactacagaaataggtatgataggatcaaagcctttctcaacagttaagtacaaaaatgagggtccagattatagactctacaagagtgaaccagagttaacaacagtggcagaagttgatgaatctaatggagaagaaaaatcagaacctgtttcagagatagaaacttcagttgttaaaggttcccactttcctgttggagtagtccctccaagagcaaaatcaccaacacccgaatcttcgacaatagcttcctatgtaaccttgaggaaaactaagaagatgatggatctaagaacggaaagaccaagaagtgcagtggaacagctctgtttggctgaaagtactcgaccaaggatgactgtggaagagcaaatggaaagaataagaagacatcaacaagcgtgcctgagggagaagaaaaaagggttaaatgttatcggtgcttcagaccagtcacccttacaaagcccttcaaatttaagggataatccatttaggactactcagactcgaaggagggatgataaggaactggacactgccattagagaaaatgatgtaaagccagaccatgaaactcctgcaacagaaattgttcaactaaaagaaaccgaaccccaaaatgtggacttcagcaaagagttaaaaaaaactgaaaacatttcatatgaaatgctttttgaacctgagccaaatggagtaaattctgtggaaatgatggataaagaaagaaacaaagacaaaatgcctgaggatgttacattcagccctcaagatgaaacacagaccgcaaatcataaaccagaagagcatcctgaagaaaatacaaagaacagtgttgacgaacaggaagaaactgttatttcttacgaatcaactcctgaggtttctagaggaaatcaaacaatggcagtgaaaagtctgtccccatctcctgagtcctcggcatcgccagttccatccactcagccgcagctcacagaaggatcacatttcatgtgtgtgtagtcttagaagaactatactgacttctgttgaaaccattcaaagctaaagacatggaccttcagcagtgtaagaagatattgtacagtatattttaaatctatgaaattcatagttctgatgcttttggtcacagagcatcattttatcacttctggaaaatgtttattccaaaacagctttaatggcccatatgtacacttcgtaatctcaaggttattattctgacaccagcttgctgctatgatttcagagcacataagtaaaggtgctttttaatgtgcagtctatttccagagcttacttagttgctgatttccagatttcgatgtttcttaagtctaggtgaatttatatatatatttttttgcttttcattttctaaagttagttattatttccattgaagcttgttttctttttttcttcccattttagctactgcagtgcttttgtttcacacttgatttgtaaaaattttatatatatgtatttaaaatgtgccattttattgctaagtgaagtatgtcctgttttctgctataattctttctcggtcagattgcaatgtcagcagttactgccacactcctgtcagcttaaacacaaatgttactgcttatcttttcttaaaaaaaaaaaaaacaaagtgtaggtattttgaagtactgggcttatatttcattggaatacatgtgtacagcaataagcaggtttccaaatccggtacttagtttgtgtacaaatgtaattatgttcattgtgtatatattatacaatgagcacatgtaatgtattaaaggctacttactattgtttaaatgcaaatgttcatatctcatttctttttttatcatgttaaataaatgttgatgttcttaaa

SEQ ID NO: 110574 - DNA, 4075 bp, Homo sapiens
ggcagccgcggcggcagcaggagaaggcggcggcggcggctagggatcagacatggcggcggatctgaacctggagtggatctccctgccccggtcctggacttacgggatcaccaggggcggccgagtcttcttcatcaacgaggaggccaagagcaccacctggctgcaccccgtcaccggcgaggcggtggtcaccggacaccggcggcagagcacagatttgcctactggctgggaagaagcatatacttttgaaggtgcaagatactatataaaccataatgaaaggaaagtgacctgcaaacatccagtcacaggacaaccatcacaggacaattgtatttttgtagtgaatgaacagactgttgcaaccatgacatctgaagaaaagaaggaacggccaataagtatgataaatgaagcttctaactataacgtgacttcagattatgcagtgcatccaatgagccctgtaggcagaacttcacgagcttcaaaaaaagttcataattttggaaagaggtcaaattcaattaaaaggaatcctaatgcaccggttgtcagacgaggttggctttataaacaggacagtactggcatgaaattgtggaagaaacgctggtttgtgctttctgacctttgcctcttttattatagagatgagaaagaagagggtatcctgggaagcatactgttacctagttttcagatagctttgcttacctctgaagatcacattaatcgcaaatatgcttttaaggcagcccatccaaacatgcggacctattatttctgcactgatacaggaaaggaaatggagttgtggatgaaagccatgttagatgctgccctagtacagacagaacctgtgaaaagagtggacaagattacatctgaaaatgcaccaactaaagaaaccaataacattcccaaccatagagtgctaattaaaccagagatccaaaacaatcaaaaaaacaaggaaatgagcaaaattgaagaaaaaaaggcattagaagctgaaaaatatggatttcagaaggatggtcaagatagacccttaacaaaaattaatagtgtaaagctgaattctctgccatctgaatatgagagtgggtcagcatgccctgctcagactgtgcactacagaccaatcaacttgagcagttcagagaacaaaatagtcaatgttagcctggcagatcttagaggtggaaatcgccccaatacagggcccttatacacagaggccgatcgagtcatacagagaacaaattcaatgcagcagttggaacagtggattaaaatccagaaggggaggggtcatgaagaagaaaccaggggagtaatttcttaccaaacattaccaagaaatatgccaagtcacagagcccagattatggcccgctaccctgaaggttatagaacactcccaagaaacagcaagacaaggcctgaaagtatctgcagtgtaaccccttccactcatgacaagacattaggacccggagcggaggagaaacggaggtccatgagagatgacacaatgtggcagctctacgaatggcagcagcgtcagttttataacaaacagagcaccctccctcgacacagtactttgagtagtcccaaaaccatggtaaatatttctgaccagacaatgcactctattcccacatcaccttcccacgggtcaatagctgcttatcagggatactcccctcaacgaacttacagatcggaagtgtcttcaccaattcagagaggagatgtgacaatagaccgcagacacagggcccatcaccctaagcatgtctatgtgcctgacagaaggtcagtgccagctggcctgactttacagtctgttagtccccagagcctccaagggaaaacgctgtcacaagatgaaggtagaggcacattatacaaatacagacctgaagaagtagatattgatgccaagttaagccgattatgtgaacaagataaagtggtgcatgctctggaagagaaacttcagcaactccacaaggagaaatacacgcttgagcaagctttgctatcagccagccaagagatagaaatgcatgcagataacccagcagccattcagacagtggtgttacaaagggatgatttacaaaatggactgcttagtacgtgtcgagaactttctcgagccactgccgaattggaacgagcatggagagaatatgataagttagaatacgatgtaactgttaccaggaaccagatgcaagagcagctggatcaccttggtgaagttcagacggaatcagcaggaattcagcgtgcacagattcagaaagaactttggcgaattcaggatgtcatggaagggctgagtaaacataagcagcaaagaggtactacagaaataggtatgataggatcaaagcctttctcaacagttaagtacaaaaatgagggtccagattatagactctacaagagtgaaccagagttaacaacagtggcagaagttgatgaatctaatggagaagaaaaatcagaacctgtttcagagatagaaacttcagttgttaaaggttcccactttcctgttggagtagtccctccaagagcaaaatcaccaacacccgaatcttcgacaatagcttcctatgtaaccttgaggaaaactaagaagatgatggatctaagaacggaaagaccaagaagtgcagtggaacagctctgtttggctgaaagtactcgaccaaggatgactgtggaagagcaaatggaaagaataagaagacatcaacaagcgtgcctgagggagaagaaaaaagggttaaatgttatcggtgcttcagaccagtcacccttacaaagcccttcaaatttaagggataatccatttaggactactcagactcgaaggagggatgataaggaactggacactgccattagagaaaatgatgtaaagccagaccatgaaactcctgcaacagaaattgttcaactaaaagaaaccgaaccccaaaatgtggacttcagcaaagagttaaaaaaaactgaaaacatttcatatgaaatgctttttgaacctgagccaaatggagtaaattctgtggaaatgatggataaagaaagaaacaaagacaaaatgcctgaggatgttacattcagccctcaagatgaaacacagaccgcaaatcataaaccagaagagcatcctgaagaaaatacaaagaacagtgttgacgaacaggaagaaactgttatttcttacgaatcaactcctgaggtttctagaggaaatcaaacaatggcagtgaaaagtctgtccccatctcctgagtcctcggcatcgccagttccatccactcagccgcagctcacagaaggatcacatttcatgtgtgtgtagtcttagaagaactatactgacttctgttgaaaccattcaaagctaaagacatggaccttcagcagtgtaagaagatattgtacagtatattttaaatctatgaaattcatagttctgatgcttttggtcacagagcatcattttatcacttctggaaaatgtttattccaaaacagctttaatggcccatatgtacacttcgtaatctcaaggttattattctgacaccagcttgctgctatgatttcagagcacataagtaaaggtgctttttaatgtgcagtctatttccagagcttacttagttgctgatttccagatttcgatgtttcttaagtctaggtgaatttatatatatatttttttgcttttcattttctaaagttagttattatttccattgaagcttgttttctttttttcttcccattttagctactgcagtgcttttgtttcacacttgatttgtaaaaattttatatatatgtatttaaaatgtgccattttattgctaagtgaagtatgtcctgttttctgctataattctttctcggtcagattgcaatgtcagcagttactgccacactcctgtcagcttaaacacaaatgttactgcttatcttttcttaaaaaaaaaaaacaagcttcaatggaaataataactaactttag

SEQ ID NO: 110575 - DNA, 4264 bp, Homo sapiens
ggcagccgcggcggcagcaggagaaggcggcggcggcggctagggatcagacatggcggcggatctgaacctggagtggatctccctgccccggtcctggacttacgggatcaccaggggcggccgagtcttcttcatcaacgaggaggccaagagcaccacctggctgcaccccgtcaccggcgaggcggtggtcaccggacaccggcggcagagcacagatttgcctactggctgggaagaagcatatacttttgaaggtgcaagatactatataaaccataatgaaaggaaagtgacctgcaaacatccagtcacaggacaaccatcacaggacaattgtatttttgtagtgaatgaacagactgttgcaaccatgacatctgaagaaaagaaggaacggccaataagtatgataaatgaagcttctaactataacgtgacttcagattatgcagtgcatccaatgagccctgtaggcagaacttcacgagcttcaaaaaaagttcataattttggaaagaggtcaaattcaattaaaaggaatcctaatgcaccggttgtcagacgaggttggctttataaacaggacagtactggcatgaaattgtggaagaaacgctggtttgtgctttctgacctttgcctcttttattatagagatgagaaagaagagggtatcctgggaagcatactgttacctagttttcagatagctttgcttacctctgaagatcacattaatcgcaaatatgcttttaaggcagcccatccaaacatgcggacctattatttctgcactgatacaggaaaggaaatggagttgtggatgaaagccatgttagatgctgccctagtacagacagaacctgtgaaaagagtggacaagattacatctgaaaatgcaccaactaaagaaaccaataacattcccaaccatagagtgctaattaaaccagagatccaaaacaatcaaaaaaacaaggaaatgagcaaaattgaagaaaaaaaggcattagaagctgaaaaatatggatttcagaaggatggtcaagatagacccttaacaaaaattaatagtgtaaagctgaattctctgccatctgaatatgagagtgggtcagcatgccctgctcagactgtgcactacagaccaatcaacttgagcagttcagagaacaaaatagtcaatgttagcctggcagatcttagaggtggaaatcgccccaatacagggcccttatacacagaggccgatcgagtcatacagagaacaaattcaatgcagcagttggaacagtggattaaaatccagaaggggaggggtcatgaagaagaaaccaggggagtaatttcttaccaaacattaccaagaaatatgccaagtcacagagcccagattatggcccgctaccctgaaggttatagaacactcccaagaaacagcaagacaaggcctgaaagtatctgcagtgtaaccccttccactcatgacaagacattaggacccggagcggaggagaaacggaggtccatgagagatgacacaatgtggcagctctacgaatggcagcagcgtcagttttataacaaacagagcaccctccctcgacacagtactttgagtagtcccaaaaccatggtaaatatttctgaccagacaatgcactctattcccacatcaccttcccacgggtcaatagctgcttatcagggatactcccctcaacgaacttacagatcggaagtgtcttcaccaattcagagaggagatgtgacaatagaccgcagacacagggcccatcaccctaagcatgtctatgtgcctgacagaaggtcagtgccagctggcctgactttacagtctgttagtccccagagcctccaagggaaaacgctgtcacaagatgaaggtagaggcacattatacaaatacagacctgaagaagtagatattgatgccaagttaagccgattatgtgaacaagataaagtggtgcatgctctggaagagaaacttcagcaactccacaaggagaaatacacgcttgagcaagctttgctatcagccagccaagagatagaaatgcatgcagataacccagcagccattcagacagtggtgttacaaagggatgatttacaaaatggactgcttagtacgtgtcgagaactttctcgagccactgccgaattggaacgagcatggagagaatatgataagttagaatacgatgtaactgttaccaggaaccagatgcaagagcagctggatcaccttggtgaagttcagacggaatcagcaggaattcagcgtgcacagattcagaaagaactttggcgaattcaggatgtcatggaagggctgagtaaacataagcagcaaagaggtactacagaaataggtatgataggatcaaagcctttctcaacagttaagtacaaaaatgagggtccagattatagactctacaagagtgaaccagagttaacaacagtggcagaagttgatgaatctaatggagaagaaaaatcagaacctgtttcagagatagaaacttcagttgttaaaggttcccactttcctgttggagtagtccctccaagagcaaaatcaccaacacccgaatcttcgacaatagcttcctatgtaaccttgaggaaaactaagaagatgatggatctaagaacggaaagaccaagaagtgcagtggaacagctctgtttggctgaaagtactcgaccaaggatgactgtggaagagcaaatggaaagaataagaagacatcaacaagcgtgcctgagggagaagaaaaaagggttaaatgttatcggtgcttcagaccagtcacccttacaaagcccttcaaatttaagggataatccatttaggactactcagactcgaaggagggatgataaggaactggacactgccattagagaaaatgatgtaaagccagaccatgaaactcctgcaacagaaattgttcaactaaaagaaaccgaaccccaaaatgtggacttcagcaaagagttaaaaaaaactgaaaacatttcatatgaaatgctttttgaacctgagccaaatggagtaaattctgtggaaatgatggataaagaaagaaacaaagacaaaatgcctgaggatgttacattcagccctcaagatgaaacacagaccgcaaatcataaaccagaagagcatcctgaagaaaatacaaagaacagtgttgacgaacaggaagaaactgttatttcttacgaatcaactcctgaggtttctagaggaaatcaaacaatggcagtgaaaagtctgtccccatctcctgagtcctcggcatcgccagttccatccactcagccgcagctcacagaaggatcacatttcatgtctatactgacttctgttgaaaccattcaaagctaaagacatggaccttcagcagtgtaagaagatattgtacagtatattttaaatctatgaaattcatagttctgatgcttttggtcacagagcatcattttatcacttctggaaaatgtttattccaaaacagctttaatggcccatatgtacacttcgtaatctcaaggttattattctgacaccagcttgctgctatgatttcagagcacataagtaaaggtgctttttaatgtgcagtctatttccagagcttacttagttgctgatttccagatttcgatgtttcttaagtctaggtgaatttatatatatatttttttgcttttcattttctaaagttagttattatttccattgaagcttgttttctttttttcttcccattttagctactgcagtgcttttgtttcacacttgatttgtaaaaattttatatatatgtatttaaaatgtgccattttattgctaagtgaagtatgtcctgttttctgctataattctttctcggtcagattgcaatgtcagcagttactgccacactcctgtcagcttaaacacaaatgttactgcttatcttttcttaaaaaaaaaaaaaacaaagtgtaggtattttgaagtactgggcttatatttcattggaatacatgtgtacagcaataagcaggtttccaaatccggtacttagtttgtgtacaaatgtaattatgttcattgtgtatatattatacaatgagcacatgtaatgtattaaaggctacttactattgtttaaatgcaaatgttcatatctcatttctttttttatcatgttaaataaatgttgatgttcttaaa

SEQ ID NO: 110576 - DNA, 1819 bp, Homo sapiens
ccggtacctggatatagtgaggagttaacaacagtggcagaagttgatgaatctaatggagaagaaaaatcagaacctgtttcagagatagaaacttcagttgttaaaggttcccactttcctgttggagtagtccctccaagagcaaaatcaccaacacccgaatcttcgacaatagcttcctatgtaaccttgaggaaaactaagaagatgatggatctaagaacggaaagaccaagaagtgcagtggaacagctctgtttggctgaaagtactcgaccaaggatgactgtggaagagcaaatggaaagaataagaagacatcaacaagcgtgcctgagggagaagaaaaaagggttaaatgttatcggtgcttcagaccagtcacccttacaaagcccttcaaatttaagggataatccatttaggactactcagactcgaaggagggatgataaggaactggacactgccattagagaaaatgatgtaaagccagaccatgaaactcctgcaacagaaattgttcaactaaaagaaaccgaaccccaaaatgtggacttcagcaaagagttaaaaaaaactgaaaacatttcatatgaaatgctttttgaacctgagccaaatggagtaaattctgtggaaatgatggataaagaaagaaacaaagacaaaatgcctgaggatgttacattcagccctcaagatgaaacacagaccgcaaatcataaaccagaagagcatcctgaagaaaatacaaagaacagtgttgacgaacaggaagaaactgttatttcttacgaatcaactcctgaggtttctagaggaaatcaaacaatggcagtgaaaagtctgtccccatctcctgagtcctcggcatcgccagttccatccactcagccgcagctcacagaaggatcacatttcatgtgtgtgtagtcttagaagaactatactgacttctgttgaaaccattcaaagctaaagacatggaccttcagcagtgtaagaagatattgtacagtatattttaaatctatgaaattcatagttctgatgcttttggtcacagagcatcattttatcacttctggaaaatgtttattccaaaacagctttaatggcccatatgtacacttcgtaatctcaaggttattattctgacaccagcttgctgctatgatttcagagcacataagtaaaggtgctttttaatgtgcagtctatttccagagcttacttagttgctgatttccagatttcgatgtttcttaagtctaggtgaatttatatatatatttttttgcttttcattttctaaagttagttattatttccattgaagcttgttttctttttttcttcccattttagctactgcagtgcttttgtttcacacttgatttgtaaaaattttatatatatgtatttaaaatgtgccattttattgctaagtgaagtatgtcctgttttctgctataattctttctcggtcagattgcaatgtcagcagttactgccacactcctgtcagcttaaacacaaatgttactgcttatcttttcttaaaaaaaaaaaaaacaaagtgtaggtattttgaagtactgggcttatatttcattggaatacatgtgtacagcaataagcaggtttccaaatccggtacttagtttgtgtacaaatgtaattatgttcattgtgtatatattatacaatgagcacatgtaatgtattaaaggctacttactattgtttaaatgcaaatgttcatatctcatttctttttttatcatgttaaataaatgttgatgttcttaaa

SEQ ID NO: 110577 - DNA, 3234 bp, Homo sapiens
ggcagccgcggcggcagcaggagaaggcggcggcggcggctagggatcagacatggcggcggatctgaacctggagtggatctccctgccccggtcctggacttacgggatcaccaggggcggccgagtcttcttcatcaacgaggaggccaagagcaccacctggctgcaccccgtcaccggcgaggcggtggtcaccggacaccggcggcagagcacagatttgcctactggctgggaagaagcatatacttttgaaggtgcaagatactatataaaccataatgaaaggaaagtgacctgcaaacatccagtcacaggacaaccatcacaggacaattgtatttttgtagtgaatgaacagactgttgcaaccatgacatctgaagaaaagaaggaacggccaataagtatgataaatgaagcttctaactataacgtgacttcagattatgcagtgcatccaatgagccctgtaggcagaacttcacgagcttcaaaaaaagttcataattttggaaagaggtcaaattcaattaaaaggaatcctaatgcaccggttgtcagacgaggttggctttataaacaggacagtactggcatgaaattgtggaagaaacgctggtttgtgctttctgacctttgcctcttttattatagagatgagaaagaagagggtatcctgggaagcatactgttacctagttttcagatagctttgcttacctctgaagatcacattaatcgcaaatatgcttttaaggcagcccatccaaacatgcggacctattatttctgcactgatacaggaaaggaaatggagttgtggatgaaagccatgttagatgctgccctagtacagacagaacctgtgaaaagagtggacaagattacatctgaaaatgcaccaactaaagaaaccaataacattcccaaccatagagtgctaattaaaccagagatccaaaacaatcaaaaaaacaaggaaatgagcaaaattgaagaaaaaaaggcattagaagctgaaaaatatggatttcagaaggatggtcaagatagacccttaacaaaaattaatagtgtaaagctgaattctctgccatctgaatatgagagtgggtcagcatgccctgctcagactgtgcactacagaccaatcaacttgagcagttcagagaacaaaatagtcaatgttagcctggcagatcttagaggtggaaatcgccccaatacagggcccttatacacagaggccgatcgagtcatacagagaacaaattcaatgcagcagttggaacagtggattaaaatccagaaggggaggggtcatgaagaagaaaccaggggagtaatttcttaccaaacattaccaagaaatatgccaagtcacagagcccagattatggcccgctaccctgaaggttatagaacactcccaagaaacagcaagacaaggcctgaaagtatctgcagtgtaaccccttccactcatgacaagacattaggacccggagcggaggagaaacggaggtccatgagagatgacacaatgtggcagctctacgaatggcagcagcgtcagttttataacaaacagagcaccctccctcgacacagtactttgagtagtcccaaaaccatggtaaatatttctgaccagacaatgcactctattcccacatcaccttcccacgggtcaatagctgcttatcagggatactcccctcaacgaacttacagatcggaagtgtcttcaccaattcagagaggagatgtgacaatagaccgcagacacagggcccatcaccctaagcatgtctatgtgcctgacagaaggtcagtgccagctggcctgactttacagtctgttagtccccagagcctccaagggaaaacgctgtcacaagatgaaggtagaggcacattatacaaatacagacctgaagaagtagatattgatgccaagttaagccgattatgtgaacaagataaagtggtgcatgctctggaagagaaacttcagcaactccacaaggagaaatacacgcttgagcaagctttgctatcagccagccaagagatagaaatgcatgcagataacccagcagccattcagacagtggtgttacaaagggatgatttacaaaatggactgcttagtacgtgtcgagaactttctcgagccactgccgaattggaacgagcatggagagaatatgataagttagaatacgatgtaactgttaccaggaaccagatgcaagagcagctggatcaccttggtgaagttcagacggaatcagcaggaattcagcgtgcacagattcagaaagaactttggcgaattcaggatgtcatggaagggctgagtaaacataagcagcaaagaggtactacagaaataggtatgataggatcaaagcctttctcaacagttaagtacaaaaatgagggtccagattatagactctacaagagtgaaccagagttaacaacagtggcagaagttgatgaatctaatggagaagaaaaatcagaacctgtttcagagatagaaacttcagttgttaaaggttcccactttcctgttggagtagtccctccaagagcaaaatcaccaacacccgaatcttcgacaatagcttcctatgtaaccttgaggaaaactaagaagatgatggatctaagaacggaaagaccaagaagtgcagtggaacagctctgtttggctgaaagtactcgaccaaggatgactgtggaagagcaaatggaaagaataagaagacatcaacaagcgtgcctgagggagaagaaaaaagggttaaatgttatcggtgcttcagaccagtcacccttacaaagcccttcaaatttaagggataatccatttaggactactcagactcgaaggagggatgataaggaactggacactgccattagagaaaatgatgtaaagccagaccatgaaactcctgcaacagaaattgttcaactaaaagaaaccgaaccccaaaatgtggacttcagcaaagagttaaaaaaaactgaaaacatttcatatgaaatgctttttgaacctgagccaaatggagtaaattctgtggaaatgatggataaagaaagaaacaaagacaaaatgcctgaggatgttacattcagccctcaagatgaaacacagaccgcaaatcataaaccagaagagcatcctgaagaaaatacaaagaacagtgt

SEQ ID NO: 110578 - DNA, 3808 bp, Homo sapiens
ggcagccgcggcggcagcaggagaaggcggcggcggcggctagggatcagacatggcggcggatctgaacctggagtggatctccctgccccggtcctggacttacgggatcaccaggggcggccgagtcttcttcatcaacgaggaggccaagagcaccacctggctgcaccccgtcaccggcgaggcggtggtcaccggacaccggcggcagagcacagatttgcctactggctgggaagaagcatatacttttgaaggtgcaagatactatataaaccataatgaaaggaaagtgacctgcaaacatccagtcacaggacaaccatcacaggacaattgtatttttgtagtgaatgaacagactgttgcaaccatgacatctgaagaaaagaaggaacggccaataagtatgataaatgaagcttctaactataacgtgacttcagattatgcagtgcatccaatgagccctgtaggcagaacttcacgagcttcaaaaaaagttcataattttggaaagaggtcaaattcaattaaaaggaatcctaatgcaccggttgtcagacgaggttggctttataaacaggacagtactggcatgaaattgtggaagaaacgctggtttgtgctttctgacctttgcctcttttattatagagatgagaaagaagagggtatcctgggaagcatactgttacctagttttcagatagctttgcttacctctgaagatcacattaatcgcaaatatgcttttaaggcagcccatccaaacatgcggacctattatttctgcactgatacaggaaaggaaatggagttgtggatgaaagccatgttagatgctgccctagtacagacagaacctgtgaaaagagtggacaagattacatctgaaaatgcaccaactaaagaaaccaataacattcccaaccatagagtgctaattaaaccagagatccaaaacaatcaaaaaaacaaggaaatgagcaaaattgaagaaaaaaaggcattagaagctgaaaaatatggatttcagaaggatggtcaagatagacccttaacaaaaattaatagtgtaaagctgaattctctgccatctgaatatgagagtgggtcagcatgccctgctcagactgtgcactacagaccaatcaacttgagcagttcagagaacaaaatagtcaatgttagcctggcagatcttagaggtggaaatcgccccaatacagggcccttatacacagaggccgatcgagtcatacagagaacaaattcaatgcagcagttggaacagtggattaaaatccagaaggggaggggtcatgaagaagaaaccaggggagtaatttcttaccaaacattaccaagaaatatgccaagtcacagagcccagattatggcccgctaccctgaaggttatagaacactcccaagaaacagcaagacaaggcctgaaagtatctgcagtgtaaccccttccactcatgacaagacattaggacccggagcggaggagaaacggaggtccatgagagatgacacaatgtggcagctctacgaatggcagcagcgtcagttttataacaaacagagcaccctccctcgacacagtactttgagtagtcccaaaaccatggtaaatatttctgaccagacaatgcactctattcccacatcaccttcccacgggtcaatagctgcttatcagggatactcccctcaacgaacttacagatcggaagtgtcttcaccaattcagagaggagatgtgacaatagaccgcagacacagggcccatcaccctaagcatgtctatgtgcctgacagaaggtcagtgccagctggcctgactttacagtctgttagtccccagagcctccaagggaaaacgctgtcacaagatgaaggtagaggcacattatacaaatacagacctgaagaagtagatattgatgccaagttaagccgattatgtgaacaagataaagtggtgcatgctctggaagagaaacttcagcaactccacaaggagaaatacacgcttgagcaagctttgctatcagccagccaagagatagaaatgcatgcagataacccagcagccattcagacagtggtgttacaaagggatgatttacaaaatggactgcttagtacgtgtcgagaactttctcgagccactgccgaattggaacgagcatggagagaatatgataagttagaatacgatgtaactgttaccaggaaccagatgcaagagcagctggatcaccttggtgaagttcagacggaatcagcaggaattcagcgtgcacagattcagaaagaactttggcgaattcaggatgtcatggaagggctgagtaaacataagcagcaaagaggtactacagaaataggtatgataggatcaaagcctttctcaacagttaagtacaaaaatgagggtccagattatagactctacaagagtgaaccagagttaacaacagtggcagaagttgatgaatctaatggagaagaaaaatcagaacctgtttcagagatagaaacttcagttgttaaaggttcccactttcctgttggagtagtccctccaagagcaaaatcaccaacacccgaatcttcgacaatagcttcctatgtaaccttgaggaaaactaagaagatgatggatctaagaacggaaagaccaagaagtgcagtggaacagctctgtttggctgaaagtactcgaccaaggatgactgtggaagagcaaatggaaagaataagaagacatcaacaagcgtgcctgagggagaagaaaaaagggttaaatgttatcggtgcttcagaccagtcacccttacaaagcccttcaaatttaagggataatccatttaggactactcagactcgaaggagggatgataaggaactggacactgccattagagaaaatgatgtaaagccagaccatgaaactcctgcaacagaaattgttcaactaaaagaaaccgaaccccaaaatgtggacttcagcaaagagttaaaaaaaactgaaaacatttcatatgaaatgctttttgaacctgagccaaatggagtaaattctgtggaaatgatggataaagaaagaaacaaagacaaaatgcctgaggatgttacattcagccctcaagatgaaacacagaccgcaaatcataaaccagaagagcatcctgaagaaaatacaaagaacagtgttgacgaacaggaagaaactgttatttcttacgaatcaactcctgaggtttctagaggaaatcaaacaatggcagctatactgacttctgttgaaaccattcaaagctaaagacatggaccttcagcagtctactgcagtgcttttgtttcacacttgatttgtaaaaattttatatatatgtatttaaaatgtgccattttattgctaagtgaagtatgtcctgttttctgctataattctttctcggtcagattgcaatgtcagcagttactgccacactcctgtcagcttaaacacaaatgttactgcttatcttttcttaaaaaaaaaaaaaacaaagtgtaggtattttgaagtactgggcttatatttcattggaatacatgtgtacagcaataagcaggtttccaaatccggtacttagtttgtgtacaaatgtaattatgttcattgtgtatatattatacaatgagcacatgtaatgtattaaaggctacttactattgtttaaatgcaaatgttcatatctcatttctttttttatcatgttaaataaatgttgatgttcttaaa

SEQ ID NO: 110579 - DNA, 1045 bp, Homo sapiens
tgtgaattaagctatggaaatgaagaaaaatatcctttgatgtattgtattttaggattttcatggccatgcttgtcagttctgttgttacagaatgtcacccttagttactttgggaaatggtaattaattaacgttgcaggtgtcaaagtaatttcctctctcttatttttcagctatactgacttctgttgaaaccattcaaagctaaagacatggaccttcagcagtgtaagaagatattgtacagtatattttaaatctatgaaattcatagttctgatgcttttggtcacagagcatcattttatcacttctggaaaatgtttattccaaaacagctttaatggcccatatgtacacttcgtaatctcaaggttattattctgacaccagcttgctgctatgatttcagagcacataagtaaaggtgctttttaatgtgcagtctatttccagagcttacttagttgctgatttccagatttcgatgtttcttaagtctaggtgaatttatatatatatttttttgcttttcattttctaaagttagttattatttccattgaagcttgttttctttttttcttcccattttagctactgcagtgcttttgtttcacacttgatttgtaaaaattttatatatatgtatttaaaatgtgccattttattgctaagtgaagtatgtcctgttttctgctataattctttctcggtcagattgcaatgtcagcagttactgccacactcctgtcagcttaaacacaaatgttactgcttatcttttcttaaaaaaaaaaaaaacaaagtgtaggtattttgaagtactgggcttatatttcattggaatacatgtgtacagcaataagcaggtttccaaatccggtacttagtttgtgtacaaatgtaattatgttcattgtgtatatattatacaatgagcacatgtaatgtattaaaggctacttactattgtttaaatgcaaatgttcatatctcatttctttttttatcatgttaaataaatgttgatgttcttaaa

SEQ ID NO: 110580 - DNA, 1975 bp, Homo sapiens
ggcagccgcggcggcagcaggagaaggcggcggcggcggctagggatcagacatggcggcggatctgaacctggagtggatctccctgccccggtcctggacttacgggatcaccaggggcggccgagtcttcttcatcaacgaggaggccaagagcaccacctggctgcaccccgtcaccggcgaggcggtggtcaccggacaccggcggcagagcacagatttgcctactggctgggaagaagcatatacttttgaaggtgcaagatactatataaaccataatgaaaggaaagtgacctgcaaacatccagtcacaggacaaccatcacaggacaattgtatttttgtagtgaatgaacagactgttgcaaccatgacatctgaagaaaagaaggaacggccaataagtatgataaatgaagcttctaactataacgtgacttcagattatgcagtgcatccaatgagccctgtaggcagaacttcacgagcttcaaaaaaagttcataattttggaaagaggtcaaattcaattaaaaggaatcctaatgcaccggttgtcagacgaggttggctttataaacaggacagtactggcatgaaattgtggaagaaacgctggtttgtgctttctgacctttgcctcttttattatagagatgagaaagaagagggtatcctgggaagcatactgttacctagttttcagatagctttgcttacctctgaagatcacattaatcgcaaatatgcttttaaggcagcccatccaaacatgcggacctattatttctgcactgatacaggaaaggaaatggagttgtggatgaaagccatgttagatgctgccctagtacagacagaacctgtgaaaagagtggacaagattacatctgaaaatgcaccaactaaagaaaccaataacattcccaaccatagagtgctaattaaaccagagatccaaaacaatcaaaaaaacaaggaaatgagcaaaattgaagaaaaaaaggcattagaagctgaaaaatatggatttcagaaggatggtcaagatagacccttaacaaaaattaatagtgtaaagctgaattctctgccatctgaatatgagagtgggtcagcatgccctgctcagactgtgcactacagaccaatcaacttgagcagttcagagaacaaaatagtcaatgttagcctggcagatcttagaggtggaaatcgccccaatacagggcccttatacacagaggccgatcgagtcatacagagaacaaattcaatgcagcagttggaacagtggattaaaatccagaaggggaggggtcatgaagaagaaaccaggggagtaatttcttaccaaacattaccaagaaatatgccaagtcacagagcccagattatggcccgctaccctgaaggttatagaacactcccaagaaacagcaagacaaggcctgaaagtatctgcagtgtaaccccttccactcatgacaagacattaggacccggagcggaggagaaacggaggtccatgagagatgacacaatgtggcagctctacgaatggcagcagcgtcagttttataacaaacagagcaccctccctcgacacagtactttgagtagtcccaaaaccatggtaaatatttctgaccagacaatgcactctattcccacatcaccttcccacgggtcaatagctgcttatcagggatactcccctcaacgaacttacagatcggaagtgtcttcaccaattcagagaggagatgtgacaatagaccgcagacacagggcccatcaccctaaggtaaaatagctgctgattttgtgttaactcactaccttataaatgctgtgttttctttctagtatactattttaaatgtgagagacaaaagaatggggataaagtaagcaaggcagctcttttttgttttaaaaaataaataaaaatattttacaacattaa

SEQ ID NO: 110581 - DNA, 3021 bp, Homo sapiens
ggcagccgcggcggcagcaggagaaggcggcggcggcggctagggatcagacatggcggcggatctgaacctggagtggatctccctgccccggtcctggacttacgggatcaccaggggcggccgagtcttcttcatcaacgaggaggccaagagcaccacctggctgcaccccgtcaccggcgaggcggtggtcaccggacaccggcggcagagcacagatttgcctactggctgggaagaagcatatacttttgaaggtgcaagatactatataaaccataatgaaaggaaagtgacctgcaaacatccagtcacaggacaaccatcacaggacaattgtatttttgtagtgaatgaacagactgttgcaaccatgacatctgaagaaaagaaggaacggccaataagtatgataaatgaagcttctaactataacgtgacttcagattatgcagtgcatccaatgagccctgtaggcagaacttcacgagcttcaaaaaaagttcataattttggaaagaggtcaaattcaattaaaaggaatcctaatgcaccggttgtcagacgaggttggctttataaacaggacagtactggcatgaaattgtggaagaaacgctggtttgtgctttctgacctttgcctcttttattatagagatgagaaagaagagggtatcctgggaagcatactgttacctagttttcagatagctttgcttacctctgaagatcacattaatcgcaaatatgcttttaaggcagcccatccaaacatgcggacctattatttctgcactgatacaggaaaggaaatggagttgtggatgaaagccatgttagatgctgccctagtacagacagaacctgtgaaaagagtggacaagattacatctgaaaatgcaccaactaaagaaaccaataacattcccaaccatagagtgctaattaaaccagagatccaaaacaatcaaaaaaacaaggaaatgagcaaaattgaagaaaaaaaggcattagaagctgaaaaatatggatttcagaaggatggtcaagatagacccttaacaaaaattaatagtgtaaagctgaattctctgccatctgaatatgagagtgggtcagcatgccctgctcagactgtgcactacagaccaatcaacttgagcagttcagagaacaaaatagtcaatgttagcctggcagatcttagaggtggaaatcgccccaatacagggcccttatacacagaggccgatcgagtcatacagagaacaaattcaatgcagcagttggaacagtggattaaaatccagaaggggaggggtcatgaagaagaaaccaggggagtaatttcttaccaaacattaccaagaaatatgccaagtcacagagcccagattatggcccgctaccctgaaggttatagaacactcccaagaaacagcaagacaaggcctgaaagtatctgcagtgtaaccccttccactcatgacaagacattaggacccggagcggaggagaaacggaggtccatgagagatgacacaatgtggcagctctacgaatggcagcagcgtcagttttataacaaacagagcaccctccctcgacacagtactttgagtagtcccaaaaccatggtaaatatttctgaccagacaatgcactctattcccacatcaccttcccacgggtcaatagctgcttatcagggatactcccctcaacgaacttacagatcggaagtgtcttcaccaattcagagaggagatgtgacaatagaccgcagacacagggcccatcaccctaagcatgtctatgtgcctgacagaaggtcagtgccagctggcctgactttacagtctgttagtccccagagcctccaagggaaaacgctgtcacaagatgaaggtagaggcacattatacaaatacagacctgaagaagtagatattgatgccaagttaagccgattatgtgaacaagataaagtggtgcatgctctggaagagaaacttcagcaactccacaaggagaaatacacgcttgagcaagctttgctatcagccagccaagagatagaaatgcatgcagataacccagcagccattcagacagtggtgttacaaagggatgatttacaaaatggactgcttagtacgtgtcgagaactttctcgagccactgccgaattggaacgagcatggagagaatatgataagttagaatacgatgtaactgttaccaggaaccagatgcaagagcagctggatcaccttggtgaagttcagacggaatcagcaggaattcagcgtgcacagattcagaaagaactttggcgaattcaggatgtcatggaagggctgagtaaacataagcagcaaagaggtactacagaaataggtaaattagctttgcattttattttgtgactgaccacagtattacagtcatgtgtcgcttggtgacagattacattctgagaaatgcattgttaggtgattgtgttgtacaatcagagtgtacttaaacaaatctagttgtatggcctactacacacctaggctatgtggtatatagcttattgctcccaggttgcaaacctgcacagcatgtgactgtactgaatactgtagacagttgtaacacaatgttatttgtatatctaaacatagaaaaggtaatgtgttacactctgacatgagggcaacaactaggcaatagatatttctcagctctggctgggcacagtggctcacacctgtaatcccagcattttgggaggctgaggtgggcagatcacctgaggtcaggagttcaagaccagcttggccaacgtggtgaaaccctgtctctactaaaaatacaaaaaaagccaggcatggtggcgcatgcctgtagtcccaaatactcaggaagcttagacaggagaatcgcttgaacccgggaggtggaggttgcagtgagccaagatcatgccagtgtgctccagcatgggcagcagagggaaactgtccca

SEQ ID NO: 110582 - DNA, 1880 bp, Homo sapiens
ggcagccgcggcggcagcaggagaaggcggcggcggcggctagggatcagacatggcggcggatctgaacctggagtggatctccctgccccggtcctggacttacgggatcaccaggggcggccgagtcttcttcatcaacgaggaggccaagagcaccacctggctgcaccccgtcaccggcgaggcggtggtcaccggacaccggcggcagagcacagatttgcctactggctgggaagaagcatatacttttgaaggtgcaagatactatataaaccataatgaaaggaaagtgacctgcaaacatccagtcacaggacaaccatcacaggacaattgtatttttgtagtgaatgaacagactgttgcaaccatgacatctgaagaaaagaaggaacggccaataagtatgataaatgaagcttctaactataacgtgacttcagattatgcagtgcatccaatgagccctgtaggcagaacttcacgagcttcaaaaaaagttcataattttggaaagaggtcaaattcaattaaaaggaatcctaatgcaccggttgtcagacgaggttggctttataaacaggacagtactggcatgaaattgtggaagaaacgctggtttgtgctttctgacctttgcctcttttattatagagatgagaaagaagagggtatcctgggaagcatactgttacctagttttcagatagctttgcttacctctgaagatcacattaatcgcaaatatgcttttaaggcagcccatccaaacatgcggacctattatttctgcactgatacaggaaaggaaatggagttgtggatgaaagccatgttagatgctgccctagtacagacagaacctgtgaaaagagtggacaagattacatctgaaaatgcaccaactaaagaaaccaataacattcccaaccatagagtgctaattaaaccagagatccaaaacaatcaaaaaaacaaggaaatgagcaaaattgaagaaaaaaaggcattagaagctgaaaaatatggatttcagaaggatggtcaagatagacccttaacaaaaattaatagtgtaaagctgaattctctgccatctgaatatgagagtgggtcagcatgccctgctcagactgtgcactacagaccaatcaacttgagcagttcagagaacaaaatagtcaatgttagcctggcagatcttagaggtggaaatcgccccaatacagggcccttatacacagaggccgatcgagtcatacagagaacaaattcaatgcagcagttggaacagtggattaaaatccagaaggggaggggtcatgaagaagaaaccaggggagtaatttcttaccaaacattaccaagaaatatgccaagtcacagagcccagattatggcccgctaccctgaaggttatagaacactcccaagaaacagcaagacaaggcctgaaagtatctgcagtgtaaccccttccattttataacaaacagagcaccctccctcgacacagtactttgagtagtcccaaaaccatggtaaatatttctgaccagacaatgcactctattcccacatcaccttcccacgggtcaatagctgcttatcagggatactcccctcaacgaacttacagatcggaagtgtcttcaccaattcagagaggagatgtgacaatagaccgcagacacagggcccatcaccctaaggtaaaatagctgctgattttgtgttaactcactaccttataaatgctgtgttttctttctagtatactattttaaatgtgagagacaaaagaatggggataaagtaagcaaggcagctcttttttgttttaaaaaataaataaaaatattttacaacattaa

SEQ ID NO: 110583 - DNA, 352 bp, Homo sapiens
cctgcctcagcctcccgagtagctgggactacaggtgcccgccaccactcccagctaattttttgtatttttagtagagacggggtttcaccgtgttagccaggatggtctcgatctcctgacctcgtgatccgcccgcctcggcctcccaaagtgctgggatcacaggcgtgagccactgcgcccggccgtgattgttcaataaactttattttggaattattttagatatgctaatctaatgtgataagaattctttgaaaagaaaatttttctttttattctacagttaaaaaaaactgaaaacatttcatatgaaatgctttttgaacctgagccaaatggagtaaat

SEQ ID NO: 110584 - DNA, 761 bp, Homo sapiens
tgccggaggtattgagagtaggcaatggtaacattctcgaaggagaacagagaaaacgttaaataaataacattttaaaatacagtagtcaaggaaggcctcattgatgagacctttgagcaaagcctgaaggatgtaaccaagaaagccatgtatttgtctggggatagaatggttgggcatttaaatcctatcagagatgtgggtgggttaatgccattacttatatgccagtatgtttttcagtgaatgacatgtaaaggggctttgtagaatgcagtatatataccaaagtataaattcttgtgctatttgatattttcatttaaaaccttataaaggcctgcctgaacatgaatatagttcatttatgtacaagaaccttttgatttggcaaaaatagatcttgaaaaactttgcttcataagaacatttaaaattctaatcagatgttaaattatctcttagatgagaaagaagagggtatcctgggaagcatactgttacctagttttcagatagctttgcttacctctgaagatcacattaatcgcaaatatgcttttaaggtaaggaaataatgcagtttttaattctgtgttcaaaacttgcgttggttaaaatggatattgagccatagattattacaaaaaagctaccttatagtgatttttatatttaaaatatattaattaatggtcttatggttgtatagaagaatgtccctctaattaggaagcacgtgctaaaatatttagggg

SEQ ID NO: 110585 - DNA, 4283 bp, Homo sapiens
ggcagccgcggcggcagcaggagaaggcggcggcggcggctagggatcagacatggcggcggatctgaacctggagtggatctccctgccccggtcctggacttacgggatcaccaggggcggccgagtcttcttcatcaacgaggaggccaagagcaccacctggctgcaccccgtcaccggcgaggcggtggtcaccggacaccggcggcagagcacagatttgcctactggctgggaagaagcatatacttttgaaggtgcaagatactatataaaccataatgaaaggaaagtgacctgcaaacatccagtcacaggacaaccatcacaggacaattgtatttttgtagtgaatgaacagactgttgcaaccatgacatctgaagaaaagaaggaacggccaataagtatgataaatgaagcttctaactataacgtgacttcagattatgcagtgcatccaatgagccctgtaggcagaacttcacgagcttcaaaaaaagttcataattttggaaagaggtcaaattcaattaaaaggaatcctaatgcaccggttgtcagacgaggttggctttataaacaggacagtactggcatgaaattgtggaagaaacgctggtttgtgctttctgacctttgcctcttttattatagagatgagaaagaagagggtatcctgggaagcatactgttacctagttttcagatagctttgcttacctctgaagatcacattaatcgcaaatatgcttttaaggcagcccatccaaacatgcggacctattatttctgcactgatacaggaaaggaaatggagttgtggatgaaagccatgttagatgctgccctagtacagacagaacctgtgaaaagagtggacaagattacatctgaaaatgcaccaactaaagaaaccaataacattcccaaccatagagtgctaattaaaccagagatccaaaacaatcaaaaaaacaaggaaatgagcaaaattgaagaaaaaaaggcattagaagctgaaaaatatggatttcagaaggatggtcaagatagacccttaacaaaaattaatagtgtaaagctgaattctctgccatctgaatatgagagtgggtcagcatgccctgctcagactgtgcactacagaccaatcaacttgagcagttcagagaacaaaatagtcaatgttagcctggcagatcttagaggtggaaatcgccccaatacagggcccttatacacagaggccgatcgagtcatacagagaacaaattcaatgcagcagttggaacagtggattaaaatccagaaggggaggggtcatgaagaagaaaccaggggagtaatttcttaccaaacattaccaagaaatatgccaagtcacagagcccagattatggcccgctaccctgaaggttatagaacactcccaagaaacagcaagacaaggcctgaaagtatctgcagtgtaaccccttccactcatgacaagacattaggacccggagcggaggagaaacggaggtccatgagagatgacacaatgtggcagctctacgaatggcagcagcgtcagttttataacaaacagagcaccctccctcgacacagtactttgagtagtcccaaaaccatggtaaatatttctgaccagacaatgcactctattcccacatcaccttcccacgggtcaatagctgcttatcagggatactcccctcaacgaacttacagatcggaagtgtcttcaccaattcagagaggagatgtgacaatagaccgcagacacagggcccatcaccctaagcatgtctatgtgcctgacagaaggtcagtgccagctggcctgactttacagtctgttagtccccagagcctccaagggaaaacgctgtcacaagatgaaggtagaggcacattatacaaatacagacctgaagaagtagatattgatgccaagttaagccgattatgtgaacaagataaagtggtgcatgctctggaagagaaacttcagcaactccacaaggagaaatacacgcttgagcaagctttgctatcagccagccaagagatagaaatgcatgcagataacccagcagccattcagacagtggtgttacaaagggatgatttacaaaatggactgcttagtacgtgtcgagaactttctcgagccactgccgaattggaacgagcatggagagaatatgataagttagaatacgatgtaactgttaccaggaaccagatgcaagagcagctggatcaccttggtgaagttcagacggaatcagcaggaattcagcgtgcacagattcagaaagaactttggcgaattcaggatgtcatggaagggctgagtaaacataagcagcaaagaggtactacagaaataggtatgataggatcaaagcctttctcaacagttaagtacaaaaatgagggtccagattatagactctacaagagtgaaccagagttaacaacagtggcagaagttgatgaatctaatggagaagaaaaatcagaacctgtttcagagatagaaacttcagttgttaaaggttcccactttcctgttggagtagtccctccaagagcaaaatcaccaacacccgaatcttcgacaatagcttcctatgtaaccttgaggaaaactaagaagatgatggatctaagaacggaaagaccaagaagtgcagtggaacagctctgtttggctgaaagtactcgaccaaggatgactgtggaagagcaaatggaaagaataagaagacatcaacaagcgtgcctgagggagaagaaaaaagggttaaatgttatcggtgcttcagaccagtcacccttacaaagcccttcaaatttaagggataatccatttaggactactcagactcgaaggagggatgataaggaactggacactgccattagagaaaatgatgtaaagccagaccatgaaactcctgcaacagaaattgttcaactaaaagaaaccgaaccccaaaatgtggacttcagcaaagagttaaaaaaaactgaaaacatttcatatgaaatgctttttgaacctgagccaaatggagtaaattctgtggaaatgatggataaagaaagaaacaaagacaaaatgcctgaggatgttacattcagccctcaagatgaaacacagaccgcaaatcataaaccagaagagcatcctgaagaaaatacaaagaacagtgttgacgaacaggaagaaactgttatttcttacgaatcaactcctgaggtttctagaggaaatcaaacaatggcagtgaaaagtctgtccccatctcctgagtcctcggcatcgccagttccatccactcagccgcagctcacagaaggatcacatttcatgtgtgtgtagtcttagaagaactatactgacttctgttgaaaccattcaaagctaaagacatggaccttcagcagtgtaagaagatattgtacagtatattttaaatctatgaaattcatagttctgatgcttttggtcacagagcatcattttatcacttctggaaaatgtttattccaaaacagctttaatggcccatatgtacacttcgtaatctcaaggttattattctgacaccagcttgctgctatgatttcagagcacataagtaaaggtgctttttaatgtgcagtctatttccagagcttacttagttgctgatttccagatttcgatgtttcttaagtctaggtgaatttatatatatatttttttgcttttcattttctaaagttagttattatttccattgaagcttgttttctttttttcttcccattttagctactgcagtgcttttgtttcacacttgatttgtaaaaattttatatatatgtatttaaaatgtgccattttattgctaagtgaagtatgtcctgttttctgctataattctttctcggtcagattgcaatgtcagcagttactgccacactcctgtcagcttaaacacaaatgttactgcttatcttttcttaaaaaaaaaaaaaacaaagtgtaggtattttgaagtactgggcttatatttcattggaatacatgtgtacagcaataagcaggtttccaaatccggtacttagtttgtgtacaaatgtaattatgttcattgtgtatatattatacaatgagcacatgtaatgtattaaaggctacttactattgtttaaatgcaaatgttcatatctcatttctttttttatcatgttaaataaatgttgatgttcttaaa

SEQ ID NO: 110586 - DNA, 4115 bp, Homo sapiens
ggcagccgcggcggcagcaggagaaggcggcggcggcggctagggatcagacatggcggcggatctgaacctggagtggatctccctgccccggtcctggacttacgggatcaccaggggcggccgagtcttcttcatcaacgaggaggccaagagcaccacctggctgcaccccgtcaccggcgaggcggtggtcaccggacaccggcggcagagcacagatttgcctactggctgggaagaagcatatacttttgaaggtgcaagatactatataaaccataatgaaaggaaagtgacctgcaaacatccagtcacaggacaaccatcacaggacaattgtatttttgtagtgaatgaacagactgttgcaaccatgacatctgaagaaaagaaggaacggccaataagtatgataaatgaagcttctaactataacgtgacttcagattatgcagtgcatccaatgagccctgtaggcagaacttcacgagcttcaaaaaaagttcataattttggaaagaggtcaaattcaattaaaaggaatcctaatgcaccggttgtcagacgaggttggctttataaacaggacagtactggcatgaaattgtggaagaaacgctggtttgtgctttctgacctttgcctcttttattatagagatgagaaagaagagggtatcctgggaagcatactgttacctagttttcagatagctttgcttacctctgaagatcacattaatcgcaaatatgcttttaaggcagcccatccaaacatgcggacctattatttctgcactgatacaggaaaggaaatggagttgtggatgaaagccatgttagatgctgccctagtacagacagaacctgtgaaaagagtggacaagattacatctgaaaatgcaccaactaaagaaaccaataacattcccaaccatagagtgctaattaaaccagagatccaaaacaatcaaaaaaacaaggaaatgagcaaaattgaagaaaaaaaggcattagaagctgaaaaatatggatttcagaaggatggtcaagatagacccttaacaaaaattaatagtgtaaagctgaattctctgccatctgaatatgagagtgggtcagcatgccctgctcagactgtgcactacagaccaatcaacttgagcagttcagagaacaaaatagtcaatgttagcctggcagatcttagaggtggaaatcgccccaatacagggcccttatacacagaggccgatcgagtcatacagagaacaaattcaatgcagcagttggaacagtggattaaaatccagaaggggaggggtcatgaagaagaaaccaggggagtaatttcttaccaaacattaccaagaaatatgccaagtcacagagcccagattatggcccgctaccctgaaggttatagaacactcccaagaaacagcaagacaaggcctgaaagtatctgcagtgtaaccccttccactcatgacaagacattaggacccggagcggaggagaaacggaggtccatgagagatgacacaatgtggcagctctacgaatggcagcagcgtcagttttataacaaacagagcaccctccctcgacacagtactttgagtagtcccaaaaccatggtaaatatttctgaccagacaatgcactctattcccacatcaccttcccacgggtcaatagctgcttatcagggatactcccctcaacgaacttacagatcggaagtgtcttcaccaattcagagaggagatgtgacaatagaccgcagacacagggcccatcaccctaagcatgtctatgtgcctgacagaaggtcagtgccagctggcctgactttacagtctgttagtccccagagcctccaagggaaaacgctgtcacaagatgaaggtagaggcacattatacaaatacagacctgaagaagtagatattgatgccaagttaagccgattatgtgaacaagataaagtggtgcatgctctggaagagaaacttcagcaactccacaaggagaaatacacgcttgagcaagctttgctatcagccagccaagagatagaaatgcatgcagataacccagcagccattcagacagtggtgttacaaagggatgatttacaaaatggactgcttagtacgtgtcgagaactttctcgagccactgccgaattggaacgagcatggagagaatatgataagttagaatacgatgtaactgttaccaggaaccagatgcaagagcagctggatcaccttggtgaagttcagacggaatcagcaggaattcagcgtgcacagattcagaaagaactttggcgaattcaggatgtcatggaagggctgagtaaacataagcagcaaagaggtactacagaaataggttcccactttcctgttggagtagtccctccaagagcaaaatcaccaacacccgaatcttcgacaatagcttcctatgtaaccttgaggaaaactaagaagatgatggatctaagaacggaaagaccaagaagtgcagtggaacagctctgtttggctgaaagtactcgaccaaggatgactgtggaagagcaaatggaaagaataagaagacatcaacaagcgtgcctgagggagaagaaaaaagggttaaatgttatcggtgcttcagaccagtcacccttacaaagcccttcaaatttaagggataatccatttaggactactcagactcgaaggagggatgataaggaactggacactgccattagagaaaatgatgtaaagccagaccatgaaactcctgcaacagaaattgttcaactaaaagaaaccgaaccccaaaatgtggacttcagcaaagagttaaaaaaaactgaaaacatttcatatgaaatgctttttgaacctgagccaaatggagtaaattctgtggaaatgatggataaagaaagaaacaaagacaaaatgcctgaggatgttacattcagccctcaagatgaaacacagaccgcaaatcataaaccagaagagcatcctgaagaaaatacaaagaacagtgttgacgaacaggaagaaactgttatttcttacgaatcaactcctgaggtttctagaggaaatcaaacaatggcagtgaaaagtctgtccccatctcctgagtcctcggcatcgccagttccatccactcagccgcagctcacagaaggatcacatttcatgtgtgtgtagtcttagaagaactatactgacttctgttgaaaccattcaaagctaaagacatggaccttcagcagtgtaagaagatattgtacagtatattttaaatctatgaaattcatagttctgatgcttttggtcacagagcatcattttatcacttctggaaaatgtttattccaaaacagctttaatggcccatatgtacacttcgtaatctcaaggttattattctgacaccagcttgctgctatgatttcagagcacataagtaaaggtgctttttaatgtgcagtctatttccagagcttacttagttgctgatttccagatttcgatgtttcttaagtctaggtgaatttatatatatatttttttgcttttcattttctaaagttagttattatttccattgaagcttgttttctttttttcttcccattttagctactgcagtgcttttgtttcacacttgatttgtaaaaattttatatatatgtatttaaaatgtgccattttattgctaagtgaagtatgtcctgttttctgctataattctttctcggtcagattgcaatgtcagcagttactgccacactcctgtcagcttaaacacaaatgttactgcttatcttttcttaaaaaaaaaaaaaacaaagtgtaggtattttgaagtactgggcttatatttcattggaatacatgtgtacagcaataagcaggtttccaaatccggtacttagtttgtgtacaaatgtaattatgttcattgtgtatatattatacaatgagcacatgtaatgtattaaaggctacttactattgtttaaatgcaaatgttcatatctcatttctttttttatcatgttaaataaatgttgatgttcttaaa

SEQ ID NO: 110587 - DNA, 6535 bp, Homo sapiens
  misc_feature (3895)..(3895): n is a, c, g, or t
  misc_feature (3910)..(3910): n is a, c, g, or t
  misc_feature (4019)..(4019): n is a, c, g, or t
  misc_feature (4135)..(4135): n is a, c, g, or t
  misc_feature (4985)..(4985): n is a, c, g, or t
  misc_feature (5051)..(5051): n is a, c, g, or t
  misc_feature (5762)..(5762): n is a, c, g, or t
  misc_feature (5923)..(5923): n is a, c, g, or t
  misc_feature (6068)..(6069): n is a, c, g, or t
  misc_feature (6117)..(6117): n is a, c, g, or t
  misc_feature (6127)..(6127): n is a, c, g, or t
ggcagccgcggcggcagcaggagaaggcggcggcggcggctagggatcagacatggcggcggatctgaacctggagtggatctccctgccccggtcctggacttacgggatcaccaggggcggccgagtcttcttcatcaacgaggaggccaagagcaccacctggctgcaccccgtcaccggcgaggcggtggtcaccggacaccggcggcagagcacagatttgcctactggctgggaagaagcatatacttttgaaggtgcaagatactatataaaccataatgaaaggaaagtgacctgcaaacatccagtcacaggacaaccatcacaggacaattgtatttttgtagtgaatgaacagactgttgcaaccatgacatctgaagaaaagaaggaacggccaataagtatgataaatgaagcttctaactataacgtgacttcagattatgcagtgcatccaatgagccctgtaggcagaacttcacgagcttcaaaaaaagttcataattttggaaagaggtcaaattcaattaaaaggaatcctaatgcaccggttgtcagacgaggttggctttataaacaggacagtactggcatgaaattgtggaagaaacgctggtttgtgctttctgacctttgcctcttttattatagagatgagaaagaagagggtatcctgggaagcatactgttacctagttttcagatagctttgcttacctctgaagatcacattaatcgcaaatatgcttttaaggcagcccatccaaacatgcggacctattatttctgcactgatacaggaaaggaaatggagttgtggatgaaagccatgttagatgctgccctagtacagacagaacctgtgaaaagagtggacaagattacatctgaaaatgcaccaactaaagaaaccaataacattcccaaccatagagtgctaattaaaccagagatccaaaacaatcaaaaaaacaaggaaatgagcaaaattgaagaaaaaaaggcattagaagctgaaaaatatggatttcagaaggatggtcaagatagacccttaacaaaaattaatagtgtaaagctgaattctctgccatctgaatatgagagtgggtcagcatgccctgctcagactgtgcactacagaccaatcaacttgagcagttcagagaacaaaatagtcaatgttagcctggcagatcttagaggtggaaatcgccccaatacagggcccttatacacagaggccgatcgagtcatacagagaacaaattcaatgcagcagttggaacagtggattaaaatccagaaggggaggggtcatgaagaagaaaccaggggagtaatttcttaccaaacattaccaagaaatatgccaagtcacagagcccagattatggcccgctaccctgaaggttatagaacactcccaagaaacagcaagacaaggcctgaaagtatctgcagtgtaaccccttccactcatgacaagacattaggacccggagcggaggagaaacggaggtccatgagagatgacacaatgtggcagctctacgaatggcagcagcgtcagttttataacaaacagagcaccctccctcgacacagtactttgagtagtcccaaaaccatggtaaatatttctgaccagacaatgcactctattcccacatcaccttcccacgggtcaatagctgcttatcagggatactcccctcaacgaacttacagatcggaagtgtcttcaccaattcagagaggagatgtgacaatagaccgcagacacagggcccatcaccctaagcatgtctatgtgcctgacagaaggtcagtgccagctggcctgactttacagtctgttagtccccagagcctccaagggaaaacgccagaggagcttacgctgctgctaataaagctgagacggcagcaagccgaactgagtagtatccgggagcatacgttagcacagctcatgcagctaaagcttgaggcccacagcccaaagaatgaaattctttcacatcatctccaaaggaacaccatatatttggatcatcagctgtcacaagatgaaggtagaggcacattatacaaatacagacctgaagaagtagatattgatgccaagttaagccgattatgtgaacaagataaagtggtgcatgctctggaagagaaacttcagcaactccacaaggagaaatacacgcttgagcaagctttgctatcagccagccaagagatagaaatgcatgcagataacccagcagccattcagacagtggtgttacaaagggatgatttacaaaatggactgcttagtacgtgtcgagaactttctcgagccactgccgaattggaacgagcatggagagaatatgataagttagaatacgatgtaactgttaccaggaaccagatgcaagagcagctggatcaccttggtgaagttcagacggaatcagcaggaattcagcgtgcacagattcagaaagaactttggcgaattcaggatgtcatggaagggctgagtaaacataagcagcaaagaggtactacagaaataggtatgataggatcaaagcctttctcaacagttaagtacaaaaatgagggtccagattatagactctacaagagtgaaccagagttaacaacagtggcagaagttgatgaatctaatggagaagaaaaatcagaacctgtttcagagatagaaacttcagttgttaaaggttcccactttcctgttggagtagtccctccaagagcaaaatcaccaacacccgaatcttcgacaatagcttcctatgtaaccttgaggaaaactaagaagatgatggatctaagaacggaaagaccaagaagtgcagtggaacagctctgtttggctgaaagtactcgaccaaggatgactgtggaagagcaaatggaaagaataagaagacatcaacaagcgtgcctgagggagaagaaaaaagggttaaatgttatcggtgcttcagaccagtcacccttacaaagcccttcaaatttaagggataatccatttaggactactcagactcgaaggagggatgataaggaactggacactgccattagagaaaatgatgtaaagccagaccatgaaactcctgcaacagaaattgttcaactaaaagaaaccgaaccccaaaatgtggacttcagcaaagagttaaaaaaaactgaaaacatttcatatgaaatgctttttgaacctgagccaaatggagtaaattctgtggaaatgatggataaagaaagaaacaaagacaaaatgcctgaggatgttacattcagccctcaagatgaaacacagaccgcaaatcataaaccagaagagcatcctgaagaaaatacaaagaacagtgttgacgaacaggaagaaactgttatttcttacgaatcaactcctgaggtttctagaggaaatcaaacaatggcagtgaaaagtctgtccccatctcctgagtcctcggcatcgccagttccatccactcagccgcagctcacagaaggatcacatttcatgtgtgtgtagtcttagaagaaagatgtcccccatgctggagtgtagtggcataatcacagctcactgcagccttgacctcctgggctcaagcagtcgtcctgcctcagcctcacaagtagctgggatcacaagtgcacgccaccacactcggctgatatttcgattttcttatagagacagtcttactaagttgtccacgctggtctcaaactcctgaattcaagctaccctcccactgcatgagccactgtgcctagcctctttgattttcacattctcaaaatatttcttttattttctctcctttttttttttttttcgaggcanggtcttactctgtcncccaggctggagtgcagtggtgcaagatcatggctcaatggctcactgaaggctgacctcccaggctcaagcaatcctcccacctcagccccctgagtagctgggactncaggtgtatgccaccatgccaggctaattgttttgcagagatggagttttcaccatgttgcccaggctgatctcaagctcctgagctcaagtgatctgtccgcctcagcctcccanagtgctgagattacaggtgtgagccaccacacccagccttttttcttccttttcaagcattttttaaatttcactagctttgggtacaagtggttttgggttacatggaagaattgtatagtggtgaagtctgagattttagtgcacccattacccgagtagtgtatgttgtacccaatccttcaccgaccttccaccctctcccttctgagtctccaaagtccattataccacactgtatgcctttgcatacccatagtgtagctccaacttataagtgagaacatatgatatttggttttcctttcctgagttactttacttagaataatggcctccagctccatccaagttgctgcaaaatacattattttgttcctttttattgctgagtagtattccatggtgtatataaaccacattttctttatccactccttggttggtggactcttaggttggttccatacccttggagttgcaaattgtgctgctataaacatgcatgtgcatgtatcttttttatgtaatgacttgttttcttttgggtcgatactcagtagtgggattgctggatcaaatgctggatctacttttagttctttaaggaatctccacactgttttccgtagtggttgtactagtttacattcccaccagcagtgtaaaagtgtttccttctcaccacatccataccaacatctgttgttttttgacttttaaattatggccattctttttttttgtttttgagatggagtctcgctctgtcagcaggctggagtgcagtggcgtgatcttggctcactgcaacctcctcctccagggttcaagtgattctcctgcctcngcctcccccgtagctgggactacaggcgtgtgccaccacacccagctaatttttgaatttttagtngagatggggtttcaccatgttggccagtatggtctcgatctcttgacctcatgatccgcccacctcggcctcccaaagtgctggcgtgacccactgcacccggccaattatggccattcttgcaggaataaggaggcatctcattgttgtgtaccttcttttgagaaatgcctattcgcgtcatttgcccactttttgatgggattatttgttttttttttttttttcttgctgatttgttttgagttccttccagattctggatattagtcctttgttggatgcatagtttgcaaatatttcctcccatcctgttttctggaatctacttcctttcacaccttattgtaggaactataatctgtgccctttttttcagcccaaagtattttgttgtcttttcatatttgtaacttttatttgagattatgtctacctggaacctcaaagaggcttctgtttttgtcagttggtatctgtgcaggactgaagtgcttgctggagagttacaaataacctaactgtgatagtcttacctgtgttctgcctttgtcacttgtgtttaagccttttttcttttttcttttttcttttttttttttttgttgagaccaggtctcaccctgtcacccacactggagtgcaatggtgagatcttggagccttgccctcctgggcttaagtgatcctcccacgacagcctcccaagtngctgggaccacacgcctgtgccaccaagcctggctgatttttttgtattttttgtagagtaggggtttcaccgtgttgcccaggctggtctcaaactcctgagctcaagcgctctgcccgcctcaatctcccaaagtgctgagattacaagattgagccancacgcctggctatgtttaaacttttaatttaatatgtttagaaatgactgttgaggccaggtgcggtaatgccagcactttgggaggccagggctggtggatcacttgaggtcgggagttcaggaccagcctggccaacatggtnnaaccccatctctacttaaaaatacaaaaattagctgggcatggtgtcnggcgcctgtnatcccagctacctgggaggctgagacaggagaatcgcttgaacctgggaggcagaggttgcagtgagccgagatcacaccatcgcactccggcctgggtgacagaacaagactttgtctcaaaaaaaaaaaaaaaaatctgggtgtggtggcccacacctgtaatcccagcactttgggaggccgaggcaggcagatcacctggctcctgaccagcgtgaccaacatggagaaacccagtctctactaaaattacaaaattagctgggcgtggtggcacatgcctgtaatcccagctacttgggaggctgaggcaggagaatcgcttgaacccagaggcagtggttgcagtgagccgaggtcgtgccattgcactccagcctgggcaacaagaacgaaactctgtctc

SEQ ID NO: 110588 - DNA, 2020 bp, Homo sapiens
ttttgccacttaaaaatttctcaaatttcttctttccacgtaattgtgacataggtattatttgtgttatatcccagatggctcactagggctactaatgtttagagtttgatttgtgtctttagcagtaaacattttaaaagaaacttttagcagttttttagggtaattacatgtcttcctttcaagggtccagattatagactctacaagagtgaaccagagttaacaacagtggcagaagttgatgaatctaatggagaagaaaaatcagaacctgtttcagagatagaaacttcagttgttaaaggttcccactttcctgttggagtagtccctccaagagcaaaatcaccaacacccgaatcttcgacaatagcttcctatgtaaccttgaggaaaactaagaagatgatggatctaagaacggaaagaccaagaagtgcagtggaacagctctgtttggctgaaagtactcgaccaaggatgactgtggaagagcaaatggaaagaataagaagacatcaacaagcgtgcctgagggagaagaaaaaagggttaaatgttatcggtgcttcagaccagtcacccttacaaagcccttcaaatttaagggataatccatttaggactactcagactcgaaggagggatgataaggaactggacactgccattagagaaaatgatgtaaagccagaccatgaaactcctgcaacagaaattgttcaactaaaagaaaccgaaccccaaaatgtggacttcagcaaagagttaaaaaaaactgaaaacatttcatatgaaatgctttttgaacctgagccaaatggagtaaattctgtggaaatgatggataaagaaagaaacaaagacaaaatgcctgaggatgttacattcagccctcaagatgaaacacagaccgcaaatcataaaccagaagagcatcctgaagaaaatacaaagaacagtgttgacgaacaggaagaaactgttatttcttacgaatcaactcctgaggtttctagaggaaatcaaacaatggcagtgaaaagtctgtccccatctcctgagtcctcggcatcgccagttccatccactcagccgcagctcacagaaggatcacatttcatgtgtgtgtagtcttagaagaactatactgacttctgttgaaaccattcaaagctaaagacatggaccttcagcagtgtaagaagatattgtacagtatattttaaatctatgaaattcatagttctgatgcttttggtcacagagcatcattttatcacttctggaaaatgtttattccaaaacagctttaatggcccatatgtacacttcgtaatctcaaggttattattctgacaccagcttgctgctatgatttcagagcacataagtaaaggtgctttttaatgtgcagtctatttccagagcttacttagttgctgatttccagatttcgatgtttcttaagtctaggtgaatttatatatatatttttttgcttttcattttctaaagttagttattatttccattgaagcttgttttctttttttcttcccattttagctactgcagtgcttttgtttcacacttgatttgtaaaaattttatatatatgtatttaaaatgtgccattttattgctaagtgaagtatgtcctgttttctgctataattctttctcggtcagattgcaatgtcagcagttactgccacactcctgtcagcttaaacacaaatgttactgcttatcttttcttaaaaaaaaaaaaaacaaagtgtaggtattttgaagtactgggcttatatttcattggaatacatgtgtacagcaataagcaggtttccaaatccggtacttagtttgtgtacaaatgtaattatgttcattgtgtatatattatacaatgagcacatgtaatgtattaaaggctacttactattgtttaaatgcaaatgttcatatctcatttctttttttatcatgttaaataaatgttgatgttcttaaa

SEQ ID NO: 110589 - DNA, 3705 bp, Homo sapiens
ggcagccgcggcggcagcaggagaaggcggcggcggcggctagggatcagacatggcggcggatctgaacctggagtggatctccctgccccggtcctggacttacgggatcaccaggggcggccgagtcttcttcatcaacgaggaggccaagagcaccacctggctgcaccccgtcaccggcgaggcggtggtcaccggacaccggcggcagagcacagatttgcctactggctgggaagaagcatatacttttgaaggtgcaagatactatataaaccataatgaaaggaaagtgacctgcaaacatccagtcacaggacaaccatcacaggacaattgtatttttgtagtgaatgaacagactgttgcaaccatgacatctgaagaaaagaaggaacggccaataagtatgataaatgaagcttctaactataacgtgacttcagattatgcagtgcatccaatgagccctgtaggcagaacttcacgagcttcaaaaaaagttcataattttggaaagaggtcaaattcaattaaaaggaatcctaatgcaccggttgtcagacgaggttggctttataaacaggacagtactggcatgaaattgtggaagaaacgctggtttgtgctttctgacctttgcctcttttattatagagatgagaaagaagagggtatcctgggaagcatactgttacctagttttcagatagctttgcttacctctgaagatcacattaatcgcaaatatgcttttaaggcagcccatccaaacatgcggacctattatttctgcactgatacaggaaaggaaatggagttgtggatgaaagccatgttagatgctgccctagtacagacagaacctgtgaaaagagtggacaagattacatctgaaaatgcaccaactaaagaaaccaataacattcccaaccatagagtgctaattaaaccagagatccaaaacaatcaaaaaaacaaggaaatgagcaaaattgaagaaaaaaaggcattagaagctgaaaaatatggatttcagaaggatggtcaagatagacccttaacaaaaattaatagtgtaaagctgaattctctgccatctgaatatgagagtgggtcagcatgccctgctcagactgtgcactacagaccaatcaacttgagcagttcagagaacaaaatagtcaatgttagcctggcagatcttagaggtggaaatcgccccaatacagggcccttatacacagaggccgatcgagtcatacagagaacaaattcaatgcagcagttggaacagtggattaaaatccagaaggggaggggtcatgaagaagaaaccaggggagtaatttcttaccaaacattaccaagaaatatgccaagtcacagagcccagattatggcccgctaccctgaaggttatagaacactcccaagaaacagcaagacaaggcctgaaagtatctgcagtgtaaccccttccactcatgacaagacattaggacccggagcggaggagaaacggaggtccatgagagatgacacaatgtggcagctctacgaatggcagcagcgtcagttttataacaaacagagcaccctccctcgacacagtactttgagtagtcccaaaaccatggtaaatatttctgaccagacaatgcactctattcccacatcaccttcccacgggtcaatagctgcttatcagggatactcccctcaacgaacttacagatcggaagtgtcttcaccaattcagagaggagatgtgacaatagaccgcagacacagggcccatcaccctaagcatgtctatgtgcctgacagaaggtcagtgccagctggcctgactttacagtctgttagtccccagagcctccaagggaaaacgtggggtagagaaaaggtggcgacggcgactggagcagcagaggctgtagcatcggatacccacctcccacgaaccggttcctcttccccctccttgctgtgtgtttgatgtgttgaagcaggagggagaacgccgcgagcagcgccgtgagcaacactaccatcgtccccagcactgcggatccgggccctagcggcgggcccagtagcggaggtggtggcggcggtggaggcggcggcatcgaggtaataggtgactgatctccccgggcgctagctctgagcagatgcggactctcttcggtttcctaggcaagatcgacgaaccacacctcttcccgccggataattcacctttgccaatcgcaatctcgttaaattccatgatccagactcagcagttgtcgcaccatgtctgacaaacactgtattccttgacagagctttgataacgtaccatatgcagaaggagttattcctgataaggctaaggcttgtctctgttggcaccagctaatgcaatggcaggtcttctgcttggtgttgggctcctgcctactcctaacccacttactcagactggcgctgttccaccggctgctttgggggctcctactcttgttcctgcccttgctgcgcttgggcttcctggagcaaacttgaactcaatctgttgccacagatagttgctgaagcttatgagcactgttggtcccaagttgaagcatgtagctgctggtcttgtttcaccaagtctgaaatcggatacctctagtaaagaaatagagaaaggggccccacatggtggctcaggccagtaatcccagagctttgggaggctgaggagggtggatcacttgaggtcaggagttcgagaccaacctgaccaacatggtgaaaccttgtctctactaaaaattcaaaattagccgggcatggtggcgcatgcctgtaatcccaaatacttaggaggctgaggcaggagaatcgcctgaatcctggaggcggaggttgcagtgagccgagattgtgccattgcactccagcctgggcaacgagcacaaaactcttggctcaaaaaaaaatagaggaagctatgaaaagagtacaagaagcacactgcctaatttcggctgctatagaaccagagaaagaaaaaagaaggcattcaagatcacattctaggaggaggaggactctcatcttctagacacagtcaaggagcagatcaagagagtgattacattgtcagtctaggagtcgttgatgattcaaaagcccaagacagagaagatctcattccagagagagaggcagaaggtcaaggagcacatcaaaaacgagagacagaaagaaagaagacaaaagaaacattcaaaaacacccccagaaagttacagcacggctagacattatagaagtacaaacagagagacaacaacgaagaagcaggagtggaacaagatctcctaaaaagtctcggtgtcctaaaagaaaattgtctctctcaccatcccctgggaaacataaaaagaagaagaaagataaagagagaaataggtatgaaagagaacgatcaacaagcaagaagaagagtaaagatagggaaaaggaccaggaaagaaaatcagagagtgatacagatgtaaaagttacacgggtttatgatgaagaggaacaagggtatgacagtgagagagaggaaaaaaagagaagaaagcaatagaagcagattcccctaaaacaaagaaacgttctgtggaaaagggaactggtgattcactaggagaacccatagtgaatgggaat

SEQ ID NO: 110590 - DNA, 3820 bp, Homo sapiens
  misc_feature (3771)..(3771): n is a, c, g, or t
ggcagccgcggcggcagcaggagaaggcggcggcggcggctagggatcagacatggcggcggatctgaacctggagtggatctccctgccccggtcctggacttacgggatcaccaggggcggccgagtcttcttcatcaacgaggaggccaagagcaccacctggctgcaccccgtcaccggcgaggcggtggtcaccggacaccggcggcagagcacagatttgcctactggctgggaagaagcatatacttttgaaggtgcaagatactatataaaccataatgaaaggaaagtgacctgcaaacatccagtcacaggacaaccatcacaggacaattgtatttttgtagtgaatgaacagactgttgcaaccatgacatctgaagaaaagaaggaacggccaataagtatgataaatgaagcttctaactataacgtgacttcagattatgcagtgcatccaatgagccctgtaggcagaacttcacgagcttcaaaaaaagttcataattttggaaagaggtcaaattcaattaaaaggaatcctaatgcaccggttgtcagacgaggttggctttataaacaggacagtactggcatgaaattgtggaagaaacgctggtttgtgctttctgacctttgcctcttttattatagagatgagaaagaagagggtatcctgggaagcatactgttacctagttttcagatagctttgcttacctctgaagatcacattaatcgcaaatatgcttttaaggcagcccatccaaacatgcggacctattatttctgcactgatacaggaaaggaaatggagttgtggatgaaagccatgttagatgctgccctagtacagacagaacctgtgaaaagagtggacaagattacatctgaaaatgcaccaactaaagaaaccaataacattcccaaccatagagtgctaattaaaccagagatccaaaacaatcaaaaaaacaaggaaatgagcaaaattgaagaaaaaaaggcattagaagctgaaaaatatggatttcagaaggatggtcaagatagacccttaacaaaaattaatagtgtaaagctgaattctctgccatctgaatatgagagtgggtcagcatgccctgctcagactgtgcactacagaccaatcaacttgagcagttcagagaacaaaatagtcaatgttagcctggcagatcttagaggtggaaatcgccccaatacagggcccttatacacagaggccgatcgagtcatacagagaacaaattcaatgcagcagttggaacagtggattaaaatccagaaggggaggggtcatgaagaagaaaccaggggagtaatttcttaccaaacattaccaagaaatatgccaagtcacagagcccagattatggcccgctaccctgaaggttatagaacactcccaagaaacagcaagacaaggcctgaaagtatctgcagtgtaaccccttccactcatgacaagacattaggacccggagcggaggagaaacggaggtccatgagagatgacacaatgtggcagctctacgaatggcagcagcgtcagttttataacaaacagagcaccctccctcgacacagtactttgagtagtcccaaaaccatggtaaatatttctgaccagacaatgcactctattcccacatcaccttcccacgggtcaatagctgcttatcagggatactcccctcaacgaacttacagatcggaagtgtcttcaccaattcagagaggagatgtgacaatagaccgcagacacagggcccatcaccctaagcatgtctatgtgcctgacagaaggtcagtgccagctggcctgactttacagtctgttagtccccagagcctccaagggaaaacgctgtcacaagatgaaggtagaggcacattatacaaatacagacctgaagaagtagatattgatgccaagttaagccgattatgtgaacaagataaagtggtgcatgctctggaagagaaacttcagcaactccacaaggagaaatacacgcttgagcaagctttgctatcagccagccaagagatagaaatgcatgcagataacccagcagccattcagacagtggtgttacaaagggatgatttacaaaatggactgcttagtacgtgtcgagaactttctcgagccactgccgaattggaacgagcatggagagaatatgataagttagaatacgatgtaactgttaccaggaaccagatgcaagagcagctggatcaccttggtgaagttcagacggaatcagcaggaattcagcgtgcacagattcagaaagaactttggcgaattcaggatgtcatggaagggctgagtaaacataagcagcaaagaggtactacagaaataggtatgataggatcaaagcctttctcaacagttaagtacaaaaatgagggtccagattatagactctacaagagtgaaccagagttaacaacagtggcagaagttgatgaatctaatggagaagaaaaatcagaacctgtttcagagatagaaacttcagttgttaaaggttcccactttcctgttggagtagtccctccaagagcaaaatcaccaacacccgaatcttcgacaatagcttcctatgtaaccttgaggaaaactaagaagatgatggatctaagaacggaaagaccaagaagtgcagtggaacagctctgtttggctgaaagtactcgaccaaggatgactgtggaagagcaaatggaaagaataagaagacatcaacaagcgtgcctgagggagaagaaaaaagggttaaatgttatcggtgcttcagaccagtcacccttacaaagcccttcaaatttaagggataatccatttaggactactcagactcgaaggagggatgataaggaactggacactgccattagagaaaatgatgtaaagccagaccatgaaactcctgcaacagaaattgttcaactaaaagaaaccgaaccccaaaatgtggacttcagcaaagagttaaaaaaaactgaaaacatttcatatgaaatgctttttgaacctgagccaaatggagtaaattctgtggaaatgatggataaagaaagaaacaaagacaaaatgcctgaggatgttacattcagccctcaagatgaaacacagaccgcaaatcataaaccagaagagcatcctgaagaaaatacaaagaacagtgttgacgaacaggaagaaactgttatttcttacgaatcaactcctgaggtttctagaggaaatcaaacaatggcagtgaaaagtctgtccccatctcctgagtcctcggcatcgccagttccatccactcagccgcagctcacagaaggatcacatttcatgtgtgtgtagtcttagaagaactatactgacttctgttgaaaccattcaaagctaaagacatggaccttcagcagtgtaagaagatattgtacagtatattttaaatctatgaaattcatagttctgatgcttttggtcacagagcatcattttatcacttctggaaaatgtttattccaaaacagctttaatggcccatatgtacacttcgtaatctcaaggttattattctgacaccagcttgctgctatgatttcagagcacataagtaaaggtgctttttaatgtgcagtctatttccagagcttacttagttgctgatttccagatttcgatgtttcttaagtctaggtgaatttatatatatattcacctanacttaagaaacaaagacaaaatgcctgaggatgttacattcagccctca

SEQ ID NO: 110591 - DNA, 3059 bp, Homo sapiens
ggcagccgcggcggcagcaggagaaggcggcggcggcggctagggatcagacatggcggcggatctgaacctggagtggatctccctgccccggtcctggacttacgggatcaccaggggcggccgagtcttcttcatcaacgaggaggccaagagcaccacctggctgcaccccgtcaccggcgaggcggtggtcaccggacaccggcggcagagcacagatttgcctactggctgggaagaagcatatacttttgaaggtgcaagatactatataaaccataatgaaaggaaagtgacctgcaaacatccagtcacaggacaaccatcacaggacaattgtatttttgtagtgaatgaacagactgttgcaaccatgacatctgaagaaaagaaggaacggccaataagtatgataaatgaagcttctaactataacgtgacttcagattatgcagtgcatccaatgagccctgtaggcagaacttcacgagcttcaaaaaaagttcataattttggaaagaggtcaaattcaattaaaaggaatcctaatgcaccggttgtcagacgaggttggctttataaacaggacagtactggcatgaaattgtggaagaaacgctggtttgtgctttctgacctttgcctcttttattatagagatgagaaagaagagggtatcctgggaagcatactgttacctagttttcagatagctttgcttacctctgaagatcacattaatcgcaaatatgcttttaaggcagcccatccaaacatgcggacctattatttctgcactgatacaggaaaggaaatggagttgtggatgaaagccatgttagatgctgccctagtacagacagaacctgtgaaaagagtggacaagattacatctgaaaatgcaccaactaaagaaaccaataacattcccaaccatagagtgctaattaaaccagagatccaaaacaatcaaaaaaacaaggaaatgagcaaaattgaagaaaaaaaggcattagaagctgaaaaatatggatttcagaaggatggtcaagatagacccttaacaaaaattaatagtgtaaagctgaattctctgccatctgaatatgagagtgggtcagcatgccctgctcagactgtgcactacagaccaatcaacttgagcagttcagagaacaaaatagtcaatgttagcctggcagatcttagaggtggaaatcgccccaatacagggcccttatacacagaggccgatcgagtcatacagagaacaaattcaatgcagcagttggaacagtggattaaaatccagaaggggaggggtcatgaagaagaaaccaggggagtaatttcttaccaaacattaccaagaaatatgccaagtcacagagcccagattatggcccgctaccctgaaggttatagaacactcccaagaaacagcaagacaaggcctgaaagtatctgcagtgtaaccccttccactcatgacaagacattaggacccggagcggaggagaaacggaggtccatgagagatgacacaatgtggcagctctacgaatggcagcagcgtcagttttataacaaacagagcaccctccctcgacacagtactttgagtagtcccaaaaccatggtaaatatttctgaccagacaatgcactctattcccacatcaccttcccacgggtcaatagctgcttatcagggatactcccctcaacgaacttacagatcggaagtgtcttcaccaattcagagaggagatgtgacaatagaccgcagacacagggcccatcaccctaagcatgtctatgtgcctgacagaaggtcagtgccagctggcctgactttacagtctgttagtccccagagcctccaagggaaaacgtggggtagagaaaaggtggcgacggcgactggagcagcagaggctgtagcatcggatacccacctcccacgaaccggttcctcttccccctccttgctgtgtgtttgatgtgttgaagcaggagggagaacgccgcgagcagcgccgtgagcaacactaccatcgtccccagcactgcggatccgggccctagcggcgggcccagtagcggaggtggtggcggcggtggaggcggcggcatcgaggtaataggtgactgatctccccgggcgctagctctgagcagatgcggactctcttcggtttcctaggcaagatcgacgaaccacacctcttcccgccggataattcacctttgccaatcgcaatctcgttaaattccatgatccagactcagcagttgtcgcaccatgtctgacaaacactgtattccttgacagagctttgataacgtaccatatgcagaaggagttattcctgataaggctaaggcttgtctctgttggcaccagctaatgcaatggcaggtcttctgcttggtgttgggctcctgcctactcctaacccacttactcagactggcgctgttccaccggctgctttgggggctcctactcttgttcctgcccttgctgcgcttgggcttcctggagcaaacttgaactcaatctgttgccacagatagttgctgaagcttatgagcactgttggtcccaagttgaagcatgtagctgctggtcttgtttcaccaagtctgaaatcggatacctctagtaaagaaatagagaaaggggccccacatggtggctcaggccagtaatcccagagctttgggaggctgaggagggtggatcacttgaggtcaggagttcgagaccaacctgaccaacatggtgaaaccttgtctctactaaaaattcaaaattagccgggcatggtggcgcatgcctgtaatcccaaatacttaggaggctgaggcaggagaatcgcctgaatcctggaggcggaggttgcagtgagccgagattgtgccattgcactccagccttgggtgacagagcgagactgttcaaaaaacactctgatactccaactgttcaaagttcagcgaactccagtaataacgtggtgggctgagtattagatactggtttaaatcctc

SEQ ID NO: 110592 - DNA, 1963 bp, Homo sapiens
ggcagccgcggcggcagcaggagaaggcggcggcggcggctagggatcagacatggcggcggatctgaacctggagtggatctccctgccccggtcctggacttacgggatcaccaggggcggccgagtcttcttcatcaacgaggaggccaagagcaccacctggctgcaccccgtcaccggcgaggcggtggtcaccggacaccggcggcagagcacagatttgcctactggctgggaagaagcatatacttttgaaggtgcaagatactatataaactgaatagatttccttttcattcttcctgggaatagaagatgtaatggaagttccagtatctgtatgcaggcctatgactagcttcacttcttggtgactaatactagttgacaaaacagcatattctaaactgattgtcttcgttatccagtagctttcctattctccataacaaatgttccaaatctttgattactcacctcagaatgcttgtctcactcctcttttcctcattcctagtagatcataccttggagaagaaagtagaaactatcaggcctgaacttcattagctttttcttcctcttcaatccaaatctgtctgtatcttcattcatttttcttaaccctttccttgcttgctatttctgctttccaaaaccaaggaaggaattttgacagaggtacccaaggaattcactgggggaaaatgaatgattcaataaatgatgttatgataattagatagatagctatatgtaagcataaaaaatttttaaaaccttaggcccttattatcatatcatgcacaaaaattaagtggattattgatttaaatgtaaaaacaaaaagtataaaacttttagaaaaaagagattatttgtgacattgggtctggcaaagatttcttagatgcgattaaagatttacaaaagaaaaaattgataaattagacttcatcaaaatttagaaattttgctttatctgtgtaggatactgaagagaatgaaaagacaagtcacagactgggagaaagtacaggcaaatcacatatttgtcaaataactcatatccagaatttttaaagaacttttacaactcaataataacaagacaaacagctcaattttttaaatgagggaaaaatttaaatatatttcacatgagaatatactcaaatagccagtgagcacatgaaaagatgttcagcatcattagacattagcaaattgcaaattaaaaccacactgaggaacccactaggaatggctataatcaaagacgatcagtatcaagtattgcggagaatgtggagaaactcaaactctgttacactagtaatagaaatataaaatgttagaaccactttggaaagagattggcagtttctggaaaaaattaattgtaaatttgaccaagcaattttactacgtaagtatgttaagaatgaaaacgtgtgcacacaaagatctgtactaaaatgttgatagcattattcataacagcctaacagtgcaaatgtctgtcaactactgtgaatggagagacaaaatgtgtttattaatacaacaaaactacccagcaataaaaagaaataattgactgataaatggtatacgatgactgaactttaaaaccttgatgctgcctaaaagagccagacacagactacacattgtataattccatttttatgaatttcccagaaaggcaaattatagagacaaaacaaatcagtggttgcctagggctggtggtggacgtggagattgactgtaaatgggacatgagggaatttttttgtggtgatagaaatgttataaaactagatgtggtaatagttgcacaactctgtaaattcactaaaagtcactgaactgtacacttaaccataggtgggtttaatgaaatgtgaattacactgcaataaaactaaataaaagctgagttagtaccacttgc

SEQ ID NO: 110593 - DNA, 375 bp, Homo sapiens
gcatatgggttggttccaagtctttaccattgtgaatagtgctgctataaccatacatggagcagatggttcgcaaagcaagatggacctctgagcaagatgagctccaagcttgatggagctcagagcagatggagctccaggtgagatggagctccgattaatatgaagctcggagcagatgtttctgagtatgatggagcaccaagcctgtggtctcagagcaagatggagctccgagcagatggtactcagagccagatggagctaggagtgactggggctctgagcaaggtggagctcagaacagatggtgctcagagcaagatggagcttggagtgattggagctccaagcaagatggagcttggagca

SEQ ID NO: 110594 - DNA, 276 bp, Homo sapiens
aaaaacaatccatgttcacaatccatttttaaaaacattctgattaattgccaacatttaaaaatccaggagattttatataaaggtctggatttctggttcatcttgaaaattggacagtcaggtcataccaagtccacatttcacacagtgacaaagattggagctgagcggctccctggcccgcctcactcattccatttcccccctgatccttggaagcatgtgggtttccaatgcctggagctagactgagcacccacaggctgcagcagt

SEQ ID NO: 110595 - DNA, 271 bp, Homo sapiens
tggaagtctgtgccatcagggactctcttactgtttattagatacttgacttacatgatttcatgtagtccctcacaagaacccagaaggtagctactgtgtccccattgtagggataaaaggaacaaggcacatggaagtcatggaacttgatgcagcagcagggttagggtttgctgattctctgactccagggcctgtgccctgaatcgcagtaatggcttcattccttctgtcatctttgtatccttagtaccttatacactgcctc

SEQ ID NO: 110596 - DNA, 787 bp, Homo sapiens
aagacagaagggcatttggcagagttagtcataaggaagtctgcatggtatactttaccaaaagcagctcacatttcattaagccctgatgttttagtcactttaaagaatgaattaacaatagtccaatccaaaagaactagaaaggcatcagacacattgaaagcacaggtattaccaacattaacctattaatttcaaatcacttttttttattttaaagcagtctgtttttatgtgtacagttgttttcttatagaatcactttctctgtgtacagtaagtagctaaatgtgtcagtttactagttctatttcataggatgagagacttttaaagctggaagcatctgtagaacttagctctttcagccctttccatttataaatgaggggactgaggcccaagccattcagtgagttagagagagagccagccctcaaatgtttagattcttcacccgtgagccagcatttttatttctttctactatattagctactagtgtaaataatgtgcctgccttggttttaaattttgtttttcagatattggaagaggtgcctggagaaatggatgctagaagaaaacactggaaggagaatatgtttactcctttttttagtgcacaagatgttctagaagagacttctgagcctgaatcttcttctgaacaaacgactgcagatagcagcaagggaatggaagaaatttataatttgtccagtagaaagtttcaggaagaaagtaaatttaagaggaaaaaatatattttccaactaaatga

SEQ ID NO: 110597 - DNA, 212 bp, Homo sapiens
ggacgagaggtgggaggggctccacgacgccaatcacaataagcagggagccagtcagattaggaaggaagcacgagaccagagactagtgtcatcaccggtcacggcaggacaagcgccccagaggtcggaaaatcctgggacaacgcgaaagcggtggtcgccccacactctgcggagaaagtggtttcgcgcacgcgcgccacgcccat

SEQ ID NO: 110598 - DNA, 306 bp, Homo sapiens
  misc_feature (142)..(142): n is a, c, g, or t
gtcagcacattaaaacatgcctgagggctctggagaatgtcccagtggtcccaggccctctggaaaaacactctctggaacagttgcaggaggtgagaccaagaacttgcctctgaagccccttggttggaggaggacacanggctcacaagaatggatcagggagagcccacggtgaacccaattctggattcattaaaagctaatcatgatgatgatgatgttaacagctacagtttattgagtatattatttgccaagcacttaacagtcatttattcaataaagatcacttcacattgtctt

SEQ ID NO: 110599 - DNA, 132 bp, Homo sapiens
tggccaagatccaaaagctcataaccagagagccaggatgtgaatccaggctggcctggctcctgagccaaggctcttacccattgcactacatccacttattattttttttttaagatggagtttcgctct

SEQ ID NO: 110600 - DNA, 745 bp, Homo sapiens
aacttatggctgtttcatagttgaatgattccatatagtactttaattccattactttggtctccattacataaatagtttaacttggagggtgcatcaggaagcaacactgcttaaagctaggcattctaatggaagctttattgacttttctctctctttttttcaaatgtgccatagtgggcttttggttacaccttccttaaacatttaacagagtaaaattattgagtctgtgctatatggagcagaaatctgggccctcaattgaccatttgtctgtgattaagagcaaattcagtttcttcctgaggagaaccttagccaggtcttaactacccctcggctcatcatggtgtggcagtatgatggctcttctggttaggctttttagcatgcagaaatatttctcctaaccctggtggatcctctagcagtttatacttgaatttgtactctcaatcatccaaacagaatggctatactccagatatttaccagaggtgttacacactttcacatttattctgctaactgtgatgtttagtcttactgcttccatcctttttttttataatctttctgtgacagatttatttcctatgggaaccaagtctgtgagttcacacccacataccagattttgcttcgtgattgtcagaggctagaactcatccatcttgtttaatatgtattttttgttgactgctctttattatagtgatttatttttctcttttctaac

SEQ ID NO: 110601 - DNA, 429 bp, Homo sapiens
  misc_feature (19)..(19): n is a, c, g, or t
  misc_feature (22)..(22): n is a, c, g, or t
  misc_feature (24)..(24): n is a, c, g, or t
cgcgggtgctctagagganctnanactgggtcgagttcatgatctcccaacatagggcaatattcagccagaaaagaggagaccagagcaaacagctcctcctttaacagctcatgtccaacaacagaagggtccagggccatcaaataagaatggtgactctgtggagggacacatgggaggaagcacaagaggaggatatggagggtgaaaatagatgtacgtggactgtgcagagaacagctttagaatgaggaaattgtcaggatctttttaatttctctaaagtatctaactaaaaaaaatattttaggccaggtgtggtggctcacacccgtaatcccagcactttgggaggctgaggtgggtggatcacttgaggccaggagttcgagaccagcctggccaacgtggtgaaacccggtctct

SEQ ID NO: 110602 - DNA, 332 bp, Homo sapiens
tgggaaggaaaaaaaattctcaatgacgtgtgggattgatttcttcctcttataatgaattctgaatctgacagatcttgttttttgtttgtttgttttgttttgttttgttttcttgagatggagtctcgctctgtcgcccaggctggagtgcagtggcgcaacctcggctcgttggaagctccgcctcccaggttcaagcaattctccacctcagcctccctactggctgggttacaggcacatgccaccatgcctggcgcggtggcaggcgctgggagtcccagctactcgagaggctgaggcaggagaatggcgtgaacctgggaggt

SEQ ID NO: 110603 - DNA, 579 bp, Homo sapiens
tctgctgccaagtcttactaacgcaacttggaaaattgcaccacagcttttaatgaggattctgaggtaacagccatttcatcagagaagactgttctttccttttaggggaataataacacctactgtttctatagcaccatccttccaagaagtttaacacatcacatttcatttatctgaacagcggccctgcaagtcaaactggtaactagcattgttactccttgtacactcatattgaaattgaggtcattaaatgtgaactaattttctcaaaatcttaacaccttctgacatggttaaagagccatgatccgcctatgttctaggtgatcagatagcccagaagtctctttccgctctttagctgtcatctcctgtgaatgcctgtaaggaaggccctttctgaaaagtcagggaaaagtcataaaagtgggagaactgagcttgtgcctcttctggagtcctgtggttctctcccttcctggccagtttgcctcccatctttatggcttttccctacctctcaatccaaacatccctccactcttcctgaccaacaggattttttctctc

SEQ ID NO: 110604 - DNA, 372 bp, Homo sapiens
gggctcaagcaattctccagcttcagcctcctgagtagctgggactacaggtgcatgccaccacagccaattaatttttgtatttttagaagagacggggtttcaccatgttggccaggcttgtctcaaattcctgggctcaggtgatctgcccaccttggcctcccaaggtgctgggattaaaagtgtgagccaccacacccagcagggggattctgttgaagaggcagtgatatgtcagccaaggtcgctatatgcctcacctgtgccaggttgtaggtgtagcacagttacaggacactgttggaagtatgtcatgtgggccaaggtcgctgtgtgcctcacctgtgccaggttgcaggtgtagcacag

SEQ ID NO: 110605 - DNA, 591 bp, Homo sapiens
agacttctctcaactcaacaaaaacccacctcccattgccatgtattgctgtgctctccgctcctgcagcgtccccaccggccctgccaccaccttctgctcatttgataaaagctgccgctgtggagtctgcctacccagcacctgcccacatgagatcagcctccttcagcccatctgctgtgacacctgccccccaccctgctgcaagcctgatacctatgtgccaacttgctggctgctcaacaactgtcacccgactcccggactgagtgggatcaacctgaccacctatgttcagcctggctgtgagagtccctgtgagccccgctgttaaccagccgagtctgcacaggttccgtgaggtggctgcccaatgtcctctgcaccatctgggcttcagcactcactactgcctacatcaaggctaaggccatcccaatccccggggccaagtcttgatgaatcttcttaattatttgcacatttgggtaccattggagacctcccttctgtcttttaggctatttcatcactctttgagaaataaccattttgaccatttgttaataaactttattctggcttagc

SEQ ID NO: 110606 - DNA, 657 bp, Homo sapiens
cgcaggtgggaccatctagttgcaggaaaacaagctcagggctcccattgattctacattatggggtccccaagccccgggttgcagagcgatacctgtccctggcctgttaggaactggatcacatggcaggagcgtccccaccggccctgccaccaccttctgctcatttgataaaagctgccgctgtggagtctgcctacccagcacctgcccacatgagatcagcctccttcagcccatctgctgtgacacctgccccccaccctgctgcaagcctgatacctatgtgccaacttgctggctgctcaacaactgtcacccgactcccggactgagtgggatcaacctgaccacctatgttcagcctggctgtgagagtccctgtgagccccgctgttaaccagccgagtctgcacaggttccgtgaggtggctgcccaatgtcctctgcaccatctgggcttcagcactcactactgcctacatcaaggctaaggccatcccaatccccggggccaagtcttgatgaatcttcttaattatttgcacatttgggtaccattggagacctcccttctgtcttttaggctatttcatcactctttgagaaataaccattttgaccatttgttaataaactttattctggcttagc

SEQ ID NO: 110607 - DNA, 232 bp, Homo sapiens
ttttgcatagactagcaccaagggttacagaaccaacacatccctattagttatgtgttctgataaacatttttttcatgtatcttggagtgtatattttataaatattatatggcattgattatttatgtgaaactaaagctaggataacagattgtacattaaaacagaaacttgaggattttcattgaccattggttttgaaataataaaaggaaacttgatcatttcc

SEQ ID NO: 110608 - DNA, 344 bp, Homo sapiens
cactgtgttgtgacagtctgtgtctaaggattgattcttgtaacattgagatgttaagggcaagtccatatctaattccatgcccctagcacaacagaacctttatccctgggcccccaggaaaggcctagtggactgattgtgggagacagaagtccatccaggtttctggctggcagatccctgagtggatacaggtggtggggcctggggctgccagtaggagaaacaaagcttgaggatccagatcagagctgaggatggatcctccaaggtcagtccccgagtctgggccaaagccacttgttacatctcccatcttctggcctcattttacctcctca

SEQ ID NO: 110609 - DNA, 2013 bp, Homo sapiens
  misc_feature (918)..(918): n is a, c, g, or t
  misc_feature (987)..(987): n is a, c, g, or t
  misc_feature (995)..(995): n is a, c, g, or t
  misc_feature (1002)..(1002): n is a, c, g, or t
  misc_feature (1235)..(1235): n is a, c, g, or t
  misc_feature (1263)..(1263): n is a, c, g, or t
ctgcacagctgagtcatgagctcggcacagcatgtgtgggagtgaggtgtgcccatcagctctgccagtggcacgtgccccttagggacattcaggaagacgcttcaccgagcatttggcatgagtgtggagaggacctgtgcacagaacagcttcaggaagacaaaatgccacctctaggaaacatcttggttttaatcttttgtggggagtggtggccccacagttttgtagaagcttgagggagtggagggaatctagcaaaatggaaatggaataaacccatgatcagactcaagtcaacccagagggatgcagagcaaaggaaataagaaccaagctgcagcgtctccccagaaagccctggcagccctgctggtgggtagggggtgggtctggtcatcggcacaggtgacctggctattttatcagccagggaacagtaaataacagcagccagtgtctacgtaaccctgacagctgatcaggcatcttcacaggtcttttcctcttttcttaactttccttagggtcatgtgaggtaggaaggagagagctgagttctctttctgtagaatatcctcatggtcgagcggctctgaccaggaagcagcgcctggtctgtgaaatggctgcatctggaatataggtgccgcctcctctcctagaaagaccgcaaaggagctttccatcatgtccatttgatgatgaaaagaaaccaggggagaggaaccagtgtggctaaataaatgccacagaactctccttgggcatcccacgcagcatggcacatttattccctaggggccctgggcagtgaagggttagggtccagttttatctacaaggagattgaggctaagcctaggcaggtgacccctgcgggtcttaaccagccaagtgcctccatggggtctnctgtgcctcctggctgtggcagggagtccttgaaccagcagcccattgtggttaggaacagaggccgtnctggagtncaaatgncctaccaaagaggtgcctcgtcccacggtggccctggaggactgctctcggaggaacatccaaaactgagccggacctgcactcagagtggacgtggcagtgctgaggcacaccgacacccacagccccatgctcacgcgtggcctggtgaaaacctaggaagtccatgctcttgcgacgtgttcagtgcttcttcgccctggaaagttccaatgttgaaatgtggctgcacncagtgctgcctgtggatggaattatganctgtgaaggccagcttcattctccctacatggtcgcatctttcagtgcacttgggggtgtgctgggccccgaccacccctgccgaagtgagccatccccgcctggactctgacacctctgttgtccctactccttaagaggcccaaggcctcatatcactcgttatccttcccatcaatgtcttttctccctggttgattacacattcggtgagaatgcaattttgcttacgatttccttggatcctcccatatagctaatatgtcatttaattcataggaatccaataaacacatatttattattaaagactccactgactctgtcatttcagatggttcaagatgcctttccctctccagattttttaggaaaaaccgaaacaaagaaaatgcatggaaaagatttatgtgtttggttgggggaggggaaattaaacttctcataatagtttttaaattaaattttgtgctcgtccaaatcctttccttctccaccccttcctctgatattcccttactcattaaagcccaggattttgatggtattcacagggaagctgatttactggaataaagaagttctttaagttttaaattttggaacgttcccagtgtgtctgaacctgggtttcagattttactggcattttgttggcaaagcagtctttggagcccttccttatttgagcgtgtttcctgacacctttggcggtatggtactgtgttttttagatttaaaaaaaaaaaa

SEQ ID NO: 110610 - DNA, 255 bp, Homo sapiens
tacaaacacatcttaagggagaccaggtcagttcaaagacctgccttgtgtttggaactgtcacagtgggtgggttgaataaaactccagggtaaagctatttagttgatccattgttttttctggaaagcagctttctccaaacttaggtttggagattgtctgctaatccccaaagcctggccctggctgttgaccttaagtgaaagagaaattggttagcaggagggttggcctaggtgacagacctgttaa

SEQ ID NO: 110611 - DNA, 1245 bp, Homo sapiens
gtgatcctagcctttaggaggccaaggcgggaggattgcttgagcccaggagtttaagaccagcctgggcaacagtgagatcccatctttacaaaaaattgaaaaatcatccaggcatacaccaccgcgcccagctaattttttatttttagtagagacagggtttcaccatggtggccaggctggtcttgaactcctggcctcaggtgatccacccgccttggcctcccaaagtgctgggattacaggcgtgagccactgcgcctggcctctctttacttttaaactcatttctagtttccaaatagtctccctaagtcctatctgcctaaatcttcctctgcaagtgtgatccctcagagcttgactgcagagcagtgcctcttaaccatccaactagaacagctctgagcaaaaacatttgtaggcatcattaatcttccctgcagtgtgcacacagaaagtcagatgcaccaaccatggaagaggatagtcaacacaaaagaccactggaaggtccacagcgtccgtcacaccacaccacagacatgcgccggcacacggccgcgcccaacccaccaagaacatcagcaccgatcacgcagtacagacacaccacacacgcacaccacgacgcaacatgggcgcctgccacaacgaacttcgacgataggcacccacaaaagagagccacatcacactcaaacatggccagaactcgagtacacaaaccacgacctggggtacggccacacctcacggaacgacacaagccggagcatgcacgcgagcgccacttgacgctgtaactcccccaccaaccataataacaccaaccaagacgagatcaagagatgactattacgcccacaacgaagatctataagaacccaaactaacaatacacaaatcacccagaccaaagacaactacgctgcaacatgactaacatcaaatcacacccacgaacacaacacccccacacatccacaagtacaacaatatattctaacacaatataaaaatctacaatcaatataataatcatatccaataacatgtctagacaaaaaaactacacaactaatataaccaacacaacacactccgaaaactgcacaaaccaaaaacatcccacacatatcaccaatcaataaactcaacaacatctgactcactcaaaagacgagcacataataccccaagctactcactaaacgacgagaacctcaccagaataacata

SEQ ID NO: 110612 - DNA, 441 bp, Homo sapiens
ggatggttcctgcagacccagtaacaggccgggtgctgcagatggccagaagagccctcagtcctgactacagccccatctgactgcctcacccttcaccatagtctgctcccagctacccagggattctcagagccctcctctggagaccagttccacattctggccacggggtgacaggaaaagggggttgtatgctgcagtgactctgcatctagggtcacttccagaaacaggcctggtcttgaggtcaggctccatcaaggctacccttttgcagctcagcaggccacgtccagcttctctggctccgaaacctgggctccaatcccagtccacaatttccagtggcctgaggccctcaggcccacccttctagagagagcccgaagccccaaagttgcccttcccttaaccagctacagcccaggtccgggaccc

SEQ ID NO: 110613 - DNA, 316 bp, Homo sapiens
attttataacatgctgctcgtcttcaaatgtttgctattgtaaataacagtgatatacatacacatacatatatgtccccccacccccagacagggtctcactctgtcagccaggctggagtgtggtggctcagtcatggctcattacagccttgacctcccagggtcaagtgatcctcccacctcaccctcccaggtagctgggactgtaggcacatgccaccatgccctgctcatttttgtagagatggggtctcactgtgttgcccaggctgatctcgaactcctgagctcaagcgatccacctgcctcagct

SEQ ID NO: 110614 - DNA, 475 bp, Homo sapiens
catcagtaagatcaccagggctatctgagttcccgttttccactcctcactctacgtggtctccatgcagtctctgactatggaccagccaccatttcctgagcatctcctcctgtggctctgggcaccttctcctgtggctgcactctttctgcttctgtgacttccagtgcccttcctccactcctactccttcagcattgaagttgctttatggcctggtgtgagaactgagttaccaggggccatctctccatgtccagtagctacctggatcatcaagaaggtgattactccccaaatcttcagttcccctttctcctgaggttacggtctagctatatcatattgtaccatgcccaaaataaagctgaaatcctttccatctattaatggaatcattctccagtttcccaaaataaaaaccttggtgtcttcttcatataaggtcatcaggaaaccttgatgcatttat

SEQ ID NO: 110615 - DNA, 360 bp, Homo sapiens
atgtagttcaatttttcttctaaaccctgtaactgcaatgtattttcactgatatttttaaagagttttcaaaggtacatttttttattgtggtaaaatatatattaaaaattgaccattttaaccatttttaagtgtacagttcagtggcattatgtatactcacactgttatgcaagtatcaaaaccacctccatctctagaacattttaacttttccatattcaaactgtgtaaccattacataataatcccatttccccttcctcctagcccctggtaacctctattctactttctgtctctaggaatttgactatactaggtacttactcggcacaatgcattaaagttttatcc

SEQ ID NO: 110616 - DNA, 729 bp, Homo sapiens
accatgttggccagggtgatctcgatctcttgacctcatgatccgcccacctcagcctcccaaagtgctgggattacaggcatgagccaacatgcccagcctcatcctctcctttttaatggtatatgttcttatgtcagaagtgtgttttatctaaggtcacagattattatcctcttgaggttttcctctgtctctctctttcctgtagatttctttcttcagttgatgtttgcttcttctagtttctcttcttcattatggagagtttccttaagaggctgttcattcttagttaaaagcaagacatatacaggtgcatatgcacacacacacaaaacaaagcaacaatgacaatgatggcaagaaacaatgtcagaagttctgtgatcatggatagggctcgtcaactgtagggttgcactgttgcatcataggttgttcaatcaaagccggtgtgttctttgaaatgtttccccaaggtcatgattagggggtaccccactttctgcctgcgagatttgcgcctggggcatataactgactgctaatgtctggggagcatgacaaataaaaaagttgggtttcttattgcaaactctataggctttcaaataagcacctatttcgcaacctgcagcctctcctagtttgctacagtgcctagtatcatcagtttcaaatctctctagccgatttcctccaaaaaagaaagactccgcttccagt

SEQ ID NO: 110617 - DNA, 174 bp, Homo sapiens
tccgttttgaattccagaaccacaggctgtacaactgccaattgcatctcaggtcctgaatgtccctctggtgcctcacagtgcataaatccacaacctgtcatcttctcctgcaaactgctccatcctctgtattcattatcatctccaatggcagccttatggattcaattc

SEQ ID NO: 110618 - DNA, 324 bp, Homo sapiens
ttgattattttatgtgaaagttagcttagtagaaaagttatactctgatcaattgaattctatgtatgccagacattgtttaaaacagaaattcatgagactgagaggtaggaggtgcaggctttggagtaggtttcctgtgttcaaatctcagttctactatattttagctgtgagacattagactagttattaactcttttaagcttgagtttccatatttgtaaagaggaataacagtagctacttctgatatcctgtgaggatttaatgagataatgcctgtgtgggtttaacatagtcagcatatggaaccatgtggaa

SEQ ID NO: 110619 - DNA, 452 bp, Homo sapiens
aagggtaagaaactctgctcgagtttattcattttaaccattttgtggtatttccgtacaaacattcccccttaaaaatgtgagaatgccatggcacgtgtatacctacgtaacaaacctacgcgttatgcacatgtaccccagaacttaaagtatgataataaaaaaaaatttgagaatgatcacttgttgaagagatcaggtaaagctttactgaaaagattaatatgctatgaaagaaaattttaattgaaaaagaagattaaaagatccattctccaaaaattattaaaattatcacaacactaaaatgtctacactcatttttataaaacaatgattagttttataataacttttgtaatacggttccattaaaatattataccgtgaaatggccaggcgcagtggctcatgcctgtaatcccagcactttgggaggccgaagcgga

SEQ ID NO: 110620 - DNA, 297 bp, Homo sapiens
ctttatctccagtaccattttgcttagtattcatggtgctcaagttgtcactgtggacatcagagcctataaatatatattgttgtggctccttcctgtacatctttccaagtcatacctgctattctccaaagtctgtgaatcccgacactaataacttggaaattgtttaaggtcctcttcagaaggtcagttagctcaaggcatcacatttttctcaggactcttaagaaatactccaaccacagaaaaaggcccttctttctggtatcaggagccattggccacaaacacaaa

SEQ ID NO: 110621 - DNA, 273 bp, Homo sapiens
atcccttccttttgagatttgactattaaatatatctctgtttagactctttctagggcagacttttatctccccttttacattaatactttatttgttgtaccccagaacttaaaaattaaaaaaaactttatttgtaaaattgttgaaacctgtttattcactgagaagactttactataaaattattcttaatctatatgaattcagttctattgtgttaccttcaaattgtatggatttcaaatggtggtaaaagttgtagacatattt

SEQ ID NO: 110622 - DNA, 547 bp, Homo sapiens
tgcggtcgcttacgcctgtaatctcagcactttgggaggccaagacgggtggatcacctgaggtcaggagttcgagaccagcctgaccaacaaggtgaaacccgttctccactaaaaatacaaaaactagctgggcatggtggcaggtgcctgtagtcccagctacttgggaggctgagacaggaggattacttgaaactgggaggcggaggttgcagtgagccaagattacgccactgcactccagcctgggtgatggagtgagactccatctcaaaaaaaaaaaaattaaaaaaagaacaagcaaagatataaaagcaaatgcaaacaaaatgctggggcaaaaatcttaatataaaatgatgcaaaatcacaacaaacctcactaaattagccaaagaagggcaatttattatgctaacggtataattcataatgcatcaaataatactgtagcaattttcagaatagaaaaattacagatactaggataaatatatcaaaacactaataagagattttaatttaccactttcagttcaagaaa

SEQ ID NO: 110623 - DNA, 329 bp, Homo sapiens
tggtctttattttaaccataattaaggggaacgtagaaaaatgattgcgtttatattggaacagaaatgatttcaaatttgaatgtagagtgttttaaaaaggaaaaagggattggtattagataagaggagaaagtatggctgtcttctcaccttaattatgtgaagagctagttaatggacagttgtaactcagtaaactgtcaagtgggagggcttaagttcatttgtctgatcttaatgaagtactttctttttgtaagatcattacacaatgatgtatacaaccagattagcatcttaaatagcttttcttaagagtggaagag

SEQ ID NO: 110624 - DNA, 770 bp, Homo sapiens
agagacataggtcaaaagtaaaggttttaagaaatataaatcttgttaacactaatttttaaaattgcatagaactttattagttgtgaacaaagaagatagcagagcaagaaaaattataagggaaaagaggtgcattacataacgataaagggatcaattctcaaaaaagacaacaatcttaaacatttattcacctaacaacagagcaaaaacacctaaaaatgatgcaaaagctgatggaactaaagggagaaatatacaaattcactattgcagttggagacttcaaacttcttttttagtaattcatagctcagcaggtagaaaatcagtgaatacagttgacttgaggaacactatcaatcaatatgatataattgacatttatataataaaatactacctacaaacagcataacatatgttcttcccaagcttctatagaacatacagcaagataggtcacattctgggccataaaacacacaggaacaaatgtagaacaataaaaattataggaaatatattatcaggtcacagtggaattaaactagaaatcgggaacagaaaagtagctagacaatcccaaatatttggagattgtcttaactggtttagtgtagctataaaagaatacatgaagctggataatttatgaagaaaagaggtttatttggctcacagttctataggctatacgagatgcatcatgccaccattttcctggagcccttcaggaagcttccactcatggcagaaggtgaagg

SEQ ID NO: 110625 - DNA, 376 bp, Homo sapiens
gagcttccttttaccctaggactgtttctaactgtatgacgggctgctagattccacagtgcctgatggttctcatgagctgtttggctcgtgaatggcagttcaaaggtaaacaaacaccttgtttggaaggctgctgctctggctaacgaagggtcaaaaaaatttatttttcctttatttccagtttagaacatttgggtgaagtatatttttgtaagcaaaattacatttctgagttctccaaaattcagattgtgattttatgacagtatagttgtttgcataagtttagtaagagtcttttagaacaaaacagttggagacactggttattttaccaagactttcactagaatagcatatttttaggtaa

SEQ ID NO: 110626 - DNA, 307 bp, Homo sapiens
cctgaggacccagtggaattgggggtggcgggctgagaaggcatggtcaggtgggcactcagcccaggctgctagcaggctcctagccttggaggacttcccatggggtcctgcctacagttgccctcatgagaacattctttgggtgtgagtcccaggccttttcttaagcccagtgttctcattctttccctggcacctgacaaagtgggttatctcacaatcctctccccgagttaagtgataattttaataactgcaggattttatgttggtaattggtccctgagaacagagatgttaattg

SEQ ID NO: 110627 - DNA, 268 bp, Homo sapiens
atgctatgcacatttaagtttgagaaatgctgagtcagaacaatacaagcactgtgtttttgaccccagatcactatccaacagaaccttctgcaatgatggagaccatctatttttttttgctgcctagtatgaagctactagctgttgagcaacttgataggtagctagtgaagctgaggaactggattcttatttctaaatctaaatttaaatagccacatggacctaatggctactatattggacaatgaaagagaagaaagag

SEQ ID NO: 110628 - DNA, 520 bp, Homo sapiens
tttgtatgccccctcactcctcatcattttatgcataaacatctctaaaaagatatgatcatctctaaaaagtaagacttctttataaaatgtaataacaacatcattatcacatctaaaaatgtaataatcctttaaaattatcaaatatccagttagttcaattttctctgtcacataatttttttaacaatttttttgttcaaactaggatccaaattgaaattggccaattggccaatatgtcttttaagtctcttttgaggctggctcatgcttgtaatccaagcactttgggaggctgaggcaggaggattacttgaggctagggaattcaagacgagcctgggcaacagagtgaaactccgtctctacaaaaaaaatttaaaaaactagccgggcatggtggcacatgcctgtagtcccagctactctggaggctgaggtgcgaggatggcttgagcctaggagttcgaagttgcagtgagctatgactggaccattgcactccattctgggt

SEQ ID NO: 110629 - DNA, 380 bp, Homo sapiens
ccttgaacttctgggctcaagtgatcctcctgcctcagtctcctgaggagctgggactacaggcatacgccaccatgcctggctaactttttctattttttgtagaggtagggtctcactatgttgatcaggctggtcttgaactcctgagttcaaatgatcctcccatctcagactcccaaaatgtgttggaattactggcacgagccaccatgcctggcctcttgcatattactaacaattctaaagacagtattaagcaatttgccgtcataattagctaagtaagttccaaaagagctactacaatggaattaccttactcaggaagttcacttctaaaacgatggcgtaactcaaataactaattgtattctgcc

SEQ ID NO: 110630 - DNA, 489 bp, Homo sapiens
tccagtagtgacaaatttaaaattgattgaactgatcattggatatactcgcagtgatagaatcttctccctgttctctttcgccattttaaaatactttttagtctgtcgtcttgatataacctttatgcaagtacttagaagaaagtggagatgcttaataatcatgtaaattaggcagaaaagatacatctttgataggagaaataactactagcaaaacatcttaataacaagtgaccagagatgtggcacatattttatgccaatggaattaatagtgaaacatgcagcaaccagctaattttttaaaaaatgagatgatcatagttaattctgtttcataagacacactaaggaaaaagatgttgtataggtggtttatgcaataaccatgcggttctttttgcaacatttttatatttgggaagaatagggcaaaatgtcaaatactcaatttcacagtagtctaaatggcatgcttcacag

SEQ ID NO: 110631 - DNA, 700 bp, Homo sapiens
caatctcttctgggctgtgtgcgagggcaggtggctctgctgtgtctagcggctctgtgtgtacgaggcatgcccaccaccatcggaatggaacatctgcgtggttccctctccccttctcctcctctcccaaccacacacaactcagtacacattctatgtggcagctggggttcaattcaagaagctgctggtctggagccaatttggtcctataacaaatgatatgggaaacatctggagatgtagcaggagagaaataagccctgcccctcacggcaggagcacacacatcacatgtggttgtcacacaaaaatactggcttcaggggtctccactggtcatcagaagaggcattagttccattcagcctctccttgcctcccatgtgactgcttgaggtgatcaaggccactctctaccctgctgctggtgacatctcactaaggcacaggccctgcttacagcctgcagcggttcccatcagccctgactaaatgccaagtggtctggctagcttgaaggtccaccacactgggacccctgtgtggcaggccctcccatcttctccccactggagagagtgtatcctccagccacgctgagctccctgggctagacactctctggactccagacacactgagctcttactgtccccagaatgcaccaggctgtcctgcccaacccccatgactc

SEQ ID NO: 110632 - DNA, 225 bp, Homo sapiens
gttgcactggagaatctaaactcttttggagatgtcccaaggcctaacctgcacctcttcacagcataggcaagaaaattctgtctgacctttctgccgggaggagggaatgtttaggtaaaaatgagaaacctatgaaatcagccaccaacatggctgtgtcactttggtgctcccacaacaacttgaagcatttttcatattaaacttaatagctgacctgtc

SEQ ID NO: 110633 - DNA, 406 bp, Homo sapiens
ggtcacagggacacggcagggagggcctggctcctctctcttcccacagtgcctcactggtggtgagcctgggattggattgtttggattcttctggagagtctcagctccaaatactctaacccttcaaatcagccgttttcaaacttctatatgcatgagaatcacttgagacactgattcaaaatgctgatttccaggtgttcctcattcataagcacaaagagtggcctacacatccccaggggatgcggctgtgggtggtcaccacactcaacatgccaccacaaaccatccaagagttagaaattccagtgtgctggcatcccagctggctctcccagattgcacttggtacccggaagcaacacagattcccgtgagatcaaacattggaaccctgtgg

SEQ ID NO: 110634 - DNA, 263 bp, Homo sapiens
gggtcatcagttgaggcaagatccacggtagatatgggtgtatattgcaaaacactagaaccagagtattatcaatggaaaggtctagacagtgaggcccactcatttgcctaattagaaacagttagaaactcctgcttaattagaaattcttgccctcagttttttcttgctgttgtttggttttttttaattattatttttgttttttgagacagagtcttactctgtcgcccaggctggagtgcagtggtgcaatgtca

SEQ ID NO: 110635 - DNA, 388 bp, Homo sapiens
ggaaattcccgggtcgactacaaccaataaattcgcgcccgcgtcgacgcacaaccagctgcatgttgtctcttgtcatgaaacttagcagctaccccatctcgagcaggcaaataacaccttaatacaaactgtcataggccaaggcaggtggatcacttgaggtcaggagtccgagaccagcctggtcaacatggtgaaaacctgtctctactaaaagtataaaaataagctgggcttggtggcacgtgcctgtaattccagctacttgggagactgaggcaggagaatcgcttgaatccagggggtggatattgcagtgagccaagatcatgccactgcactccagcctgggcgacaggatgagaccacgtatcaaaaagaaaaa

SEQ ID NO: 110636 - DNA, 455 bp, Homo sapiens
cagaccaggagtcctctgattcctactgctgtcttctgcagcctaccctccttccacaattacttatcaagggcctatgatgtgtcaggtgttcaccacacagtagtgaacctcagcacaaccagctgcatgttgtctcttgtcatgaaacttagcagctaccccatctcgagcaggcaaataacaccttaatacaaactgtcataggccaaggcaggtggatcacttgaggtcaggagtccgagaccagcctggtcaacatggtgaaaacctgtctctactaaaagtataaaaataagctgggcttggtggcacgtgcctgtaattccagctacttgggagactgaggcaggagaatcgcttgaatccagggggtggatattgcagtgagccaagatcatgccactgcactccagcctgggcgacaggatgagaccacgtatcaaaaagaaaaa

SEQ ID NO: 110637 - DNA, 1388 bp, Homo sapiens
cacaaaacttaagacttacctaggaaacccattcatattcccaccatgatgtaattataaccctacaattacttcaggtagctacacaatataccaggtaagaatcaatgcacagtataaagaacttatgttcttttctattctttcagttgaataagggccagttggtatgcagcccatgtatatgtgaatggagtaagataaaccccatgatctccttgcacagaattgcaaatgtcttttgccataccaagggccagactcagaacccttggagtcatgtggcagaatttccctcttacataaaccaatgcttgaaaatgctgcaaatgaccctctaatgatccctgaagatcaaaacaggggtaaatgactccctgcaaaacccaacccatgctgctggctgtgggatttttggtgtaagcctatctatgcactctatcagccagaatttggcatttagctcttagttaaatctagtaaaggacagtctattgtttaaagagaaggtgcatttgttcctcaatcaagcaagagcacctgtgttgtactgctttatatctcatgtatatttatagtaatgaaaagactttttaaattgtacacgtttcagtgcctttcttgtgttatgaaaggcaggtagatattatagccataggtaaaaatccatagttaaattgcacactgaccttaaatctctctgtgtatgcccttgtatcttgcatgttaaaagttggattattgggcatgtgtggcagcctgccctgctacatgctagacaagtgtgctttagtacatagccacaagttcttcattctttaaaatgttttgacagatcatctcataataaaaataattcaggaaaactatggggaaatagttacatttcacaaaagatattttaaactctttgtaaaacttagataatagagcctagcagttactttgtatctaattgatacattttatgttaatttaccaccatacattttattaatcaaaattgtatagcatgtgactcttttggctttcagagttctcaaaaatattattttgttgcatgtactgtatgtttagaggcaaccaattatatactcaatatggttttactgtgccttacacaaagagaaactctatacagaatgtatgtcatggggtggggtaacagagtctttactgcactgttaggtgatggcacacagagcatgtcccagaacatttctgtgcttaattacccaaccaaagagatctgaagtatgtatgtcgtactgtaatgggggtttatgcctggacaattaagtgttttatttgttttctgaaatgatgtgaacttatttttctaaacactatgctaaataaactttatatttatacataccttgcattga

SEQ ID NO: 110638 - DNA, 828 bp, Homo sapiens
aggtcccggctgagagcgccggctgccggctggggacctggtgagtgtgaagctgtaaccttctgctggggccggggccgaagtttttccgccagagcaaggaaggctgcccctggcagcaactgcactccttccttactcctgttgagattcattttatagtaggaaataggcatctaactaccatacaagttcagaccaatggaagaaaagagcagcaaaaattgaactgaatgaatcccaaaagcaagaaattaaagacgcctttaatttatttgatattgatgggtctggaaccatcgatgtaaaagaaggaaatgcttgatgaagctgatcatgatggagatggagaaataaacgaggaagatgttttgagagtgatgaaaaagactactcgttattaatagcgttgttttagtccttgtggaaaattaacaaatttgtatttgttatgcagttttataatttaatatctgaatgtattcattttcagtttttagtttatatgtacacattggcttcttgatgtctaatccatgtaagaagttacacatctctaccaatatgatgttaaatctacagcatcaagaaacaaaacataatgacttctttgagccattaatccaagaacagtattgattctagctgctcttttgagaaccttaggtcacaaagacttagaattttaaagtttgatgaagttggcttcacatccaaatgaatttggcaaacaaaacttatattttccttttgtgcaacccaaaaaaacctgatgaacatttgctttttagtcagttactcaaatacataaagtattaaatagaactg

SEQ ID NO: 110639 - DNA, 696 bp, Homo sapiens
aggtcccggctgagagcgccggctgccggctggggacctggcatctaactaccatacaagttcagaccaatggaagaaaagagcagcaaaaattgaactgaatgaatcccaaaagcaagaaattaaagacgcctttaatttatttgatattgatgggtctggaaccatcgatgtaaaagaaggaaatgcttgatgaagctgatcatgatggagatggagaaataaacgaggaagatgttttgagagtgatgaaaaagactactcgttattaatagcgttgttttagtccttgtggaaaattaacaaatttgtatttgttatgcagttttataatttaatatctgaatgtattcattttcagtttttagtttatatgtacacattggcttcttgatgtctaatccatgtaagaagttacacatctctaccaatatgatgttaaatctacagcatcaagaaacaaaacataatgacttctttgagccattaatccaagaacagtattgattctagctgctcttttgagaaccttaggtcacaaagacttagaattttaaagtttgatgaagttggcttcacatccaaatgaatttggcaaacaaaacttatattttccttttgtgcaacccaaaaaaacctgatgaacatttgctttttagtcagttactcaaatacataaagtattaaatagaactg

SEQ ID NO: 110640 - DNA, 567 bp, Homo sapiens
ctgcactccttccttactcctgttgagattcattttatagtaggaaataggtactttaatatagtttatcatcaattattctggttctgctaactattccagttatataatttatctttcacccatatgtgtgtgtattacaggcatctaactaccatacaagttcagaccaatggaagaaaagagcagcaaaaattgaactgaatgaatcccaaaagcaagaaattaaagacgcctttaatttatttgatattgatgggtctggaaccatcgatgtaaaagaaggttctgaaattatttctaattctaaatcattttaaaaaccatattatttgtggcaatctttaaggctttctttaaaagtagtcttctgaaagcttaatataaagtctcttcagtgcatatgcctgccctgcattagcaaaacgatatcttgttaagcattttaattgtgttttataaatgagtaggcaaaagcccagggtgtaacagtgatgtacatgatggcacagtaggactgaaacacaggcctgctgacctaattttctgtttatgctcagtccataa

SEQ ID NO: 110641 - DNA, 315 bp, Homo sapiens
caagcgattctcctgcctcagcctcctgagtagctgggactacaggcacgtgccaccatgcctggctaatttttgtattgttagtagagacggggtttcaccatgttggccgggatggtttcgatcccttgacctcatgatgttcccacctcggcctcccaaagtgctaggattacaggcatataggccaccgcgcttggctgaggaaaaaaatcttaaaactaacttatttcaaatctaacttcaacgtgtatctttttttttcttttgagacagagtctcactctgttgcccaggctggagtgcagtggcgcg

SEQ ID NO: 110642 - DNA, 572 bp, Homo sapiens
ggcaaagatttcatgtaagtgggaaaaaatgaggtatttgaagaaaaatgttcatctaggatttcaatccattaaaaagcacacaatcatggacacctacctacaagaggataagtgactgtctttcaatactgacatgttgtcttctgagacaggagctaatagaaatatatagcgcatgacatcctctttaacatgagctatgttgacacatatgaagttactgggtttattacttccaagagaggcagtgccattttcaaacaaaggatacattttaagcagagtgaattctggttggttctttatacagtgggttgatcttgtcacacaggcaaaaatggagcagttttgggcagatggttctagtgttacgcttgcttgttgccttactttgcaagaagaagttctctcatctttggtcaacgccctatgtctggcatgtcatgttaggcctcagcttttgaaattgatagggtctaattctggagctgatataagctgttaatacctacctcttagattgctatgagtactaaatggattaattcttgtaaaatgcttagaatctt

SEQ ID NO: 110643 - DNA, 325 bp, Homo sapiens
gtagctgggattacaggcatgtgccaccatgcctgactagtttttgtatttttagtagagacagggtttcatcatgttggccaggctggtcttgacctcctgacctcaggtgattcgcctgcctcaacctcccaaaatgctgggattacaggcatgaaccaccgctcctggctggccatttttaaataatgatctaattactgatccagaaacagccagtttagtaacatgcgtaattaacctgggacaatttcagcaggctttacaaaagtttagaactcaaagactccccacaccaggaactaaccagcaacccaaaatcagg

SEQ ID NO: 110644 - DNA, 192 bp, Homo sapiens
ggaaagacacccagaaagcgttgatttgctactttatgcacctctctttgaatttttacaatgatgttttactttttttattaatgagattcctaaggattttaaaaaataaatctattctacccatccttgccttcccgtcaaaaagaaactactggctgggcgtggtggctcatgcctgtaatcccagca

SEQ ID NO: 110645 - DNA, 230 bp, Homo sapiens
gcaggcggtttatcatgagacttcgcctctgtgatcataagaaccaattccccattgtgtggtttttgttttgttttgtttttttgatatggagtttcgctcttattgccctggctggagtgcaatgacacaatctaagctcactgcaacatctacctcctgggttcaagcgattctcctgcctcagtctcccgagtagctgggattacaggcatgtgccaccatgcctg

SEQ ID NO: 110646 - DNA, 240 bp, Homo sapiens
tcagagagataattgggccaggtctagtgggaacttgtatgccatcttaaggaattttccttttactttaaatgaaatgggccataatggacaaaattttaaagataggctcttaccctgtacttggcaagactgctctctccaccctaatctctacctagttcctgtctcaacaaggggccaatgtggcaggagcagagtgcatgagagagtgagtaggatataaggtcagagagataa

SEQ ID NO: 110647 - DNA, 400 bp, Homo sapiens
tcttaaggagggacataaatgtgagcacaaaaaaagatgcaggaaagtccttggaaagggaaacaggctcaaacgaagggctggggagaagtccaggagttagtttgtttctttccaaaacagggaagatgtactttcctgaaggcagaaaggaataaaatatggaaagaggcttatttattccaaatgtaggattataagccaaaagacaaaggcaaggggtattaatcaagtagacagacaagcaagcaatgttttttttactacaaatcatccagatattttagtaccatttattccaaaatttggttggctatggcaaagaaattttccaatacctcctcggtacttcagcatgtccttgtctctacatcagttcccttatccttactttcaatca

SEQ ID NO: 110648 - DNA, 155 bp, Homo sapiens
ccttgtaacaaatggagacactgcaatgtaagcagaggcccagtgacacaaagccaggtagatgctgctgtgtaaacagattactcaaaatgaccagctagctggcaaaatctcttactcacagcagggaatagagtaagacaagcttggagcca

SEQ ID NO: 110649 - DNA, 740 bp, Homo sapiens
ttaggaaaacgtgttctcatcacaaatcccctgagttatagtgtcaccaatgccaatgtaatatgagcctcttagattgaaaaaaccgaacagcttactggatgataaaggaagtagctatgctttcagtttattttccccatctttgaggctcctgagatgttctttatttaaatgaatgactaggaaagaagtttgatagcatattagtattcttttttagcaaaatttgaatccctgagccttgttgcaacatataaccacatttatttgcaggttttattgattatttctaacaaggactacagctgaatgacctcaggcatactggttttcacgttttctccttgggacttctccctcaaaatggcagcctctattgggcttgcccaggctctccagcctctctttaatcaaagcagttctagagcacctctgctttgaaaggactttcttgagaggaaaggtcttggggaatggtcacacaaaaagactgcatagaagagggttctcccaagtgttaggatacacaagaagccctaggttggattcaatagaatcaacctagtagctttagccaagatcagaatcccatgggccttgattttagagattttttttttctaaaatttatgtttgctcatagtgaaatgacagggataccaagtaggtctcatgttgtgtgtaattgtaatttattagtagtgtccagccacctaaaggagtataatgggaaggat

SEQ ID NO: 110650 - DNA, 281 bp, Homo sapiens
attccattctattgcattacactccaatccactctactccactccactccattccattgcattccattccattccactctactccactactctccaccccactccactccactccatcccattccatccaattcccccttcattcattaatgacttcagcacctggctctctacccttctttgccaactaaatccttggttgtttcaacatccaagaccagacccactggattataactttctcaatatctttgcttccaatattacccttccccacctca

SEQ ID NO: 110651 - DNA, 330 bp, Homo sapiens
aaaaaaatgaaaaggcaagccaaagactggagaaaatatttgaagtacacatatctgataaaggattatatctagaatttatagagaaattttatgacagtaagaaggtgaaaactgatatttactatatatttttaaaatatatttgcccgtgttcatacagtcatcccttggtatccatagcggattggttccaggactttccacagatactgaaattcatggaagcacacgtatatgatgtaaaacggtatatttgtatataatctatgcacatcatcttgtatacttacttatttacttattttgagatggagtctcgctctgtgc

SEQ ID NO: 110652 - DNA, 625 bp, Homo sapiens
ctcaccaccattagcacctgcatatgccacccaggggcctgcaaatcagcacacctggctccccattgccaccacagctgtgggggctgcatcctgcagagccacagggcagagcccaccccttgagccaatgtggcctggatacgagacacagggttgaaggagattattttggagctttaagatttaatgactgccctgctgggtttcaaacttgcatggggcctgtagcccctttgttttggccagtttgcctttttggattggtagtatttagtcaatgtttgtacccccattgtatcttggaagtaactaatttgtttttgattttacaggctcataggtggaagggactggccttgtctcagatgagactttggactgtggacttttgagttaatgccgaaatgagttaagacgtgagggactgttgagaagggatgattgtattttgcagtgtgagaaggatatgagatttgggaggggctggggcagaatggaatggtttggatttgtgtccccagccacatctcatgttaaattgtaggaggggtctggacagaggtgattggatcaagggggcggatttcccccttgctgttctcgtgatagtgactgagttctc

SEQ ID NO: 110653 - DNA, 625 bp, Homo sapiens
aagcaaggacaagcaaaactaatctatgattgtgataatattgataagtgattggcaatctatggtcagaatggtggttaccgctgagagtcaattattgacaggaaagggccaccagagaactttctgggataattaaaatgttttctactttcatctgagttgtggttacatgggtgtatacatatgagtattggagttcagctttatagctaagatctatactatatagctttgcatacattcattgagctttacagttaatatctacactttactatatataaattatacctcaataaaaaataattagcctgtgagattattcctcaggtatgtttatatagaattggtattggttgatcactggatcatatgtgcaatccacaagtgtgcctattttaccacatttatgccaacactcagcatcgttcagatttcttatcttgtggccaatataatggatgtaaagtggtattgtgttatcttcccccctttctagtatctgctgtccatttaggtttcccctttgttaattgcttgttcctattttgtctcatgtacttttcatagaggcttttttcccactaagatgcactagctaggggtaccatttctgtcttca

SEQ ID NO: 110654 - DNA, 491 bp, Homo sapiens
ctgggattacaggcattgagcctccgcacccagcccaaaatatcttattgcaccgtactgcaggtaaatgaaaccatggaaggtgaaactgcagattcaggggactactgtacccaatttctgtaagacaagaaccaacagaaagccagttttctgatttgtccctttatttagtaaccctatgccatgtaagagttgaaataactgagaggtgtgactttcttgcctagagtggaagaggacttgagtgggcttttcctccagttcatgtatttttaggaaagagtacctatggaatgtgaagacctggaaacggattgcataagagttatccaagcaaaaaaagaattatccaagcatatgtactccttagagattcctcgtgctccaaagtgaagacttccatactatgtcatgccaaatagctacttgtataagttttcctgactcataacacacttgttctttctattcttctgtttcaaagagga

SEQ ID NO: 110655 - DNA, 319 bp, Homo sapiens
attaattttagaacatttaggacattttcatcacacttccccccaaatccctactcattagcagtcactccacttcatatttatttaaaattcatttcacatataaaatatatatacatatatattttaattttttaaaaagtaattcttatgtgttcccatggagtggagtaggaaacctatcccaaacctctccccttcttgcaaaaaatattctatattcaagtttaggagaaaacagaatacttgctagccccactgtcctcaagaacctagcaatgcattaagctcacctcctctcctcttccaagaccaaaaa

SEQ ID NO: 110656 - DNA, 365 bp, Homo sapiens
attgaccttgtgaaaaagaaaagggcagaaaattgagctagaagttcttagtccaagatatttaaaggcatctaagaaattcttgtatttctgggctgacagggtaaccaacagtagagaaaagacactgggattggaaaaaatgaattgcatataaaagtaaactgttttattactcagcaaactgaaaacttataggtcaaatgtctgacattatccctagttcaataagtttacagttattgaagacttaatgtgctactgttctaaaccctggctgtataaaggagaaaaaggcatgaatcctgtcctctgagaaggaagggcaaaggcctgctggcaaagggagcatgccgcattggaag

SEQ ID NO: 110657 - DNA, 187 bp, Homo sapiens
aaaacaaaacaaaaaaagttactgagaaacagacaaatttcactgggtccatggcatcccccttgctgtttggtgtgtttaagcataagtgagggaccctgatcctgactatgggctgcctctgtcctgggtctcactgctttgatgtggagctttggacaggtggcagcagttcccgaagcttttc

SEQ ID NO: 110658 - DNA, 245 bp, Homo sapiens
tggctgggcctccagcccatgcccctgagggccgtgctcctcaccccttagtcagaatctcagggcccacccttgccctctcatgtcatctgtacaatggctgagaggagttctcctgtcccgttaccagtggggacacagaagcccagagacaaggccaggaggtcagcagactcagggcatgccctggcacccccccaggcctgatgaggtgtgacttctctagggggacagtttctgaggga

SEQ ID NO: 110659 - DNA, 101 bp, Homo sapiens
gtggaacttctcaatttagtagtgaaagtctgattatggaatggataaagcataaaactaaaaattccacagccatagatggctctgtgacagcacatcca

SEQ ID NO: 110660 - DNA, 762 bp, Homo sapiens
atctcatcccatcagttgaagaccttaagagaaaagagactgacctgctctgagcaaggaggaattctgctggccaactgcttgtgaactccaacttgtaatatcagtctccagcctaccggcttactctgcagattttggatttgccaagcctccacaaccgcagaagccaattccttaaaataaatcccttacaacagttccctaaaataaattcttcaaaattccttaaaataaatgtgtgtgcatgtgtgtctgtgtatatatatagcctatgtaatgtctaatatagatctataatatatattagataaatatacacatacttatcatatatatatgtgtgtgtgtgtgtgtttctcctattggttctgttctctggagaacctaatacagaaacaaatctgtttattcttctagcctctgtatcatcaggcctctttgttagagcaggtgagctttaccctaactaattcagaggttgattcgttttcatgcatgtagatacttgtcatttagcttctattatctgcctgtattttaaggttctttgtcttaaaatgttatgactccaggaatgttatatattaagtatattaaccttttgactattatatatcttgcaaacatcttgtaatcagtcacttgtctctttattttatttggagcggctttcaacctagagcagtggtccccaaacccggggctgcagactattccctgtctgtggtttgttaagaaccaggctacatagcagaagat

SEQ ID NO: 110661 - DNA, 330 bp, Homo sapiens
tttttctttttgctgagacactggcgaacatttccaacacttacctgcaacggcatctttcaccagctcaactgtatgaaggttaaaaactcttcctaattttgattctaataaatgacttgaagaaaagtgtgtccctgtttgtttacgtctataaatttagaagcactgtgaaatctcaaacaaaattagcctggggatgcggagaatcaggtaacctaattaacaaaggctgagccacttacattctcaggactctggatcaatgctggccagcctaactgaagggagagcagacaagccctggatgggagaaccaacagctcagag

SEQ ID NO: 110662 - DNA, 213 bp, Homo sapiens
gatgttccatgcaggaggcagctctttcctgttgatgggccagatcagtggctccctcctgggacagcgcgggaaggaggagatgggctactttcccatggggaagccgaggcaggacccttcacactcctgcatctgtactcatgcagcacagacgtggggaagtgctagccctgcacagagggggtggcatctgggcaggagtccatctag

SEQ ID NO: 110663 - DNA, 354 bp, Homo sapiens
gatgctcctgaaccattatcacagaaggagaggaaaactgcattaatgactgaactaactttaggtcttttcaaaacaaatatagtcatcaagctaaatattcccaagtctccagaacacacatgggtatgcacaaacatgtgtgcacaaacacacacacacacacacacacacacacctctttgctggcaacaagataagcaagtattagccagcattattgggacaggttttagccctaatttacagagcttttgagatcatgccccagtaaatttttttaagctaatgtgttcatacaggagcatcacaagtaagtttatccaagtcactgttaaacccacaccctgtctt

SEQ ID NO: 110664 - DNA, 252 bp, Homo sapiens
attgggttctatgactccgtttctccatctgtaaaatgaagattgtaaagtatataactgaaaagtgttattgtatgtattacagtttcaattgtaaagtattagaaagtattattgtagaggttaagtgagataatacatgtcatttatcttaagataatttctggagcatagtaagtgctcagtaaatattagtggtatcattgcaataattattaccgtagtattctcttaggtcagtgcctaaggaaa

SEQ ID NO: 110665 - DNA, 459 bp, Homo sapiens
tatatgtgcgtgtgcatgtgtgtgcatgagtgagcacagagctgccagctggggcacagcctcagctgagagattcctgaggcaccaggtcacctgattctagggcctgctggtctccactgggcaggtggggaggggcagcaaggcctccagttacaagggcacctgcttcctcattgcctaagagggccccaggctctgcacacaaccctgcctcctgctggttaacaggactggcttgttgctgctccagcaaacaatctgaggaaaccccagagcccacaaaccatctgtgacccagactggttcttactgaatcctgtgggttctcagaacactgtactccaccacagaaaaaccaatctgacggcaaagccaggccacctcctcctaacccctccctccccatgtttgttttagctgggtaaaagtaactctgattaacatcatttacatgaa

SEQ ID NO: 110666 - DNA, 171 bp, Homo sapiens
cacttagccttccatataaaatataaaccaagcttaagtctaatgtttgtggtagcagagaagagtgacaagatgacagccatgttttaggaaaccaacaggcaaccagaatgtcagagcgtggcatgagggagagataaaagaatgagcaggaatcaatggtgggatgat

SEQ ID NO: 110667 - DNA, 258 bp, Homo sapiens
ctgaaaccttgatagaagactccttgctacaaagcagagctacttaaaaagattgtttcttcttggctgctacgaaaaggagcattagcaactaaacattgcactcatctcatgagccccaagacctaattatactaaggctccaaagtacaaaacccttagtcacatggcttctaaattactcatgacagtatcatttactcaagtcacagctggccacttcttatgcttatggtctattcttaaatctggactccg

SEQ ID NO: 110668 - DNA, 560 bp, Homo sapiens
tctcaaaattataaaagttgaaaacaaaactatctttttaatttatttctctctttgcaacctcactgtcagactgcattttcaaaaatacatagaaaatgtttcatatgttcctatgatatgctataattttaattgtattacttgtaccaattttagaaattccattatatgaaaagtaacattttcataataagaggatgccaatattactattttaatgatgcattaccaaaaatacttcagtataacaatttttttgcaaaaggttacatacctattccaaattaactatacctttgacgcaatgaatactaaaaacaaaaaaaatcaagtagagtgaaatgcttgtgcactactagcatgtaatgctgttagacaccaaaggcaatcaatcatttagtatataatagaattttaaatttgcatagccattggcccaatagagtcaagtccgagagtttttacaagtgaaactataagaacccagagataaaaatataagcagagaccatttacatgtttaacaatgagtacaataaagggcctgatcaatcagg

SEQ ID NO: 110669 - DNA, 252 bp, Homo sapiens
cctctttcagcctcccaagtagctgggactacaggtgcgcaccaccatgcctggctaatctatgtatttttgttagagacggaggtctcactatgttacccaggctggtcttgaactcctgggctcaagccatcctttcaccccggcctcccaaagtgctgggattataggtgtgagtcaccatgcccagctaagactactgtgattttaagctctgtgtgcgcaggcattcgttcaacctccgtgactgcc

SEQ ID NO: 110670 - DNA, 391 bp, Homo sapiens
ggggttacaggcgtgagccaccgcgccaggcttaagcagtttttaatgccccttatgctaggtactaaaggccaggcctcaaggagctcagtaaacaagtttttttcctgctttgatggcatatcatcagccagccagttcatttacttttagattctatagcagggagacagaaactcaggccgttaacatgacccatgtagatactcttttggctcccatctctctagttacagtatggtttcatcgctgttcagcattggtgagttataagtttttcctatgtatgtaagtttcgtgtctctagattgtaatttatttggatagaggatttttgttcttaccttttaaaatttatcttccctcccctcttccccaccacatgttttca

SEQ ID NO: 110671 - DNA, 131 bp, Homo sapiens
cttctcccaacagtgataattaacagtaatgatacctgccattactgcaggccaagtactttaaatagagcacaacatttacgctatgaagtagatattaaaatcaaccccattttatagctaagaaaact

SEQ ID NO: 110672 - DNA, 338 bp, Homo sapiens
gtctcaaaagaaacacaaccgatatttggttaaagaattgtattatgtgcaatttgtattttagatggaggtgcaagctacccagcatatgaagaaacaaatagagaacactggcaacttatcaacttatttagaaaaaaattattttgaatattaatataataatttttaaaatttaatatattgaagtatctgagaccattattataccttaagagtaccaggataaggagaggttaaaaagttcccatgctcagaaacactaactaaagatggattaaaaagcagacacatttagtgcctaaggatatatgtgtgtgtgtatatatatatatata

SEQ ID NO: 110673 - DNA, 297 bp, Homo sapiens
cctgccaagatcaccccaagcagaaaccagtaggcataataattagtatgtttgtatatatatatgtgtgtgtgtgtgtgtgtgtatgtactttgctgattagatattttatcagatatcttatctatataaggaaacaacaacaaaagtgaagctgacagtgcgttgagagccgggctttagcacaccacagctctatgtcttaggatccctcctctctgccagtgtggcgcccgcctcctactcccatcctctgcctccagtctcctctgccagcctgtcctccatccaagctcc

SEQ ID NO: 110674 - DNA, 336 bp, Homo sapiens
tggcttgacaacattccagatgaactgtcacttttgcttcataattaaaaaatgaaatagagctctttttagctattcttctccagcctgtcattaggtatgaacacaagtcagtgccgacatatggatttatatttcctagaaagagcaggtgttgatgggaaagaagatataaaccaacttaaattaaactgcttctgcatatgaaatggctggctgcttttgggcagactttatttcacctgtaaatatttaatagtaattggtgtctgtgggttttgctagagggaatggttcttactcctactgactttgagggcccaggtggctctgggg

SEQ ID NO: 110675 - DNA, 225 bp, Homo sapiens
cttaaattcctcatcttcacagtagcctaaacatattcttctgcatagttacctccatcaactgcagcaattttctctcatctgcactcatttttcctgtgtcttgaattatgtaggattgtctcatgggaacagacttacaactgggcctttgtttaaaaacttctctaagctcccaaacttcagcgactgaaaattaaagtttcattttctttcctttttgct

SEQ ID NO: 110676 - DNA, 715 bp, Homo sapiens
aaggaactgaagattagagtggtaaaggtcagttcagagttagggctgggattttcctgaccaccagcattatctctcttctctcatgaggagaggagaaggtaactctgcgatggctctatttaccatcttgagattttttcctgagctttttttgagaaccttactatcacactcctcaggaaagcattacagtccactctcttcagggatatgttttccagtttgtagatcatttaggcccattttcttttctttcattcctttggaatttttctttttcctttcaactggacccttacctttaagaagacagaagctgaaagaggtaaactttatgcataagacttagctcttgttccaaatagttaaaacacatgaaggaaaagagggaaatgaaatattttcttatgggttttatttttattacttccctgaattttggtatgcctcttatttcatagtaactgagttggctgtgcatctggctatgtctcacacccacaatgtttgttgactgtagtgtcggtggtgtgccccagctgttctgtaaatagctgcagcttactgggcaaggtttttggatgagaatgtccaaatttatcccaggcatgtgaccaccaaccaaaaacattggccttctcaatgccatcagcctcttttaaaagtatctagtcaatgtagatgcttaaaccaatcggtgattgacttgatg

SEQ ID NO: 110677 - DNA, 678 bp, Homo sapiens
tatttacattccgtgcctagatcctgccaatttttgagcttgcagctcctggtgtagaggaaagaggcctggaccttaagtcgtggtccctgctctgctgtggtaacccaccctgtgatgccaagcatagctaatagcctctttggatctcagagttaagagactaaattggatgttcttttaagagttctgatatcctggccgggcgcggtggctcacacctgtaatcccagcactttgggaggccgaggcgggtggatcacaaggtcaagagattgagaccatcctggctaacacggtgaaaccccgtctctactaaatatacaaaaaattagctgagcgtggtggcaggcgcctgtggtcccagctactcgggaggctgaggcaggagaatggcgtgaacctaggaagcacagcttgcagtgagccgagactgcggcactgcactccagcctgggtaacagagcaagactccgtctcaaaaaaaaaaaaaaaaaagagttctgatatcctagagggcttgggattttgcagtaggccaataccctgcccctcacctttcccaaccagccaggggccccagcctggtgtgtatgtcagagaaagaagacactggaatgagtaaggtgcttatatcaataatgtataacttgagcccatagccaaggagaggaatgc

SEQ ID NO: 110678 - DNA, 290 bp, Homo sapiens
taataactgttttttgaattggttgcattgtgtgaaaatcacaagatttgacataataatcctaaattggcacaacactgaaataataacagattatttcttttttttttgtagcagtcctctgcagctggcttctggctgccccccagctccccaccccaactcttgcagatgggacatttttcattctctatgtcaccctcaggcctgtctctgtcatttacattgaccccttgaaactgcaagtgaatttgagaactttgactcagatattccagaatgaagaaaaa

SEQ ID NO: 110679 - DNA, 925 bp, Homo sapiens
cccatgcctacccctttttggttgagagctgctcctctgggcatccactcctgggtctttttgtcctttcttgtgtgctggccaagcatgctgtctcaggcagagaggggagattagcagtcttgcaacaagaagctgctgacatgtatgtgacaagtgctaaggggctatggcagggcactggcaccctctgcaatgcccttctggaaatctcctgcaactgctaagggtgctctggttgcctgacttctctggccctccagcacctcagtcccagtcctcattatgttatgttgaaatctttcactcatacaacacatttgttgaaatccttgctatgcaaagagattacatttgtgaataaagatagatatgatcacttctcttgttggggaaaaagggtgcaaaagcaaggaagcaaacacataaatattaatacataagaataaaaattttggcaagtgctatgagggtaacaaatggggtgtataacaataataaatgaatcttgggattgggatagggaattcatttagacatggtgattaagaaacaccaagctaaagagaagctatttatgccaaattctgaaggatgagagaagactgtcatgcaaagagcagggggaagagtgttaggtaggagggacagtgggaagatgggaattgtcttgcttgaaaaactcagtcaccaaggctagaactggggcaagagggcgtgtaccagatgaaggtggaaaagtaggcaagggctggctcaggcaaggctctgtctcttccgctagattgtaagttcttcatgacctatgaggatcatgtcacttatctttattttttcaccaatattgctcctttccttcctccccaacttgtgtagcccaacactgaaggttttcagaaaacttttatggtctatatgcaaaaca

SEQ ID NO: 110680 - DNA, 326 bp, Homo sapiens
ctagtggatattttcataattgtttatgcacaggcagtttggaacctatccactgttgattaagaatagagggggaggtttaacatagaaaatgacaaactggatgattagtagaatactatagtggatttgcctctgtttttctttggctcttattcaggtaaatttacatttatctagcatatattagcatgtattaattagaactgggttcagctgccagagattagagcatcaaaatcatgggttggtaaggaggagaaaaagtatcaggtgggatgagccaggagaaagtgtcctggttctagtggtggccctcaaaaggt

SEQ ID NO: 110681 - DNA, 156 bp, Homo sapiens
ccccacctcagtgctgggattacaggcatgagctaggattacaggcatgattacagtgctgggattacaggcatgagccactgtgccgggccttattttttttatttcttaaacttgataaactgaagggggaaaagtaattgtaaagctcacatt

SEQ ID NO: 110682 - DNA, 762 bp, Homo sapiens
agaaatggaacagaataacaaaaaatatgagattaaaccggcttttttttaaaaaaaaagccaagttcactttttaacttttaaaaaacacaatttccttaagtaggaaatgccaggagtgataagtgaccagattgcttgtcacttaagttttactgcaaactaattcccacgagagaaaggggatgtgaggtgcttccccacaagggtacgcttttccatctgtacccttgtgggtcgagaaccacggagaccctgggaaaagttgggaggcagggatttaggagttgcacagtcccctcattggatgagtcacctgagacacacagtgggatgcttctctactcagggtcccttcctcggaggtgaagaggaaggccggcaggcagggtcacaagagcacagctctgcacttgtgaaaaagaccttttttgacataggaacgaagaacatttatgcatgaagagtgtggagtgcgaagtagtgggtgacttttgttctctttctggcagaactttgcctacacattcctactacccctggaattctaactcagatgtgggtagcagcttcctcaaagagaaactttttcccagctgggtgctgtggctcacacctgtaatcccagccctttgggaggctggagtgggcagatcgcttgagcccaggagtttgagatcagcctgggcaacatggtgaaactccatctctgtgaaaaatacaaaaattagccaggtgtggtggtgcgcgcctgtaatccca

SEQ ID NO: 110683 - DNA, 231 bp, Homo sapiens
ccctttctcgtgcagctttaggcaggaaaattgttcagatctgccaaaggtcagaatgcattggcaggctttccagccaaggatggaagagtgctgctttcctatgacaacttctgacctaccagaagctacatgaatttctgagaccctttcaagtaaagtatttcctgtttccctccccaccatgtccccctaaaataaacattggaacaaaattgacagcctgggaag

SEQ ID NO: 110684 - DNA, 223 bp, Homo sapiens
caaaataccttctcagtatatatttattcaaagcatttctagttatagaatttctgagctgggagacttttggccaggtgtatcgtaccatgaaaggatgccccaaaatgtcaaatcacagggttactccaatgcctagccatttttctgctaacacttcttagaacagtaagaccagcccagtcctactggggccacccacatcatactaactccccatcag

SEQ ID NO: 110685 - DNA, 483 bp, Homo sapiens
aagcctggcttcaacatcctaaggagtgaattccttaggcagagcaacaaagtaaaacaatagcagcaatgatatacaactttggtgctaggctgccaagttgtgactatatactccaaattgctaaaggaaaatcttaggtagactgagaaaaactaagtgttaaaattctgctattaccatttcctcttacttccagcttcttctctctctgcccccatgtggttcttttattaaaggatgcaacgcagagggccctttcctgttttttctcctctctatccaagttacaggaaattcaacaaagccgatctccctgtgtgacatagttacaaaacatgtagatgtgccaggggggagccataatcaaacactcaaaataagagaagagctgatggtgcaattgatggcctgagtcctggctaaaatggtcacagagctccttccctctgcagctacctggcatcctggacttctccaaaa

SEQ ID NO: 110686 - DNA, 273 bp, Homo sapiens
gtggtcttgattttcatttctctgataattagtgatgttgaacatttttttcatgtttgttagctgcttgtatgtcttttaagaagtgtgtgtgttcatgtcttttgcatctgtatttttctgtttttgttgggcctttttaaaatgagattatttgtttttggcttgttcaattgtttagctttctcatagattccagatattagacctttggtggatgcataagttgtgaatattttctccctttctgtaggttgtctgtttactctgttg

SEQ ID NO: 110687 - DNA, 394 bp, Homo sapiens
tttagaagagacagggttttgccatattgcccaagctagactcgaacctctgaactcaaatgagccacccgccttggcctcccaagtgctgggattacaggcatgagccaaagagcctggccgattttttttttttttcttaaccagaagctgatactagcgtctgaatttttgttgaagaaatctatgaacaaatttgctctcgttacagttactagactgcataatttttttttagaaagcatccatgctagcctgtagtcccagctacttgggaggctgaggcaggagaatggcgtgaacctgggaggcggagctttcagtgagccgagatcgcgccactgcactccagcctgggtgacagagcaagactccgtctcaaaaaaaaaaaaaa

SEQ ID NO: 110688 - DNA, 407 bp, Homo sapiens
ttataaccctgagggatcatcaaagatactatcctgattcctggtaaggaaaaatatattatttccttataacaaggcaaggagaaatgctattttattcctgataatttatataactagaataatttttttcctttcttttatggacctaaatctgccaattgggaattttgtgcatgaaatatgaagttactttttatagataatcagtgcttttaagtccctaaaaggctcctgctgaagtaatgatgatgttaataataaaagcctttgaaaggctgaaaacctacatagtggtaccatagtatttggagcttctataggagtggagaggggcagctcattgttgagagttgcatgctgcaacctaatggtcagcaatgaaagaaatacttgtagaatgttca

SEQ ID NO: 110689 - DNA, 416 bp, Homo sapiens
gtactggttcgtcattttctaatttacttgcagaatttatttacattttgtgtattcatcctttgagccattataggttgaacatcatttcttctggtcagtcatttgtccttcttattccttaaataataacatttcttctataatagttgaaaacttttttgtagtcaaatcaatcttttctgtatggtgcatgctacctttcttctgcttaagaaggcctttcatatcccaagattatgaagatattctctaagatttttaatagttatcttaaagatttgtttttacacatttgaaattgtaatccaactgtaatctgtatgtggagcatggcagtagtctaatctcacctgattttattttttcatgtagtccaccaagtccctagatcacttattcaatagtctgtcctt

SEQ ID NO: 110690 - DNA, 394 bp, Homo sapiens
ttcaatagatgatgctgggagaagtggtcattcacatgcaggagaatgaaattagacccttacgtcatacacatacttgaactgagtggattaaagacttaaaacatacgacctgaaactgtaaaactactagaagaaaacacagggaaagctctgtggcattgatctgggcaatgattttttgttgtgactttaaaagagcaggcaaccaaccaaccacaaaaaatagacaaatgggactgtatcaaactaaatagtttctgtacaagaaaagaaactaagtgaagagacaacccatagaggtaaaaaaacaaaatgtgtaaaccatatatctgacaagggctaatatccaaaatatataaggaattcaactaagtagcaacaacaacaacaa

SEQ ID NO: 110691 - DNA, 359 bp, Homo sapiens
ctagaaaaaaaaacattaattaatgatggaacaattaactactatttcatagataaggagagaatttaatcattttacaaccaaaataaaaagtgaatatccaactcgaaatgggttggggatcaaatctgtcaccaaaaaaggtaacaggaacttctctttggttcatggtagctggtgtctttctgatgctagtagtaagtaagtttcagtaataagtttctagtatttctgcattctgtataggaacatgtgtaacaatttcataatttagctatatagttgctaaaaatactgaaatgcaaagaacccaggagaaaaaaaaaagagttctgagcaatcagagcggggttcacaag

SEQ ID NO: 110692 - DNA, 378 bp, Homo sapiens
gtccacgtaagatatgatcccattcctatgaaacaggcagaaaggcacatccctagagacagagctaggggagggagaacggggagtgactgcttaatgggtatagggtttacttttggggtggtaaaaatgttctggaactagacagaggggtggttgtgcaacattgtgaatgcgccaaaggctgaactgttcactttaaaatgggtcattttatgttatgtgaatttcaacttaattttttttacagacacaaaagaatactgatgcatctgtaaaaatcccctcagcaaaaacaaaaacagacaaaaccaatctatactattagaattcaaggtggtggttactctagtgtgggatctgggggcactgataatg

SEQ ID NO: 110693 - DNA, 520 bp, Homo sapiens
tcttgtaagatctcttggcccccgttcctcactcctcttgtgacctgtagccccaggaccttttggttgtcagctgctggttacagcaagtggttgggaggccctagtattagctctgcatgtggtgatcttgccatgggactggaagcctgagggaggatggctggagtggggtgggctgtggtgaaggggatgggatggagattaatctgtggaccaccatttaggccctagtggcctctggtgatccacaggctcaatttgagaaccactaatttcatgacaaaacagatatgtaagacctaaaatcaagggagagaatggacgcctcgtgctacgaagatgtaggtgcatctggtttcagattctgcagtgagacctgtgaactccacctacggctgcctcatcattgggggagtcttaggtggctaagaagggcattctgaagaaacgcgttgtggtgaagggacaaagcttggttggatgggtgatgggaaatttgttacaggagtactggcag

SEQ ID NO: 110694 - DNA, 627 bp, Homo sapiens
tatggtcatgtcattcaggctgtactcacctttcttgagaggacttcttggataagtgccattctgcagccccggtgcctgccttagccttcttccaagcacttaccgcctgccctgttctgggtttgtgtgttcgctgcctctcttccgtcataaggacggaagccccagcagagcaggacgttcttctgtgatggctcccctggtgcctggcggtgagtgatgttaggggatttggactcatctttgtagtgaatgatgggaggatcactgaaggtctaaatcaggggagtcacatgagtgcatttgggtgtttgaagagcagtgtggatggcaggagagctgatgacaagtatttagggagagcctccatgcacattgattgggagtccattagcagtcctgctcttcaggctaccttgggtgggcccaagctttgctggcctagttaattaccaatagctagtatcaatgtcattccatcagtgacattttgaaactactagaaattacagagaagcagccagacaccgtggctcacttctgtaatcccagcactttgggaggctgaggcaggtggatcatctgaggtcaggagttcgagaccagcctgaccaatatggtgaa

SEQ ID NO: 110695 - DNA, 350 bp, Homo sapiens
cttgcctgaacccaccagctcaggcagcccaccgccaaagacagcgcgaagctgcaaccacctagctgctcctcatgcaggggctggagagaggggctagggcttgaaactgagggggagaaagagctgcacattgtaaatgggaagcagagagccaatgagtctgcctgggatgtgtgtgaatcccaaaagacgcaatcccaaatgccatagtcccaagtgttgagaatccaaaatattaaaattactatactctaaaatccgaaaatcacaatcccaaaagatctaaatcctggaaatataattctgggaaaatttttttttaattttttaaaagatacttacatttt

SEQ ID NO: 110696 - DNA, 364 bp, Homo sapiens
  misc_feature (258)..(258): n is a, c, g, or t
  misc_feature (344)..(344): n is a, c, g, or t
cacacacaaatatatgttcacaactacatgtgataaatttgcctgtgcagttaagggagccatgtttcagagtggaggtgtgtacacattgaaataagaaactacttcagaagcaccctcagttttcttttgaataaaacagacgcaataaattggccatcataaaccaaggaaataagggtcaggtggtgagacactgaccttctaaaactgtgctaaacatttcaagtcacttaaaaaggccaggtaaccttttanaatgaccttggcctttactaaagggtggagacatggccttctcatcaagtgacacacgcagaataagaaataagattggcaggttncatcttcccagtctaaataa

SEQ ID NO: 110697 - DNA, 400 bp, Homo sapiens
cttccctaagaaaggaattgtatctgccattcatcaacaaaacactcagtagcatttgaacaagtaaatggaccagagttaagaaaactcccttgactcttctcaccagaagcaaggaccaaagctggtgggggaagcagggttggtaggcagggagaacaggggcagagaatctattgaaaattgaatatgcatacattgaaaactttttgttcttattaaatacagaaatgtaatctgtctactttctaaaaataaaagcttattttctctgattatgacagaactatttgccttatgaatcaagaacagaaaatagaaaaatttacttgattaatagccccttctttcccatagatcatcagttcttaaattcttttggtttaaggatccctttata

SEQ ID NO: 110698 - DNA, 565 bp, Homo sapiens
gagtggtcaaattcataaagatggaaagtagaatggcagttgccaggggctaggggtgaagggggttatcatttaatgcgtagtttcggtttgggaagatgaacaaattttgaagatggttggtagtgatagttgcacaataatgtgagtatacttaatgccactgaactacactaaaaatggttaaaatgataaattatttgttatgcatattttaccataattaagaaaaaaggttacactaattagtgacaactagactggaatgcaaatcccttgaataccagtctaacaatagaatggaaagatgtttggtctgggagtcagcaggcatggaatttagttcctttgtattagtcgaaggtcttcaacaaatcatgttagccctttgagccttgttttccatttataagagagggttgaacaacattccagctctgccagtcttacatacccagagcccttcctcagcccggggagtctcctagtggacattgtcctgaagccagcctggattttgctctctttatttttttttctttgtcacaggtcattcaggcaatga

SEQ ID NO: 110699 - DNA, 236 bp, Homo sapiens
gggtgtctcctgaggcctctctttggcttgcagatggctgtcttttcactgtgtccacacatggccttccctctgtgtgtgcgcatcctggtgtctctgtccaaatttcctcttcttacagggactctagcccagttggcttagggcccaccctaatagcctaattctaacttaattacctctttaaaggccctaccttcaaatccagtcatattctgaggtccttggcactagga

SEQ ID NO: 110700 - DNA, 400 bp, Homo sapiens
cttgccttgaggggggcccaagggctcagatcttcccataccttcaggcattggcattctgatctgcacttggacagcaattacacttcttggctccacatcagtgcctgccttgctatttcaaagattgcctgtaactcaaattttagggctctgcactaaaaagtaataaattgaccaaaacagagtatataggctgggagttgtctagagggcatcttgcaatttctgtcaaacactgcatgtttccagtcaccatgtgtttctcatcttcctttgcatatgccgccacgggatattcagaatcgacggtttctgaaatcactgctttcgttttcacatctggtgatgatctcatagtcccaaagagaggttatcgaaggaacgcaataaactatgt

SEQ ID NO: 110701 - DNA, 830 bp, Homo sapiens
tcaaaggtagaggagagctttggagagctgtctgcaaaaatgaaagaagaatttaaggattaggcataggacaagtcagttgtatgtagtccaattttggttcctctcattgcttagggttgttttgacccagtgatttagttgcacagttttaggtttctgtacatttggatgtcatagataccaccaccttatacaccttatttcataacctgtgtgtttattaaatggctagtgacatggaaaatggggagattgatgtgttgctttggcacaaaaaaatacatacaatattattgtcactggttccaattaaagaatgaggacaggctgggcacagtggcccatgcctgtaatcccagcatttagggaggctgaggcggatggatcacctgaggtcaggagtatgagatcagcctgaacaacatggtgaaaccccgtctctactgaaaaaatataaaattagtcgggcatggtggcacaagcctataatcccagctacttgggagactgaggcaggagaattgcttcaacccaggaggcggaggttgcaatgagccaagatcgtgccatcgcactccagcctgggcaacagagcaaaactccatctcaaaaaaaaaaaaaagaatgaggacagaaagatccttaatttcctggaatgccttgccttgtgcttcctctatgtttaaggtttttaaaaatgtgtaaattaaaatgatgtcctctgccttttttatatagcattgtgctactgttgtatgtttgtgtgtgtgttaaaaatgatcagactctttttgctgttttaattttctattttattttattgtcta

SEQ ID NO: 110702 - DNA, 1121 bp, Homo sapiens
gatggacatttgagttgctgccaccttttggctattgtgaatggtgttgctgtgaactttggcttacaagtatctgagtccctgctttcagttcttttgagtggaatttgctggatcatatggtaattccgtgtttaacttttggaggaactgccaaactgttttctaccgtggctgtaccattttatattcccaccaaccattgatttagtttgacttctgttgtttaaagaagtatatctgaattttacacatactccaaaactgtaattatttgaattaattggagtagaaattaatttgaaataatgaaatgtctgattactggacatcaaaagctgctttgcattaggccatggttctcagaattcacaatcctcctttccattttttcctccctccctcccttcctcctctcgctaccatggtcactctcagcttcacaataagcacgtgtatcttagggcatttgaacttcaaatactacagcacctcacacgtaagaactctgtaacagtagacctctatttccctttcctgtcctatgtgctacttttttgttttgtttttttgagacagggtcttgctttgttgcccaggcaggagggcagtggcgtaatcacagctcactgcagcctcaacctcctgtttaagcgatcctcccacttctacctgccaagtagctaggactacagatgcagaccaccatgcccggctaatttttgtatttgtagagacagggtctctccacggtgccctggctggtcttaaattcctgagtttgtgcgatctgtccacctcggcctccaaaatgctggggttacaggcatgagccactgtgcctggcctttgtatttttgtcatacattttatttcccagtattatagactccagaatattgttgttgtttcataggtgactaactgggtaggggaatgtctggttcccttactatccggtgaagtagcagaaccaccttttgtaggaatcagttatcaggccctttactttcccttgaactctaggctagttccagaacctttggtggactggaaagaggaaatagttatgccacaatttttagtacatgcaaatgtacatgtaatgtttaaaaaaaaaa

SEQ ID NO: 110703 - DNA, 1778 bp, Homo sapiens
gatggacatttgagttgctgccaccttttggctattgtgaatggtgttgctgtgaactttggcttacaagtatctgagtccctgctttcagttcttttgagtggaatttgctggatcatatggtaattccgtgtttaacttttggaggaactgccaaactgttttctaccgtggctgtaccattttatattcccaccaaccattgatttagtttgacttctgttgtttaaagaagtatatctgaattttacacatactccaaaactgtaattatttgaattaattggagtagaaattaatttgaaataatgaaatgtctgattactggacatcaaaagctgctttgcattaggccatggttctcagaattcacaatcctcctttccattttttcctccctccctcccttcctcctctcgctaccatggtcactctcagcttcacaataagcacgtgtatcttagggcatttgaacttcaaatactacagcacctcacacgtaagaactctgtaacagtagacctctatttccctttcctgtcctatgtgctacttttttgttttgtttttttgagacagggtcttgctttgttgcccaggcaggagggcagtggcgtaatcacagctcactgcagcctcaacctcctgtttaagcgatcctcccacttctacctgccaagtagctaggactacagatgcagaccaccatgcccggctaatttttgtatttgtagagacagggtctctccacggtgccctggctggtcttaaattcctgagtttgtgcgatctgtccacctcggcctccaaaatgctggggttacaggcatgagccactgtgcctggcctttgtatttttgtcatacattttatttcccagtattatagactccagaatatgttgttgttattgttttaaaagtcagttatcttcttagttttctttcagaaaaattaaatggtgagtttttttgtttgtttgtttgtttgttttgcatggcccatgtatttaccattcctggtgctcttccttcttttgtgtggattcagttttccatctagtatcattttcgttctggtaaaagcatgtttgacatttcctgtagtattgctttgctggtgacacattcttcctcagcttttgtctgaaatgcctttatttcaccatcatttttgaaggatgtttttgctgggtatagaattctaggttggtagtttttgttatttttcagcatttttaaggtgacatttggcttgtacatgttgttcttgagaattctgcagttattctttgttccactgtatgtaataatatatgtttttctcctttctctgattttaacggtttttctctttgttgctgatattctgaaacttgactatgatgtgtctttgtgtggttttctttgtggtttttttcctgtggaatttattcaacttctgggatctgtaggttatagttttcacaaattggaaatttttgacattacttcttcagacactttttctgtcttcccctccatcattctgggatttgaattacatgtatacagtaactgttgttgtttcataggtgactaactgggtaggggaatgtctggttcccttactatccggtgaagtagcagaaccaccttttgtaggaatcagttatcaggccctttactttcccttgaactctaggctagttccagaacctttggtggactggaaagaggaaatagttatgccacaatttttagtacatgcaaatgtacatgtaatgtttaaaaaaaaaa

SEQ ID NO: 110704 - DNA, 861 bp, Homo sapiens
tgattcttctctcttttcttctttattagtcttgctggtggtctatcaattttgttgatcttttcgaaaaaccagctcctgaattcactgattttttgaaggggtttttgtgtctttgtctccttcagttatgctctgatcttaactccagcttggcattagaagtagttgtttatatccccatgtgcagcaaagtctttttcctgagatcatatcacatgtgccaagttatatgccaagccatggttctcaagctgaaggtacagtaccctgggcccttacttgttctgaaaggggtgggggtggtggttttggacatactgttagactttctgagccacaactgaggtagctatggcttatcgtattttgacttcacaggtgaatctccgctgtcagccaggaatagccaggaatagctaaaatagctccttaagctgtaacatttctcttttccaaccccagcaaaggattggtctagtggtaacaacaaacctcatagaagtagtacacctattattctggagatacttgcttctatagatttattacaatatgttttataaaagtattttagagtatataatttgtgtttatgttccacagaaacatattttataggagttaatcttgactatctaaaggtattgtgaactagttccagctttctccaatacccttgtccacgagaagtaaactaaatcatgtatctatttcctctattatctttattaaataataagttaatgtggcctgaatatatacggatttctgatactatggtctattactgagggaaaaaacaccactaaactatcctctaatctgtgtaatagattagctacactttcttcactagca

SEQ ID NO: 110705 - DNA, 269 bp, Homo sapiens
tgatcctgtgtgtactccacttgtactctttctgctcctctctactgactggcatggcatgttacttttcaggtgacatgcctccacactccaaatacaaaagtacatatttatgggtagaaaaaaatagtggaaatacatatacaaatatgtgcaaatgtgtatattaatacattttctgtttttttaaataagattctaaaattttaatgtatcacagataataacttggtcagcagtacaattgggcattaagcatagcattaatg

SEQ ID NO: 110706 - DNA, 523 bp, Homo sapiens
atctttgtgattttggattagacattttttaagtaggcacaaacaaccgaaaaatagataaatggacttcattaaaataaaaaacttgtatgcttcaaaggacactgtcaaggaagtgaaaagataatccacataatgggagaactatttccaaattgtatgtttgacacagctctagtacctagagtatataaggaattcatataactgagcaataaacgacaaccacatttaacaatggggaaaaaaagctgtgagtagaggtttctctaaaggaaacacacaaatggccaagaagcacatgcaaagatgttcaatgtttttcgtcattaggaaaatgtaaatttaaaccaaaatgagataccacttcacacccagcagtatgacttaagaaaaaaataaagacaacacatgtttcaaaagtgatggagaatatggaattctcatatattactattgggaatctaaaatgatgtagctactgaagttagtaaacagtgtgtgagttcctcaaaaagtgaaa

SEQ ID NO: 110707 - DNA, 653 bp, Homo sapiens
caccaacgtgtacctcaataagccagcaagcactacagcattactgggcttggggtacttcctaatgcagatattaccgcaatgaccaaagaccaaagatcataacaccatttgaatacttggaaagccttcccaagaatgatgagtacaaacaagtctagactgtgaagactacaataaatgcttaattcttcaatgcccaggcagcagcgaatatccataagcatgaaaaccatccaggaatacatgatctcaccaaacaaactaaataaagcaccagtgaccagtactggagaggcagagatatgtaacctttcagagaattcaaaataactgtattgagaaaacccaaagacatgatgtaatcctattcctattccagagaaggaattcagtattctatgagataattttaacaaagagatacaaataattaaaaagatcaagcagggcaggtgcagtagctcatgcctataatcccagcactttgggaggctaagacaggtggattgcttgaggtcagaagttcgagaccatcctgggcaacatggtaaaaccctgtctctactaaaaatacaaaaaattagctgggtgcagtggcacatgcccatagtcccagctactcagaaggctgaggtgggtggatcacttga

SEQ ID NO: 110708 - DNA, 336 bp, Homo sapiens
ataaagtacaatgtaaaagaaaaaggcagttaaaaatgcaagctccattttttattattagagttaacagacacaaaattacacaatcacatatatgggcaaggtttaaaaggcttactctcagtttctgtacttctcttgccccagaccaacaatgaccaatttgaggaccggcagcagttcgtggagcacactttgaatagtgtggagtttacgttattcccatctgcactggcacagttactcaggtactgtctaattcagtgaacccaacctcccacacctggcaggaggcttatacacagggttgctcgataaattagttgaattgaatga

SEQ ID NO: 110709 - DNA, 790 bp, Homo sapiens
acacaacagaaagttcagcggattatggaggactgatttcctcatcaacctgtggttattgataaaagcttcttcagggtgggtcctgatcaccccagctgtttccatacaactgtggttcacttaggtgtcatgggcatgcacacattttgtccaagggaaataaagtaggtgaaaagcagtttagatactttaatggatacattgggcagggcttgcccaaaactgcttttctccttgatcttgagtgaagctacaacacagtgtcggggaagttcagaaggcaggcattttttacttaggctttctaagggctttaaattcgtaacattcttaaataaaggatataaagtgcagtgtatttatgaaaatgtctgctatgaaaaatgtcttatttcagtcaagccaggcagccccgcttggctcctccctttctctgacactagatgatccctccccaaggagcagaggaaaggggaggggggaagacctcctgttgacaggctgctgtttgtctgtcacatgtcttactccaccatttattttgcctggattactccagtagtctcttaactggaattctaatctattctcacagcagccaggatgacctcaaatgctgcggtggcttccatctcacctagaataaattcagagtccttgctttggctgacgaggttccatctgatcttgtcctctgacacttctctgatctcatccccctggctcactcgctccagcatagccttctggctgctgttccaacatgcgagcacagccatgcctctgg

SEQ ID NO: 110710 - DNA, 302 bp, Homo sapiens
cattcacacacacacaacgcacccacatccgtacaacacacacacagaacgcgcacacgtccgtacgacgcacacacagaatgcacgtgcgtacgtacaatgcacacaaagaatacacacatccatacaacacacaggcacacaacacacatgtgcatgcacatggcgcaacatacagatacacaaagacacgtgtacacacacatgcagagtccccagggcagcgctggcgtcatggggggctgcctccacaccgcctccaggagtgtttacagctgtggattacatgataccgccccctt

SEQ ID NO: 110711 - DNA, 208 bp, Homo sapiens
tttccaaggacacaggagctgtgccccgagggccatcgttaggggctgaggaaacaaggtgaatctagacaggggcagcgagcttcctgccacgggtcagataggaggcacctgacctcagtctgtgggccacacggtctctgccaggaccacgtgatgctgcccttgtggtgcccaagacaggacagacagtgcatcggcgtgcgag

SEQ ID NO: 110712 - DNA, 497 bp, Homo sapiens
gcagtacctatattgttttattctgtttaacttttggttataatttcttcattattttttcctgctttttctcttttcggattctaataacacatacattggagagcttgatactgtctcatgggtcattaaggttcatttttcttcagtcttctctctgttcttcaggttgggtgatttctgttgaactcttcaaggtcgctgtgatttctaatatgctgtggaacctttctagtgaattgtttaattgtgctttcagctctagaatttccattgggtttttatagtttctgtttttctgttgagattctttattttacattcattaagtctatattttcctttaattgtttgaatgtatttatgtttgattctttaaaaatatttagctgctttaaaatgtttatctgcaatatgtaacacttggacccatttggagtcagtttctattgactgggttcctctcccccacacacactccccccaactcagtaggg

SEQ ID NO: 110713 - DNA, 354 bp, Homo sapiens
atagcctctcctctacttccacacttcaggaagtatgtgaagaacctattaacatataggctatatgaaaatatagtcccagttttactaatctgaaattctctaaaatagcagtactattcgtcattttcactttcacacttagttgtcaatatcatgtaagatctctgttacacatagtaggtatttgatgctgtttcagagttcttcctgatttaagattcagcgctataagatcaattccaaaagttcatgctaaagatgtagaggggccactagatgtttcgctaatttaggactctgacccatttagatacagtgagggcatacataatgctggagtggacaaattaa

SEQ ID NO: 110714 - DNA, 490 bp, Homo sapiens
  misc_feature (321)..(321): n is a, c, g, or t
aatggagatggggtttcaccatgttggccaggctggtcttgaactcctgacctcaggtgatctgcccaacttggcctcccaaagtgctgggattgcaggtgtaagctaccactgcacctggccaacaacactgacttcttgcttgttccttgcctttccatccccaaaatcgttcccagggcctagtgtaatgcagggcaactagcaacacctctcaggcagagctgaagctgtggagaccaagcatcaaccaccttggctaatgcggctggcctgcctggggctggaggttgggaggggaggaatatgtacccattttanacatcctgaattccattctttggattttttatttgggggagcaccctttttaagggggtccttcttttttgtggcaggggaatggtttggcccttaaaaccttccaccccttttggacaccctttttttatttccatgcagtttttattttaaagtctcccttgtttct

SEQ ID NO: 110715 - DNA, 538 bp, Homo sapiens
  misc_feature (308)..(308): n is a, c, g, or t
  misc_feature (316)..(316): n is a, c, g, or t
aatggagatggggtttcaccatgttggccaggctggtcttgaactcctgacctcaggtgatctgcccaacttggcctcccaaagtgctgggattgcaggtgtaagctaccactgcacctggccaacaacactgacttcttgcttgttccttgcctttccatccccaaaatcgttcccagggcctagtgtaatgcagggcaactagcaacacctctcaggcagagctgaagctgtggagaccaagcatcaaccaccttggctaatgcggctggcctgcctggggctggaggttgggaggggaggaaaanctacttgnacatcaatatcaccatgttcgggtttcgcatttaaggagaagggcctcctttgagaacggaatcctttttaaatgcccctccttggtttaaccacaacaacataggtaatttccggtttcaggaaggattttttttctggaaaggagacttttcaaggtaggcctggactattaggaaaagtggaaaacccccgttttgggggcctccccgggaactctttt

SEQ ID NO: 110716 - DNA, 367 bp, Homo sapiens
aatggagatggggtttcaccatgttggccaggctggtcttgaactcctgacctcaggtgatctgcccaacttggcctcccaaagtgctgggattgcaggtgtaagctaccactgcacctggccaacaacactgacttcttgcttgttccttgcctttccatccccaaaatcgttcccagggcctagtgtaatgcagggcaactagcaacacctctcaggcagagctgaagctgtggagaccaagcatcaaccaccttggctaatgcggctggcctgcctggggctggaggttgggaggggaggaagaggtggcagtaagtataagatcaccttcctccctgtgtgaccttcaaggggcaaccaccct

SEQ ID NO: 110717 - DNA, 433 bp, Homo sapiens
tgaaaatagttggaatgggggaggctgtcaaagtagattatagcgactcttcacgctggtatagttaagattgcgtcagctcttgaattgtggacccagtgagttctttagttttcttacctggcaatcactgtaggctgaactttggtaggggaataatctgaggcccatgtataaactagctttctagaggctctgaagaaaacatgaacagtgatctttgacaagtttggagtttaatcactgggagttgtgtttttaactcttgacaatttaagatctaaggctagttttgtttgtttgtttgtttgtttgtttgttttgttttgttttggagatgaagacttgcttcgttgcccaggctggagtgtagtgaaccgagatcgcaccactgcactccagcctgggcgacagagtgaaactccgactcaaa

SEQ ID NO: 110718 - DNA, 320 bp, Homo sapiens
agtagttgggactaataggtgtgcgtcaccatgcccaactgtttttttaatgttttaaaaacattaaaacacagccagacatggtggctcacacctgtaatcccagcactttgggaggccgaggcaggtggatcacgaggtcaggagatcgagaccatcctggctaacacggtgaaaccccgtctctactaaaaaatacaaaaaattagccgggtgtggtgacgggcacctgtagtcccagctacttgggaggctgaggcaggagaatggcgtgaacctgggaggtggagctggcagtgagccgagatcccgccactgca

SEQ ID NO: 110719 - DNA, 1785 bp, Homo sapiens
ggacgagtggccgactctggagcccaggctgttgcttcccagactggtggtgaatcctccatagtctgggacaaatatggccctgaaggctccatgagcagacgagaaggctggacttcgcaactgggtcaccttagatccggaactagagaatgacaccgttgtttccgggaggaaaaagaaaaagcgcttgacccggaagctgcgtgtcccatccccgcgcctgcttctctgactggggtgaggccgcagcggactgccctttcccaagatggcgtcgaagataggttcgagacggtggatgttgcagctgatcatgcagttgggttcggtgctgctcacacgctgccccttttggggctgcttcagccagctcatgctgtacgctgagagggctgaggcacgccggaagcccgacatcccagtgccttacctgtatttcgacatgggggcagccgtgctgtgcgctagtttcatgtcctttggcgtgaagcggcgctggttcgcgctgggggccgcactccaattggccattagcacctacgccgcctacatcgggggctacgtccactacggggactggctgaaggtccgtatgtactcgcgcacagttgccatcatcggcggctttcttgtgttggccagcggtgctggggagctgtaccgccggaaacctcgcagccgctccctgcagtccaccggccaggtgttcctgggtatctacctcatctgtgtggcctactcactgcagcacagcaaggaggaccggctggcgtatctgaaccatctcccaggaggggagctgatgatccagctgttcttcgtgctgtatggcatcctggccctggcctttctgtcaggctactacgtgaccctcgctgcccagatcctggctgtactgctgccccctgtcatgctgctcattgatggcaatgttgcttactggcacaacacgcggcgtgttgagttctggaaccagatgaagctccttggagagagtgtgggcatcttcggaactgctgtcatcctggccactgatggctgagttttatggcaagaggctgagatgggcacagggagccactgagggtcaccctgccttcctccttgctggcccagctgctgtttatttatgctttttggtctgtttgtttgatcttttgcttttttaaaattgttttttgcagttaagaggcagctcatttgtccaaatttctgggctcagcgcttgggagggcaggagccctggcactaatgctgtacaggtttttttcctgttaggagagctgaggccagctgcccactgagtctcctgtccctgagaagggagtatggcagggctgggatgcggctactgagagtgggagagtgggagacagaggaaggaagatggagattggaagtgagcaaatgtgaaaaattcctctttgaacctggcagatgcagctaggctctgcagtgctgtttggagactgtgagagggagtgtgtgtgttgacacatgtggatcaggcccaggaagggcacaggggctgagcactacagaagtcacatgggttctcagggtatgccaggggcagaaacagtaccggctctctgtcactcaccttgagagtagagcagaccctgttctgctctgggctgtgaaggggtggagcaggcagtggccagctttgcccttcctgctgtctctgtttctagctccatggttggcctggtgggggtggagttccctcccaaacaccagaccacacagtcctccaaaaataaacattttatatagaca

SEQ ID NO: 110720 - DNA, 2405 bp, Homo sapiens
ggacgagtggccgactctggagcccaggctgttgcttcccagactggtggtgaatcctccatagtctgggacaaatatggccctgaaggctccatgagcagacgagaaggctggacttcgcaactgggtcaccttagatccggaactagagaatgacaccgttgtttccgggaggaaaaagaaaaagcgcttgacccggaagctgcgtgtcccatccccgcgcctgcttctctgactggggtgaggccgcagcggactgccctttcccaagatggcgtcgaagataggttcgagacggtggatgttgcagctgatcatgcagttgggttcggtgctgctcacacgctgccccttttggggctgcttcagccagctcatgctgtacgctgagagggctgaggcacgccggaagcccgacatcccagtgccttacctgtatttcgacatgggggcagccgtgctgtgcgctagtttcatgtcctttggcgtgaagcggcgctggttcgcgctgggggccgcactccaattggccattagcacctacgccgcctacatcgggggctacgtccactacggggactggctgaaggtccgtatgtactcgcgcacagttgccatcatcggcggctttcttgtgttggccagcggtgctggggagctgtaccgccggaaacctcgcagccgctccctgcagtccaccggccaggtgttcctgggtatctacctcatctgtgtggcctactcactgcagcacagcaaggaggaccggctggcgtatctgaaccatctcccaggaggggagctgatgatccagctgttcttcgtgctgtatggcatcctggccctggcctttctgtcaggctactacgtgaccctcgctgcccagatcctggctgtactgctgccccctgtcatgctgctcattgatggcaatgttgcttactggcacaacacgcggcgtgttgagttctggaaccagatgaagctccttggagagagtgtgggcatcttcggaactgctgtcatcctggccactgatggctgagttttatggcaagaggctgagatgggcacagggagccactgagggtcaccctgccttcctccttgctggcccagctgctgtttatttatgctttttggtctgtttgtttgatcttttgcttttttaaaattgttttttgcagttaagaggcagctcatttgtccaaatttctgggctcagcgcttgggagggcaggagccctggcactaatgctgtacaggtttttttcctgttaggagagctgaggccagctgcccactgagtctcctgtccctgagaagggagtatggcagggctgggatgcggctactgagagtgggagagtgggagacagaggaaggaagatggagattggaagtgagcaaatgtgaaaaattcctctttgaacctggcagatgcagctaggctctgcagtgctgtttggagactgtgagagggagtgtgtgtgttgacacatgtggatcaggcccaggaagggcacaggggctgagcactacagaagtcacatgggttctcagggtatgccaggggcagaaacagtaccggctctctgtcactcaccttgagagtagagcagaccctgttctgctctgggctgtgaaggggtggagcaggcagtggccagctttgcccttcctgctgtctctgtttctagctccatggttggcctggtgggggtggagttccctcccaaacaccagaccacacagtcctccaaaaataaacattttatatagacaaaaaaaaaaaaaaaaaaaaaaaacaaaaaaaaaaaaaaaacaaaaaaaagaaacaccagaataacgagatgcaaagagaggagcacgcacagccacgaacagcaacgctaatcccatcagcaggagagaccagacctatacgtacacaccaacgcgagggacctgagcactgaaggacagcaccgaggggtgcaactccaggcgggtgccctgctttgactgaacagcgcgatgctgacacggccgtccgcactctcatacgatacttgcttgtggcgctgcagcggtcatcaacgcggagcctacatctgcggaggagtagatacatcatctatatccacctcatcactccacatcaataaactacttaacaaaaccaactccctcctaactacacacacaccaatacaacaaaattaatctcaaacacatatcacatacatccaattgcaattaaacctcaataacctcataatatacccatcgtattagatcatatacacaataacaacaccaaaaccaaactaaacaccacacgacaactacgaatgatcttaccaacaaacaagctaaagcaaacaccaaaacagctaataaacaaaacaataaagtcgacaaac

SEQ ID NO: 110721 - DNA, 2637 bp, Homo sapiens
ggacgagtggccgactctggagcccaggctgttgcttcccagactggtggtgaatcctccatagtctgggacaaatatggccctgaaggctccatgagcagacgagaaggctggacttcgcaactgggtcaccttagatccggaactagagaatgacaccgttgtttccgggaggaaaaagaaaaagcgcttgacccggaagctgcgtgtcccatccccgcgcctgcttctctgactggggtgaggccgcagcggactgccctttcccaagatggcgtcgaagataggttcgagacggtggatgttgcagctgatcatgcagttgggttcggtgctgctcacacgctgccccttttggggctgcttcagccagctcatgctgtacgctgagagggctgaggcacgccggaagcccgacatcccagtgccttacctgtatttcgacatgggggcagccgtgctgtgcgctagtttcatgtcctttggcgtgaagcggcgctggttcgcgctgggggccgcactccaattggccattagcacctacgccgcctacatcgggggctacgtccactacggggactggctgaaggtccgtatgtactcgcgcacagttgccatcatcggcggctttcttgtgttggccagcggtgctggggagctgtaccgccggaaacctcgcagccgctccctgcagtccaccggccaggtgttcctgggtatctacctcatctgtgtggcctactcactgcagcacagcaaggaggaccggctggcgtatctgaaccatctcccaggaggggagctgatgatccagctgttcttcgtgctgtatggcatcctggccctggcctttctgtcaggctactacgtgaccctcgctgcccagatcctggctgtactgctgccccctgtcatgctgctcattgatggcaatgttgcttactggcacaacacgcggcgtgttgagttctggaaccagatgaagctccttggagagagtgtgggcatcttcggaactgctgtcatcctggccactgatggctgagttttatggcaagaggctgagatgggcacagggagccactgagggtcaccctgccttcctccttgctggcccagctgctgtttatttatgctttttggtctgtttgtttgatcttttgcttttttaaaattgttttttgcagttaagaggcagctcatttgtccaaatttctgggctcagcgcttgggagggcaggagccctggcactaatgctgtacaggtttttttcctgttaggagagctgaggccagctgcccactgagtctcctgtccctgagaagggagtatggcagggctgggatgcggctactgagagtgggagagtgggagacagaggaaggaagatggagattggaagtgagcaaatgtgaaaaattcctctttgaacctggcagatgcagctaggctctgcagtgctgtttggagactgtgagagggagtgtgtgtgttgacacatgtggatcaggcccaggaagggcacaggggctgagcactacagaagtcacatgggttctcagggtatgccaggggcagaaacagtaccggctctctgtcactcaccttgagagtagagcagaccctgttctgctctgggctgtgaaggggtggagcaggcagtggccagctttgcccttcctgctgtctctgtttctagctccatggttggcctggtgggggtggagttccctcccaaacaccagaccacacagtcctccaaaaataaacattttatatagacatttggttttgcttttctgttctccccaacagggaactctgccattggctgggattgatcttgggtttcttgaaacactagatctggtcaagccccaccttgggcctcccgtgatctttcccctgttccaagatttcccacagttctttggctctctctcttttttttttttaatttttcacttctttattttttagagacaaggtctcactttgttgtccaggctggtttcagactccttggctcaagtgattctccagcctcagcctcagcctcccaaagtgctgggactacaggcatgagccactgtgcccagtggctctctttttcaagaatctcaaaatcctcattgtactatatgctttcaatccctcacctcagtccctcttgttgtaggttgtctttttctccccatttggagctggttcttatgaagacatctttggtgagagcagctagagggagagaactgtgaagtgtccactgtgaagtggaatattttacactttatacatgaaggaaatggaggctcagagaggataagcagtttcggtcaagccacagagcaaatccagcccacagagctggattccaggtcaggtctgtctaatggtgaagtccagatatgtactcactgtgacccatctcctgaggggagacagaggctgctctattccagcccctactgtgccatgatggtctccctgttgaccttctccctttttttttgagacggagtcttgctctgtcacctaggctggagtgctgtggcgtgatctctgctcactgcaagctccgcttcccgggttcatgccattctcctgcctcagcctcccgagtagctgggactacg

SEQ ID NO: 110722 - DNA, 1734 bp, Homo sapiens
ggacgagtggccgactctggagcccaggctgttgcttcccagactggtggtgaatcctccatagtctgggacaaatatggccctgaaggctccatgagcagacgagaaggctggacttcgcaactgggtcaccttagatccggaactagagaatgacaccgttgtttccgggaggaaaaagaaaaagcgcttgacccggaagctgcgtgtcccatccccgcgcctgcttctctgactggggtgaggccgcagcggactgccctttcccaagatggcgtcgaagataggttcgagacggtggatgttgcagctgatcatgcagttgggttcggtgctgctcacacgctgccccttttggggctgcttcagccagctcatgctgtacgctgagagggctgaggcacgccggaagcccgacatcccagtgccttacctgtatttcgacatgggggcagccgtgctgtgcgctagtttcatgtcctttggcgtgaagcggcgctggttcgcgctgggggccgcactccaattggccattagcacctacgccgcctacatcgggggctacgtccactacggggactggctgaaggtccgtatgtactcgcgcacagttgccatcatcggcggctttcttgtgttggccagcggtgctggggagctgtaccgccggaaacctcgcagccgctccctgcagtccaccggccaggtgttcctgggtatctacctcatctgtgtggcctactcactgcagcacagcaaggaggaccggctggcgtatctgaaccatctcccaggaggggagctgatgatccagctgttcttcgtgctgtatggcatcctggccctggcctttctgtcaggctactacgtgaccctcgctgcccagatcctggctgtactgctgccccctgtcatgctgctcattgatggcaatgttgcttactggcacaacacgcggcgtgttgagttctggaaccagatgaagctccttggagagagtgtgggcatcttcggaactgctgtcatcctggccactgatggctgagttttatggcaagaggctgagatgggcacagggagccactgagggtcaccctgccttcctccttgctggcccagctgctgtttatttatgctttttggtctgtttgtttgatcttttgcttttttaaaattgttttttgcagttaagaggcagctcatttgtccaaatttctgggctcagcgcttgggagggcaggagccctggcactaatgctgtacaggtttttttcctgttaggagagctgaggccagctgcccactgagtctcctgtccctgagaagggagtatggcagggctgggatgcggctactgagagtgggagagtgggagacagaggaaggaagatggagattggaagtgagcaaatgtgaaaaattcctctttgaacctggcagatgcagctaggctctgcagtgctgtttggagactgtgagagggagtgtgtgtgttgacacatgggttctcagggtatgccaggggcagaaacagtaccggctctctgtcactcaccttgagagtagagcagaccctgttctgctctgggctgtgaaggggtggagcaggcagtggccagctttgcccttcctgctgtctctgtttctagctccatggttggcctggtgggggtggagttccctcccaaacaccagaccacacagtcctccaaaaataaacattttatatagaca

SEQ ID NO: 110723 - DNA, 1664 bp, Homo sapiens
ggacgagtggccgactctggagcccaggctgttgcttcccagactggtggtgaatcctccatagtctgggacaaatatggccctgaaggctccatgagcagacgagaaggctggacttcgcaactgggtcaccttagatccggaactagagaatgacaccgttgtttccgggaggaaaaagaaaaagcgcttgacccggaagctgcgtgtcccatccccgcgcctgcttctctgactggggtgaggccgcagcggactgccctttcccaagatggcgtcgaagataggaagcccgacatcccagtgccttacctgtatttcgacatgggggcagccgtgctgtgcgctagtttcatgtcctttggcgtgaagcggcgctggttcgcgctgggggccgcactccaattggccattagcacctacgccgcctacatcgggggctacgtccactacggggactggctgaaggtccgtatgtactcgcgcacagttgccatcatcggcggctttcttgtgttggccagcggtgctggggagctgtaccgccggaaacctcgcagccgctccctgcagtccaccggccaggtgttcctgggtatctacctcatctgtgtggcctactcactgcagcacagcaaggaggaccggctggcgtatctgaaccatctcccaggaggggagctgatgatccagctgttcttcgtgctgtatggcatcctggccctggcctttctgtcaggctactacgtgaccctcgctgcccagatcctggctgtactgctgccccctgtcatgctgctcattgatggcaatgttgcttactggcacaacacgcggcgtgttgagttctggaaccagatgaagctccttggagagagtgtgggcatcttcggaactgctgtcatcctggccactgatggctgagttttatggcaagaggctgagatgggcacagggagccactgagggtcaccctgccttcctccttgctggcccagctgctgtttatttatgctttttggtctgtttgtttgatcttttgcttttttaaaattgttttttgcagttaagaggcagctcatttgtccaaatttctgggctcagcgcttgggagggcaggagccctggcactaatgctgtacaggtttttttcctgttaggagagctgaggccagctgcccactgagtctcctgtccctgagaagggagtatggcagggctgggatgcggctactgagagtgggagagtgggagacagaggaaggaagatggagattggaagtgagcaaatgtgaaaaattcctctttgaacctggcagatgcagctaggctctgcagtgctgtttggagactgtgagagggagtgtgtgtgttgacacatgtggatcaggcccaggaagggcacaggggctgagcactacagaagtcacatgggttctcagggtatgccaggggcagaaacagtaccggctctctgtcactcaccttgagagtagagcagaccctgttctgctctgggctgtgaaggggtggagcaggcagtggccagctttgcccttcctgctgtctctgtttctagctccatggttggcctggtgggggtggagttccctcccaaacaccagaccacacagtcctccaaaaataaacattttatatagaca

SEQ ID NO: 110724 - DNA, 1617 bp, Homo sapiens
ggacgagtggccgactctggagcccaggctgttgcttcccagactggtggtgaatcctccatagtctgggacaaatatggccctgaaggctccatgagcagacgagaaggctggacttcgcaactgggtcaccttagatccggaactagagaatgacaccgttgtttccgggaggaaaaagaaaaagcgcttgacccggaagctgcgtgtcccatccccgcgcctgcttctctgactggggaagcccgacatcccagtgccttacctgtatttcgacatgggggcagccgtgctgtgcgctagtttcatgtcctttggcgtgaagcggcgctggttcgcgctgggggccgcactccaattggccattagcacctacgccgcctacatcgggggctacgtccactacggggactggctgaaggtccgtatgtactcgcgcacagttgccatcatcggcggctttcttgtgttggccagcggtgctggggagctgtaccgccggaaacctcgcagccgctccctgcagtccaccggccaggtgttcctgggtatctacctcatctgtgtggcctactcactgcagcacagcaaggaggaccggctggcgtatctgaaccatctcccaggaggggagctgatgatccagctgttcttcgtgctgtatggcatcctggccctggcctttctgtcaggctactacgtgaccctcgctgcccagatcctggctgtactgctgccccctgtcatgctgctcattgatggcaatgttgcttactggcacaacacgcggcgtgttgagttctggaaccagatgaagctccttggagagagtgtgggcatcttcggaactgctgtcatcctggccactgatggctgagttttatggcaagaggctgagatgggcacagggagccactgagggtcaccctgccttcctccttgctggcccagctgctgtttatttatgctttttggtctgtttgtttgatcttttgcttttttaaaattgttttttgcagttaagaggcagctcatttgtccaaatttctgggctcagcgcttgggagggcaggagccctggcactaatgctgtacaggtttttttcctgttaggagagctgaggccagctgcccactgagtctcctgtccctgagaagggagtatggcagggctgggatgcggctactgagagtgggagagtgggagacagaggaaggaagatggagattggaagtgagcaaatgtgaaaaattcctctttgaacctggcagatgcagctaggctctgcagtgctgtttggagactgtgagagggagtgtgtgtgttgacacatgtggatcaggcccaggaagggcacaggggctgagcactacagaagtcacatgggttctcagggtatgccaggggcagaaacagtaccggctctctgtcactcaccttgagagtagagcagaccctgttctgctctgggctgtgaaggggtggagcaggcagtggccagctttgcccttcctgctgtctctgtttctagctccatggttggcctggtgggggtggagttccctcccaaacaccagaccacacagtcctccaaaaataaacattttatatagaca

SEQ ID NO: 110725 - DNA, 927 bp, Homo sapiens
tcagggcacaggcaaaaggcaaacccaaagaggtgactttgagccaggaggaccccttactttgatcttaacagaaacgggggtttcctctggtgcgttatgtgtatcatttattgaaccaatgaagctccttggagagagtgtgggcatcttcggaactgctgtcatcctggccactgatggctgagttttatggcaagaggctgagatgggcacagggagccactgagggtcaccctgccttcctccttgctggcccagctgctgtttatttatgctttttggtctgtttgtttgatcttttgcttttttaaaattgttttttgcagttaagaggcagctcatttgtccaaatttctgggctcagcgcttgggagggcaggagccctggcactaatgctgtacaggtttttttcctgttaggagagctgaggccagctgcccactgagtctcctgtccctgagaagggagtatggcagggctgggatgcggctactgagagtgggagagtgggagacagaggaaggaagatggagattggaagtgagcaaatgtgaaaaattcctctttgaacctggcagatgcagctaggctctgcagtgctgtttggagactgtgagagggagtgtgtgtgttgacacatgtggatcaggcccaggaagggcacaggggctgagcactacagaagtcacatgggttctcagggtatgccaggggcagaaacagtaccggctctctgtcactcaccttgagagtagagcagaccctgttctgctctgggctgtgaaggggtggagcaggcagtggccagctttgcccttcctgctgtctctgtttctagctccatggttggcctggtgggggtggagttccctcccaaacaccagaccacacagtcctccaaaaataaacattttatatagaca

SEQ ID NO: 110726 - DNA, 1243 bp, Homo sapiens
ggacgagtggccgactctggagcccaggctgttgcttcccagactggtggtgaatcctccatagtctgggacaaatatggccctgaaggctccatgagcagacgagaaggctggacttcgcaactgggtcaccttagatccggaactagagaatgacaccgttgtttccgggaggaaaaagaaaaagcgcttgacccggaagctgcgtgtcccatccccgcgcctgcttctctgactggggtgaggccgcagcggactgccctttcccaagatggcgtcgaagataggttcgagacggtggatgttgcagctgatcatgcagttgggttcggtgctgctcacacgctgccccttttggggctgcttcagccagctcatgctgtacgctgagagggctgaggcacgccggaagcccgacatcccagtgccttacctgtatttcgacatgggggcagccgtgctgtgcgctagtttcatgtcctttggcgtgaagcggcgctggttcgcgctgggggccgcactccaattggccattagcacctacgccgcctacatcgggggctacgtccactacggggactggctgaaggtccgtatgtactcgcgcacagttgccatcatcggcggctttcttgtgttggccagcggtgctggggagctgtaccgccggaaacctcgcagccgctccctgcagtccaccggccaggtgttcctgggtatctacctcatctgtgtggtatgttgggggactgttggttggaggtgcctggctgggagtgaactgtgagtctaggcatggcagaaccccaggaaggtagacacagaacgaggccctgagtgcagttcctgatggcccagttccctgggaattgccctggccagcttctaggcctcaggggccctccaaatgcctgttgagaggcccttcctccaacagtgttgccacgaggtagactggccattaaatttcaaccctgagagccaggagaacaagatggggtgattctctcatggctccagcccccaaaggactagaaggggataaaggagaggtttggtgggggtcaggccccagctgggactctgccccctagagctgatgagagctctagggtagccacttatggttctccctggtgctaggggaggccagggtgactggagacatggacaggcgccaggccattaggtcttatcttaattaccgagtatatctctgtacagctctctgtgtgggctccca

SEQ ID NO: 110727 - DNA, 1802 bp, Homo sapiens
ggacgagtggccgactctggagcccaggctgttgcttcccagactggtggtgaatcctccatagtctgggacaaatatggccctgaaggctccatgagcagacgagaaggctggacttcgcaactgggtcaccttagatccggaactagagaatgacaccgttgtttccgggaggaaaaagaaaaagcgcttgacccggaagctgcgtgtcccatccccgcgcctgcttctctgactggggtgaggccgcagcggactgccctttcccaagatggcgtcgaagataggttcgagacggtggatgttgcagctgatcatgcagttgggttcggtgctgctcacacgctgccccttttggggctgcttcagccagctcatgctgtacgctgagagggctgaggcacgccggaagcccgacatcccagtgccttacctgtatttcgacatgggggcagccgtgctgtgcgctagtttcatgtcctttggcgtgaagcggcgctggttcgcgctgggggccgcactccaattggccattagcacctacgccgcctacatcgggggctacgtccactacggggactggctgaaggtccgtatgtactcgcgcacagttgccatcatcggcggctttcttgtgttggccagcggtgctggggagctgtaccgccggaaacctcgcagccgctccctgcagtccaccggccaggtgttcctgggtatctacctcatctgtgtggcctactcactgcagcacagcaaggaggaccggctggcgtatctgaaccatctcccaggaggggagctgatgatccagctgttcttcgtgctgtatggcatcctggccctggcctttctgtcaggctactacgtgaccctcgctgcccagatcctggctgtactgctgccccctgtcatgctgctcattgatggcaatgttgcttactggcacaacacgcggcgtgttgagttctggaaccagatgaagctccttggagagagtgtgggcatcttcggaactgctgtcatcctggccactgatggctgagttttatggcaagaggctgagatgggcacagggagccactgagggtcaccctgccttcctccttgctggcccagctgctgtttatttatgctttttggtctgtttgtttgatcttttgcttttttaaaattgtttttaaaaaaaaaaaaaaaaaaaaaaacaaaaaaaaaaaaaaaacaaaaaaaagaaacaccagaataacgagatgcaaagagaggagcacgcacagccacgaacagcaacgctaatcccatcagcaggagagaccagacctatacgtacacaccaacgcgagggacctgagcactgaaggacagcaccgaggggtgcaactccaggcgggtgccctgctttgactgaacagcgcgatgctgacacggccgtccgcactctcatacgatacttgcttgtggcgctgcagcggtcatcaacgcggagcctacatctgcggaggagtagatacatcatctatatccacctcatcactccacatcaataaactacttaacaaaaccaactccctcctaactacacacacaccaatacaacaaaattaatctcaaacacatatcacatacatccaattgcaattaaacctcaataacctcataatatacccatcgtattagatcatatacacaataacaacaccaaaaccaaactaaacaccacacgacaactacgaatgatcttaccaacaaacaagctaaagcaaacaccaaaacagctaataaacaaaacaataaagtcgacaaac

SEQ ID NO: 110728 - DNA, 976 bp, Homo sapiens
ggacgagtggccgactctggagcccaggctgttgcttcccagactggtggtgaatcctccatagtctgggacaaatatggccctgaaggctccatgagcagacgagaaggctggacttcgcaactgggtcaccttagatccggaactagagaatgacaccgttgtttccgggaggaaaaagaaaaagcgcttgacccggaagctgcgtgtcccatccccgcgcctgcttctctgactggggtgaggccgcagcggactgccctttcccaagatggcgtcgaagataggttcgagacggtggatgttgcagctgctgtttatttatgctttttggtctgtttgtttgatcttttgcttttttaaaattgttttttgcagttaagaggcagctcatttgtccaaatttctgggctcagcgcttgggagggcaggagccctggcactaatgctgtacaggtttttttcctgttaggagagctgaggccagctgcccactgagtctcctgtccctgagaagggagtatggcagggctgggatgcggctactgagagtgggagagtgggagacagaggaaggaagatggagattggaagtgagcaaatgtgaaaaattcctctttgaacctggcagatgcagctaggctctgcagtgctgtttggagactgtgagagggagtgtgtgtgttgacacatgtggatcaggcccaggaagggcacaggggctgagcactacagaagtcacatgggttctcagggtatgccaggggcagaaacagtaccggctctctgtcactcaccttgagagtagagcagaccctgttctgctctgggctgtgaaggggtggagcaggcagtggccagctttgcccttcctgctgtctctgtttctagctccatggttggcctggtgggggtggagttccctcccaaacaccagaccacacagtcctccaaaaataaacattttatatagaca

SEQ ID NO: 110729 - DNA, 1034 bp, Homo sapiens
gtctggactgctggccagttagcgggcacagaggcctgtgttcatccacgacccacttcccgggtttcccattcatgtgggcgctgtgattcccagtgacttctcttggcagagagagagtgagttgaaatgtcgagctctgaggtgagttggggcccagcatatgtagaacctgcgttgtgtcattcccacagagttgacacactcattttattagtgtcagtccccagcttttgctgttcagtttgggattttttgactttacaatgatgcaaaagcaatgcacattcaggagaaatcacactttgaatacccaaacaaccattctgtttttcactttcagtacagcattcagcaaattcatgagagagtcaccatttattacaaaacaggctttgatcctttgatcccagcacttctggaggccaaggcgggaggattgtttgaggctgggagtttgaaaccagcctggggaacaaaatagggaccccatctctccaaaaatttaaaaattagacaggtgtggtgacatgtgcctgtagtcctagctactcggttggctgaggagggacggtcgcttgagcccaagaggagaggctgcagtgagctatgacaccactacactccaacctcggtgacagaatgagaccctgtctcttaaaaaaaaattaaataaaataggctttgcattagatgattttgcccaactataggctaatgtagtaacacttaaggcagaataggctaagctgcaatgttcggtgccttagctgtagttgatgcgtttttgacttcacgatattttcaacctgacgatgggtttatcaggacataaccccatcgtaagtcaaggagcatctgtagtagtgttgttaccattaaaaaaaaaaaagccaaaacatacaaaaagtcacctaatagtgaaaccaaaacaaccctcttgcacagggaatgaaaaggatgggaactctctagaacataggcagccccccgcaccccccgacatcttatagtgggctagcacttgcccagca

SEQ ID NO: 110730 - DNA, 5397 bp, Homo sapiens
  misc_feature (2)..(2): n is a, c, g, or t
gncgcggaggcggatgggcgcggctccctcccccactcaggcctcttcacggggcggggggccgggtcccccagcccccacccgcgccgtgtccagctcctcgcgtgctcgcggcggagccctgagcgcactgggtccgagtcctgcgcgccccctcaccacctcccccgcacctgctcctcctcctcggtcccgcccagcgcgccagcagcccgatccccagtgctgggagaagagagggggcgcaggcggcgacacaaagggtggagcggcgggaccgggacccgggaggctgcgcggcatggacgccgagtaccctgcctttgagcccccgctctgcagcgagctcaagcacctgtgccggcggctgcgggaagcgtaccgcgagctcaaggaggacctcacgcccttcaaggatgaccgctactacaggctggcgcccatgcggctctacacgctctccaagcgccactttgtcctcgtgtttgtcgtcttcttcatctgctttggcctgaccatcttcgttgggatcagaggacctaaagtgatccagacttctgcggctaatttttcactaaataatagcaaaaagctaaagccaattcaaatactttcaaatccactgtctacatacaatcagcaactatggctgacatgtgttgttgagttggatcaatcaaaagaaacttctattaagacaagctttcccatgactgttaaagtcgatggtgtagctcaagatggaaccacgatgtacattcataacaaagttcacaaccggacaaggaccctcacatgtgcagggaaatgtgcggagattattgtggctcaccttggctacctgaactacactcagtatacagtgatagtgggatttgaacacctgaagctccccatcaagggaatgaacttcacatggaagacttataaccctgccttctcccggttggaaatctggttccggtttttctttgtggtgctcaccttcatcgtcacttgcctgtttgcgcattccctccggaaattttccatgagagactggggcatcgagcagaagtggatgtctgttctcctgcctctgctgctactttacaatgatccgttcttccccctctccttcctggtcaacagctggctcccagggatgctggatgacctctttcagtccatgttcctgtgcgccctgctgctcttctggctgtgcgtgtaccacgggattcgtgtccagggagaaagaaagtgtttaactttctatttgcctaaattcttcattgttggactattgtggttggcttctgttacgctaggaatatggcaaacagttaacgaattacatgatccaatgtaccagtatcgagttgataccggaaattttcagggaatgaaggtcttcttcatggtggtggcagcggtgtacattctgtacctcttgttcttgatagtgcgggcgtgttccgagctacgtcacatgccttatgtggatctcaggttgaaatttttgactgcattgactttcgtagtacttgtcattagcatcgccatcctttatttgagatttggggcgcaagtactacaagacaattttgtagcagagctgtcaactcactaccagaattcagccgagttcttatctttctatggcctgttgaacttctatctctacaccttggcctttgtatattctccatcgaagaatgccctctatgagtcccagctgaaagacaatcctgccttctccatgctgaatgactcggatgatgatgtgatttatgggagtgactatgaggaaatgccgctgcagaacggccaggccatccgggccaagtacaaggaggagtcagatagtgactgagccccggccagcccagcgaggcgacaagatgcctggatgctttccccggtgaccgtctgctgaccttcccctgttatattcagatttttcttacaagcagagatttcctgttcatttgtttacatatttttttaaaggaaaaccaaaactgagggtaaatttaaatgtttagccaaatttattgtcatggtggctacgagaagaggcattgataacaagtttcaacagccaaatccttttttacagagatttcagatgagcgtgttttcagtgatgaggaaatttcacgtttttagtacagtgaattatgtacttttttttcctgtaatcattcactgattccaagttcacgggcagcctgtgactaggtcctcagcgtgacagcatcaccctctttcttcccttttccatggtactgttttgtgaccctttaaactcaaagggaagccttatctgtggctgcttcagggcagtccttcctcgttgagtggccagtgccctgggtaaccaggtggctgaagtgattggtcagttatgtggactgcgttttgtgcagtgtgtgagttatgactcatcgggaatgggagatgctggggttccaacccttcacgtcaccaaaggggaagtaatagtgtggagttctgaggagggtttgataagttgaataaggaaaggctaagataatttacaggttaccaactcatgtggggaaggtcttactgccatggtgcttttcaggggcctgtgtgtacacacatgattaaatggatttgcctgtgggaggtatgggcaggagaggaacccttaccattccagtaaatagcagtttctgcaattctgttgaatatgaaatgccatagagctttatttatttatgtaagtaaaagctaaatgaggggccaggtgcagtggctcacatctgtaatctcaacactttgggaggccaaggtgggaggatcacttgagcccaggagtttgagaccagcctgggcaacacagggagaccccgtctctataaaacatttagaaagttggctgggcatgctggggcatgcccatagtcccagctactcaggaggctgaggtgggaggattgcttgagccctggaggtcaaggctgcagtgagccatgattgcaccactgcactccagcctgggtgtcagagcgagaacccgtgtcataaataaataaagctacatgaaagattgatagaatattttagattatttattggccaaaagtttttaaaactcatatttggaagcaaaatgaaaagcaagtaaaatgttttaaatggttcatggaaaacgtatttgggtagaaggcaactcgtgcttccggaaggggttccctgtcctccatgtgtccacatggcggtcaggtagggacgacctgttctgtaaagtccttggcactgctgaatctgtggcatcatagaaggccctggagcttccccgttcctttcagtcagggactccatatagagtctcatgtggacgtctcccgtgctttcctcttgacctctacagtcacacttctgttaacatctggtaactgtgggcaacctgactgatgccgtcttggcaattgaggtccagaagatgatagttccgcaacgcaagcagtacctactttttttcttcatctatgcattgactctcagattaccatgcagagcttcacgttatcatccacgttaagtagtgctaggtaggaccttagagatgttcatgagaaactatttgttatgactttcctttgtatctttccttttaatttaaactttaatgataatgtacttttaatatggattctattcacatttgttttaaaaaccttgtaaatatgaatgtttaagacaacttactgcaagggtaattcaagtttacatgatttttaaatttgcaatgatgttttttttattctgtgtattgaaaaaaattttctgttaccaaattttacaacttctaataagactactataactttatgtaaactgatgaagatgtgctgattaacatattctgtgatatggtttacaacttttaatcataattgtccatgattttggaatgctgttatttatcagtaaatgtaaaatatttgaggcatttagccatacacacactagaactttttaaaactttgtcctatagtgtaattataaactgatgactattatcttcatacattgagtcttcatgcatcaatgaaatgaaaaatataggattatttatttactttttgtaactaagtgggaaataagaaaaaaagttagaaagtacttaaggggaaaatcgttcttactaagtcatgtattttcaacttgtcttccctggtatatcataaataccgacatattacataccccatgtaaaattttgcttaaactctctagcacttggcatgtagaatatgtaccataggtatcaggttaaaacactaaagtctgccagaaacttttgacagtagcaagaaaattgttgaagaaaaaataaattatttactgagggtagttatgttaaagttttgcgaacttaaagggctgactttagttccttcatggtaatggcttgagtaacatcatctttgggattttttaaatactggtccagtctaggagaacctggaagatgaccagaggtatttcagtttccctagggagagcttcgttatccatgtggatgataagtctgcttgatttattattaaatcattatagcagtgaagtggtgccattttctctctcttaagccccatttgaaaggctagagaaggggatatatatactatgttcaaggtttgtaaggttgttaatgtacataattgcagattgcaataaaagcttagatacattttgtaaacccaacccactaaatgagcaggttacaagacaaatgtcaccagcctcaagtattttatgaactatttactgagggtagttatgttaaatagattataatgtggtaaattatttcctgaatcctttatcacaggaaaaacacagaccctcataaaagggataattaaaacggatgtgtctgaacatttagtgaagatgagacttaaaacatgaaagtgtatttgtgtattttgagggttttagaaaccggttgccttagaggttagacttttgaagaaaaaaaaaaaaagatacagatcttttcccctggccaaagggaagttgtattagtctgtgacatcttgtgatgctgtttatcttggtttgacattggagatacgctagtaactgtgataccatactataaaacagaagaattttctgctactaaaaactgcctttttacaaaatgactgtaaatatttgtaaaataaaataacactaaactttaagcccaaaaggagagatagagccatgtgttcagttgtggacctgtccgtggggcacagtgccaccccatcacagtgttgctgtcatcaggcaaaagtgaatgtttgtttatggcaaattcgtcttttgcgaatggcttaattctgacactacctttctgggaaatgttaataaatttttaatattcaaatc

SEQ ID NO: 110731 - DNA, 416 bp, Homo sapiens
tcgtgttgcacagcagagtggatattctgtgtctgtgtttgtgtgtttatatcttctacttacacattgtataatctctaaagaaaaaccaggtgaattaaggtcatctccgtgtaatgtgtgagtctttcttggaatttggaaaaaaatactaaattatcaatattgctataatctgcttttgtccttttctgttacactttaggacctaaagtgatccagacttctgcggctaatttttcactaaataatagcaaaaaggtaagactgggtctgagtggcagctgggtggtggggtgcattataaacctcaggtcactgagaaatggttccgcttagagtctttaaggtagccttcccttgccttgcggcttctcaggcaacacgaatgagtgcaacacgaataagggtaccga

SEQ ID NO: 110732 - DNA, 455 bp, Homo sapiens
aagagacctttgagaccgtctaacttctgacagctctttattttcctcttccacactgacacaccattccagcgggaattaaatcatagcttcgctctttcaattttctatcaccaactgcttctgctcaccccgtcctcctctccctgacccccagttcccagggcccatcagtccagaaagcacagttcttcccgtggccttcctgcccttttcatgtaacttgatctcttctggccctgccctcggtgctggtgacaggagcgccaccagatggctcagtgggtccaggtttccactgatgtgagaggccatagttcacctgttatttactgtgacctcgaagagtgcttgtgacccctggctgtgggcttgaactgtggagtcctgacgtctgggtaatggacccccgggcactggcgggtgcttggcactagaaggggctgctgatggcg

SEQ ID NO: 110733 - DNA, 2317 bp, Homo sapiens
ttcatttcgcttccaaatatgaaaagcaagtaaaatgttttccatgaaccatttaaaatgttttaaatggttcatggaaaacgtatttgggtagaaggcaactcgtgcttccggaaggggttccctgtcctccatgtgtccacatggcggtcaggtagggacgacctgttctgtaaagtccttggcactgctgaatctgtggcatcatagaaggccctggagcttccccgttcctttcagtcagggactccatatagagtctcatgtggacgtctcccgtgctttcctcttgacctctacagtcacacttctgttaacatctggtaactgtgggcaacctgactgatgccgtcttggcaattgaggtccagaagatgatagttccgcaacgcaagcagtacctactttttttcttcatctatgcattgactctcagattaccatgcagagcttcacgttatcatccacgttaagtagtgctaggtaggaccttagagatgttcatgagaaactatttgttatgactttcctttgtatctttccttttaatttaaactttaatgataatgtacttttaatatggattctattcacatttgttttaaaaaccttgtaaatatgaatgtttaagacaacttactgcaagggtaattcaagtttacatgatttttaaatttgcaatgatgttttttttattctgtgtattgaaaaaaattttctgttaccaaattttacaacttctaataagactactataactttatgtaaactgatgaagatgtgctgattaacatattctgtgatatggtttacaacttttaatcataattgtccatgattttggaatgctgttatttatcagtaaatgtaaaatatttgaggcatttagccatacacacactagaactttttaaaactttgtcctatagtgtaattataaactgatgactattatcttcatacattgagtcttcatgcatcaatgaaatgaaaaatataggattatttatttactttttgtaactaagtgggaaataagaaaaaaagttagaaagtacttaaggggaaaatcgttcttactaagtcatgtattttcaacttgtcttccctggtatatcataaataccgacatattacataccccatgtaaaattttgcttaaactctctagcacttggcatgtagaatatgtaccataggtatcaggttaaaacactaaagtctgccagaaacttttgacagtagcaagaaaattgttgaagaaaaaataaattatttactgagggtagttatgttaaagttttgcgaacttaaagggctgactttagttccttcatggtaatggcttgagtaacatcatctttgggattttttaaatactggtccagtctaggagaacctggaagatgaccagaggtatttcagtttccctagggagagcttcgttatccatgtggatgataagtctgcttgatttattattaaatcattatagcagtgaagtggtgccattttctctctcttaagccccatttgaaaggctagagaaggggatatatatactatgttcaaggtttgtaaggttgttaatgtacataattgcagattgcaataaaagcttagatacattttgtaaacccaacccactaaatgagcaggttacaagacaaatgtcaccagcctcaagtattttatgaactatttactgagggtagttatgttaaatagattataatgtggtaaattatttcctgaatcctttatcacaggaaaaacacagaccctcataaaagggataattaaaacggatgtgtctgaacatttagtgaagatgagacttaaaacatgaaagtgtatttgtgtattttgagggttttagaaaccggttgccttagaggttagacttttgaagaaaaaaaaaaaaagatacagatcttttcccctggccaaagggaagttgtattagtctgtgacatcttgtgatgctgtttatcttggtttgacattggagatacgctagtaactgtgataccatactataaaacagaagaattttctgctactaaaaactgcctttttacaaaatgactgtaaatatttgtaaaataaaataacactaaactttaagcccaaaaggagagatagagccatgtgttcagttgtggacctgtccgtggggcacagtgccaccccatcacagtgttgctgtcatcaggcaaaagtgaatgtttgtttatggcaaattcgtcttttgcgaatggcttaattctgacactacctttctgggaaatgttaataaatttttaatattcaaatc

SEQ ID NO: 110734 - DNA, 810 bp, Homo sapiens
caaaagtctaacctctaaggtaaccggtttctaaaaccctcaaaatacacaaatactatgttcaaggtttgtaaggttgttaatgtacataattgcagattgcaataaaagcttagatacattttgtaaacccaacccactaaatgagcaggttacaagacaaatgtcaccagcctcaagtattttatgaactatttactgagggtagttatgttaaatagattataatgtggtaaattatttcctgaatcctttatcacaggaaaaacacagaccctcataaaagggataattaaaacggatgtgtctgaacatttagtgaagatgagacttaaaacatgaaagtgtatttgtgtattttgagggttttagaaaccggttgccttagaggttagacttttgaagaaaaaaaaaaaaagatacagatcttttcccctggccaaagggaagttgtattagtctgtgacatcttgtgatgctgtttatcttggtttgacattggagatacgctagtaactgtgataccatactataaaacagaagaattttctgctactaaaaactgcctttttacaaaatgactgtaaatatttgtaaaataaaataacactaaactttaagcccaaaaggagagatagagccatgtgttcagttgtggacctgtccgtggggcacagtgccaccccatcacagtgttgctgtcatcaggcaaaagtgaatgtttgtttatggcaaattcgtcttttgcgaatggcttaattctgacactacctttctgggaaatgttaataaatttttaatattcaaatc

SEQ ID NO: 110735 - DNA, 5798 bp, Homo sapiens
  misc_feature (2)..(2): n is a, c, g, or t
  misc_feature (5538)..(5538): n is a, c, g, or t
gncgcggaggcggatgggcgcggctccctcccccactcaggcctcttcacggggcggggggccgggtcccccagcccccacccgcgccgtgtccagctcctcgcgtgctcgcggcggagccctgagcgcactgggtccgagtcctgcgcgccccctcaccacctcccccgcacctgctcctcctcctcggtcccgcccagcgcgccagcagcccgatccccagtgctgggagaagagagggggcgcaggcggcgacacaaagggtggagcggcgggaccgggacccgggaggctgcgcggcatggacgccgagtaccctgcctttgagcccccgctctgcagcgagctcaagcacctgtgccggcggctgcgggaagcgtaccgcgagctcaaggaggacctcacgcccttcaaggatgaccgctactacaggctggcgcccatgcggctctacacgctctccaagcgccactttgtcctcgtgtttgtcgtcttcttcatctgctttggcctgaccatcttcgttgggatcagaggacctaaagtgatccagacttctgcggctaatttttcactaaataatagcaaaaagctaaagccaattcaaatactttcaaatccactgtctacatacaatcagcaactatggctgacatgtgttgttgagttggatcaatcaaaagaaacttctattaagacaagctttcccatgactgttaaagtcgatggtgtagctcaagatggaaccacgatgtacattcataacaaagttcacaaccggacaaggaccctcacatgtgcagggaaatgtgcggagattattgtggctcaccttggctacctgaactacactcagtatacagtgatagtgggatttgaacacctgaagctccccatcaagggaatgaacttcacatggaagacttataaccctgccttctcccggttggaaatctggttccggtttttctttgtggtgctcaccttcatcgtcacttgcctgtttgcgcattccctccggaaattttccatgagagactggggcatcgagcagaagtggatgtctgttctcctgcctctgctgctactttacaatgatccgttcttccccctctccttcctggtcaacagctggctcccagggatgctggatgacctctttcagtccatgttcctgtgcgccctgctgctcttctggctgtgcgtgtaccacgggattcgtgtccagggagaaagaaagtgtttaactttctatttgcctaaattcttcattgttggactattgtggttggcttctgttacgctaggaatatggcaaacagttaacgaattacatgatccaatgtaccagtatcgagttgataccggaaattttcagggaatgaaggtcttcttcatggtggtggcagcggtgtacattctgtacctcttgttcttgatagtgcgggcgtgttccgagctacgtcacatgccttatgtggatctcaggttgaaatttttgactgcattgactttcgtagtacttgtcattagcatcgccatcctttatttgagatttggggcgcaagtactacaagacaattttgtagcagagctgtcaactcactaccagaattcagccgagttcttatctttctatggcctgttgaacttctatctctacaccttggcctttgtatattctccatcgaagaatgccctctatgagtcccagctgaaagacaatcctgccttctccatgctgaatgactcggatgatgatgtgatttatgggagtgactatgaggaaatgccgctgcagaacggccaggccatccgggccaagtacaaggaggagtcagatagtgactgagccccggccagcccagcgaggcgacaagatgcctggatgctttccccggtgaccgtctgctgaccttcccctgttatattcagatttttcttacaagcagagatttcctgttcatttgtttacatatttttttaaaggaaaaccaaaactgagggtaaatttaaatgtttagccaaatttattgtcatggtggctacgagaagaggcattgataacaagtttcaacagccaaatccttttttacagagatttcagatgagcgtgttttcagtgatgaggaaatttcacgtttttagtacagtgaattatgtacttttttttcctgtaatcattcactgattccaagttcacgggcagcctgtgactaggtcctcagcgtgacagcatcaccctctttcttcccttttccatggtactgttttgtgaccctttaaactcaaagggaagccttatctgtggctgcttcagggcagtccttcctcgttgagtggccagtgccctgggtaaccaggtggctgaagtgattggtcagttatgtggactgcgttttgtgcagtgtgtgagttatgactcatcgggaatgggagatgctggggttccaacccttcacgtcaccaaaggggaagtaatagtgtggagttctgaggagggtttgataagttgaataaggaaaggctaagataatttacaggttaccaactcatgtggggaaggtcttactgccatggtgcttttcaggggcctgtgtgtacacacatgattaaatggatttgcctgtgggaggtatgggcaggagaggaacccttaccattccagtaaatagcagtttctgcaattctgttgaatatgaaatgccatagagctttatttatttatgtaagtaaaagctaaatgaggggccaggtgcagtggctcacatctgtaatctcaacactttgggaggccaaggtgggaggatcacttgagcccaggagtttgagaccagcctgggcaacacagggagaccccgtctctataaaacatttagaaagttggctgggcatgctggggcatgcccatagtcccagctactcaggaggctgaggtgggaggattgcttgagccctggaggtcaaggctgcagtgagccatgattgcaccactgcactccagcctgggtgtcagagcgagaacccgtgtcataaataaataaagctacatgaaagattgatagaatattttagattatttattggccaaaagtttttaaaactcatatttggaagcaaaatgaaaagcaagtaaaatgttttaaatggttcatggaaaacgtatttgggtagaaggcaactcgtgcttccggaaggggttccctgtcctccatgtgtccacatggcggtcaggtagggacgacctgttctgtaaagtccttggcactgctgaatctgtggcatcatagaaggccctggagcttccccgttcctttcagtcagggactccatatagagtctcatgtggacgtctcccgtgctttcctcttgacctctacagtcacacttctgttaacatctggtaactgtgggcaacctgactgatgccgtcttggcaattgaggtccagaagatgatagttccgcaacgcaagcagtacctactttttttcttcatctatgcattgactctcagattaccatgcagagcttcacgttatcatccacgttaagtagtgctaggtaggaccttagagatgttcatgagaaactatttgttatgactttcctttgtatctttccttttaatttaaactttaatgataatgtacttttaatatggattctattcacatttgttttaaaaaccttgtaaatatgaatgtttaagacaacttactgcaagggtaattcaagtttacatgatttttaaatttgcaatgatgttttttttattctgtgtattgaaaaaaattttctgttaccaaattttacaacttctaataagactactataactttatgtaaactgatgaagatgtgctgattaacatattctgtgatatggtttacaacttttaatcataattgtccatgattttggaatgctgttatttatcagtaaatgtaaaatatttgaggcatttagccatacacacactagaactttttaaaactttgtcctatagtgtaattataaactgatgactattatcttcatacattgagtcttcatgcatcaatgaaatgaaaaatataggattatttatttactttttgtaactaagtgggaaataagaaaaaaagttagaaagtacttaaggggaaaatcgttcttactaagtcatgtattttcaacttgtcttccctggtatatcataaataccgacatattacataccccatgtaaaattttgcttaaactctctagcacttggcatgtagaatatgtaccataggtatcaggttaaaacactaaagtctgccagaaacttttgacagtagcaagaaaattgttgaagaaaaaataaattatttactgagggtagttatgttaaagttttgcgaacttaaagggctgactttagttccttcatggtaatggcttgagtaacatcatctttgggattttttaaatactggtccagtctaggagaacctggaagatgaccagaggtatttcagtttccctagggagagcttcgttatccatgtggatgataagtctgcttgatttattattaaatcattatagcagtgaagtggtgccattttctctctcttaagccccatttgaaaggctagagaaggggatatatatactatgttcaaggtttgtaaggttgttaatgtacataattgcagattgcaataaaagcttagatacattttgtaaacccaacccactaaatgagcaggttacaagacaaatgtcaccagcctcaagtattttatgaactatttactgagggtagttatgttaaatagattataatgtggtaaattatttcctgaatcctttatcacaggaaaaacacagaccctcataaaagggataattaaaacggatgtgtctgaacatttagtgaagatgagacttaaaacatgaaagtgtatttgtgtattttgagggttttagaaaccggttgccttagaggttagacttttgaagaaaaaaaaaaaaagatacagatcttttcccctggccaaagggaagttgtattagtctgtgacatcttgtgatgctgtttatcttggtttgacattggagatacgctagtaactgtgataccatactataaaacagaagaattttctgctactaaaaactgcctttttacaaaatgactgtaaatatttgtaaaataaaataacactaaactttaagcccaaaaggagagatagagccatgtgttcagttgtggacctgtccgtggggcacagtgccaccccatcacagtgttgctgtcatcaggcaaaagtgaatgtttgtttatggcaaattcgtcttttgcgaatggcttaattctgacactacctttctgggaaatgttaataaatttttaatattcaaatcaaaaaaaaaaaaaaaaaaaaaaaaaaaaaaaaaaaaaaaaaaaaaataaccccttttacaacatttataaccctcaaaacactccctttacccaacttaataaccccttaacacattcccctctttacaattaataacttncaaaaaaccccctctcactccccttccatcattacacaccctaatacccatttcaaaatttaccctcaatttttctctaaaatcctttaaatattcttatatcattaactattaaccattaatccaaatctcaaaatccctattaacctaacaaataaccgtaataatccttatgatcttcatcttgtccaaaatcccctattacccattttccaccttactcctccactattctcttcacccctcctttaccctcatct

SEQ ID NO: 110736 - DNA, 889 bp, Homo sapiens
  misc_feature (2)..(2): n is a, c, g, or t
gncgcggaggcggatgggcgcggctccctcccccactcaggcctcttcacggggcggggggccgggtcccccagcccccacccgcgccgtgtccagctcctcgcgtgctcgcggcggagccctgagcgcactgggtccgagtcctgcgcgccccctcaccacctcccccgcacctgctcctcctcctcggtcccgcccagcgcgccagcagcccgatccccagtgctgggagaagagagggggcgcaggcggcgacacaaagggtggagcggcgggaccgggacccgggaggctgcgcggcatggacgccgagtaccctgcctttgagcccccgctctgcagcgagctcaagcacctgtgccggcggctgcgggaagcgtaccgcgagctcaaggaggacctcacgcccttcaaggatgaccgctactacaggctggcgcccatgcggctctacacgctctccaagcgccactttgtcctcgtgtttgtcgtcttcttcatctgctttggcctgaccatcttcgttgggatcagaggtaaggttcggtttttactcattgaatcttttgccatgcgcggtggccctggcgtattgctttcggtcagcccagctgtgcccctatcttccactgctaagggccccagcgtggagggagaagtgtccacagggtggatggggtcccagccctgcgcttctagctgctctgtctcttgtgggggaggtgtgcagtaagtagccccgagtgaccctggccatgccctgtgcagcagccaggggcagccttgaccacatgccttcattggccaagcaaacgtttctaatctgctgtgcacgagacccagctgggcgctggtgtgtccagaacatgctgcctggttggggagacag

SEQ ID NO: 110737 - DNA, 325 bp, Homo sapiens
ttggtttgagagtttgtttccaattctttatttcattattgtgtctagagaccttgattcaccgtatgcccgtggccttcctgcccttttcatgtaacttgatctcttctggccctgccctcggtgctggtgacaggagcgccaccagatggctcagtgggtccaggtttccactgatgtgagaggccatagttcacctgttatttactgtgacctcgaagagtgcttgtgacccctggctgtgggcttgaactgtggagtcctgacgtctgggtaatggacccccgggcactggcgggtgcttggcactagaaggggctgctga

SEQ ID NO: 110738 - DNA, 395 bp, Homo sapiens
gcttaatttttgttttttatttttcaaaataaaatgcaagtggaatttacttccagagttgttaatgagtttctttctttttcagatctcaggttgaaatttttgactgcattgactttcgtagtacttgtcattaggtaagaagaccttatttcttgaaaacagcaaaacggaatttttcttttactgtcaggaatatctgttgcctccttttgtggagtggatttcagggtacttctagcccagtagactcatgaggttagagggcctcccaccaaggctgggcagccgagagcagccgtcagcctggagagcatgtttttgttgtaagcggccgaggactggagcacgttcacttgcacactcggcccgcgctgggcatgttctgtccttgc

SEQ ID NO: 110739 - DNA, 561 bp, Homo sapiens
gtgacctcgaagagtgcttgtgacccctggctgtgggcttgaactgtggagtcctgacgtctgggtaatggacccccgggcactggcgggtgcttggcactagaaggggctgctgatggcgggaggagtggtcgggctgtaggcagagcctctgactgatgtgtccagatgccgcgttccttcccttgacagcaccaccagccgagttcttatctttctatggcctgttgaacttctatctctacaccttggcctttgtatattctccatcgaagaatgccctctatggtaagccaccctggggtctggactgctggccagttagcgggcacagaggcctgtgttcatccacgacccacttcccgggtttcccattcatgtgggcgctgtgattcccagtgacttctcttggcagagagagagtgagttgaaatgtcgagctctgaggtgagttggggcccagcatatgtagaacctgcgttgtgtcattcccacagagttgacacactcattttattagtgtcagtccccagcttttgctgttcagtttgggattttttg

SEQ ID NO: 110740 - DNA, 317 bp, Homo sapiens
aatgtgagtgagggtactggctgagaaggatatagcaaggtatgaaaaataaagggtttaggctgggggccaagggccagtgttctctgtgcacagagaacacagagaatttttcctgcacaaaattccaaggaatttgaaaattatatatttaagctaagtataaagtttattaccaggtgtttttatgaatgtagaatgatacaacatattatttaatggattattaacttcattattactttttttttttttgacacaaagttgcactctgttacccactgcatccagcctggtctacagagcaagactgtcac

SEQ ID NO: 110741 - DNA, 156 bp, Homo sapiens
  misc_feature (3)..(3): n is a, c, g, or t
  misc_feature (5)..(6): n is a, c, g, or t
  misc_feature (156)..(156): n is a, c, g, or t
agngnnactctgtagctatcatggcacttagctatctgtattgtaattatccatctccttcactaggctgtaactctgtgaggacaaggaccacgtctgtctttctcactgagatatattcagtgcctgacacaaaataaaggatcatcattcttn

SEQ ID NO: 110742 - DNA, 272 bp, Homo sapiens
aaatctctttcgtcaatactgagggacagattttttaagtgaacataaaatccaagaggggaacgagaacgtgttcttctgggagattttgaatgagaccgttttcgaaaatgtctatcattaattcctcttggtggagaatgttcttcagatctcctaagaacgtcaccctccttaactgcattaccaccaaactcaatccactgttgttctgatccttgcattacttctataaatcttgaacccataaaacttctatgacatttaagacc

SEQ ID NO: 110743 - DNA, 308 bp, Homo sapiens
agacggggcacacagcagttttgtttaggtataaggaagatgacttagggctagaaaatggatataaatgctcacacctgttcaagatggtagcacccagcatgttcttcctgacgttacattgtcccctgtcctttctcctgagtgtcttactttatcattgtcctgtctccttgttctttgtctttccatccttttccctcctattttacaactgctggtctcaatgccttaggaagttctttatataaatgtctggccctggactacatggcactgctgcataagttagtaaaaagtatacccct

SEQ ID NO: 110744 - DNA, 476 bp, Homo sapiens
aggaaaaaacaagtgaatatgaagacagatcagtggaaattatccaatgaggactaaagaaaaaagattgaagtaaaaattaacagatactcaggaatcttttagctaatactgtacatataatcagagtcctagaaggggagaaaagggagaatagggcagtagaactatttgagaaaataaacgctgagtatttcccaaatttggtgaaagacatccattaatagattcaagatactcaaccaacaccaagcaggataaatacaaagaaggtcagccaaggtgcctcacagccaaactgttgaaaaccaaaaataaaaagcaaatctgaaacatctaccaaagaaaaggacaataggatgatccaattggcagctgacctctcagcagaaactatggaggccagaagacagtgaagcatctttcatgtgctgaaagaaaaaaatgattagcctggaattcccctgtgaaaaaca

SEQ ID NO: 110745 - DNA, 313 bp, Homo sapiens
aatcaagatgctgggtttctagttagaagtttcaatagcatctaatacagaatctggtatgcaatagtttttaaagaaagtgatgcttcaccctttcttctctctgcattccctaaaacggctagcacagagcctgacatgtggtaggtacaaacaaatacttggactggataattatgcatgaaatcccagacctcagggtgatcagggcttaagggggcagtggtaatggtagacacaggactgcggctatagtcacagaacaggcctcccaggcagcattcatcctgctattgaaacttctaaaagtagg

SEQ ID NO: 110746 - DNA, 564 bp, Homo sapiens
ttgttttaaattgaaatctaatttccttttatatctggactgaggacccatggctatttgtaaaatggattaaatttaggtgttttaatcaagtgtaggaatgataaacttgaatccagggcaggcccgaacttttttttttttcatattccctttgttactccacaaacaaccagagctgtcacgtgtaaaaatggtgatcctataataattcttatatttaccacactcttagttgcataatcagctcgcttacataatctagaaaaatataatagaaagttcacttcaagcaaaacaatggaattgactgtaaatgggtatgcaaaaacttgagttagataaaatatctttatgacaaagaatggtgagattgactctaataaaatatgttcttttaaaaaatcagtattttataaagtaaaaaaaaaatgtttcatgttaagtctttgaaaagtctttgtgatatctgcctttgtcctgtctcacacatcacctatcctgcttgaggcacaaaaccagttgatgccatggagtgagtggtgttcatgaaagttcactggt

SEQ ID NO: 110747 - DNA, 472 bp, Homo sapiens
ttatctcgtacttctggtgacaagggagaaaaaaataggacatattttttgccgcttttctctaaaatacatttaacatcaaaattaaactacccacagtacactttactactgtttatttagagaaaatgaagaccaatccaacatttctagaacagggatttcaataaagggcggagatgtaagaggctggaaataaaaataaatggaaatgactgcaaacgcaaaacgcttcatctgggcttcacgctgaagggactcgccaccatcgtgagcggcagcggaggattctggcaactgaaaggttctaacctgcccggctggcggtggggtgagggccgcggagagagaacaacgggaaagagacgacgggcttctcatcagctctgatttcccacagctctgtgctctgccttgcactgcctaagcagtatgagatttttgtattaaacgtgcatgtgaattctaaaag

SEQ ID NO: 110748 - DNA, 559 bp, Homo sapiens
gaaataaaactatcatttttaacacttttctggggggaaatattattcgaatttcataacaattagcttgatgaccttttagaatatatatgtagaccattgtgatgttggggctgcctgttgtaaataggatttttgtgagcttgattgtacaaaattgaaatttgcaaacatcttactgagtttactgtttccttctgggtgttaggcctactgtagaaatcagaaaaatcggaaatattttgttgcttgctttgtgaaactcatgatgtgacatggattaaatttctaaaaagtttatttaattgcctttaaaattagtatgtcaaaaagtttatttatttatttatttatttattttaatttgaaacagtctctctctgtcacccagactggagtttagtggcatgatctcagctcactgcagctaccacccccgggtttaaacgattcttatacctcagcctcctgagtagctaggattacaggggcccgccaccacacccaactaatttttgtatttttagtagtgatgggtttttgccatgttggccaggct

SEQ ID NO: 110749 - DNA, 419 bp, Homo sapiens
cagatcttgtgattggcgggtatgttggctcccatctgtatcccaacattttgggaggccaaagaggaaggattgcttgaggccaagagctagagatcagcctggggaaaataggaagatcctgcctttacaaaattaaaatcagctggacatggtgatgcatgcccgtagttccagccactggagaggctaaggtgggaggattgctttagcctaggaggtcaaggctgcagtgagctatgatcacatcactgcactccagcctcagtggcagagtgggactctgtctccgatataagaaaaggaagaaacaccagggatgcacatgcacagagaaaaggccatgtgagcacaaagcaagaagaaggccacctgtaagccgaggagacaggcctcaggagaaaccaaatctgccaata

SEQ ID NO: 110750 - DNA, 247 bp, Homo sapiens
tttcaattgaatttagtcagcacatttataagcttagttaagttggttaatttcaactcagaatggccagtatacatggccttttacctcccattctggacacattttattcagtcagtctttcaacaaataattattgcatatgttctatgtgccagatactgtgctaatccctggatattctactgcaaatgaggcagttacaattcttgccctctatagagctgacagtccatgggggtgataa

SEQ ID NO: 110751 - DNA, 451 bp, Homo sapiens
agaggagccccatgttccagcagaaagcaggggaagggggaaccctctgaggaggacaagcccacccaggctgtagacagcttgtgtgcagcagcagaagcaggccacacatttttaagggaggaaggcggtttcccaggtccagaccccaagcatgacaggtctgcgaaacaggacagcaaactgcctgaaccaagaagctgacaatgtcctggtttctcagagatgcccaccctccacccctgccaaagcccctgggaccctggagctctgctagagacagagctggtcagagatgctctccacaccctggctgagtcaccaatgggccttgggacctgagcgagccactgacctctggggtagagttcccctcagtaatcagggggccagaccctaggatcccgaaccccgagagagcatgagggtcaaatggaaggatgggaaaatg

SEQ ID NO: 110752 - DNA, 144 bp, Homo sapiens
ttacttttcctgatttatacactattattctccaacatttcacattccttcttcttaatatcacaaataaaattattattttatacagatgatttttggattggctttagctacacttaactattttttaaatttatttatttt

SEQ ID NO: 110753 - DNA, 400 bp, Homo sapiens
cttgaattttagatctgaaactatgaaactactagaagaaaacactggggaaccaccccgtgacattggtctgagcaaatatttcttgtgtaagttctcaaaagcacaggcaaccagagcaaaaatagacaattggaattacataatgctaaaaagcttctgcaccacacaggaaacaacaaactgaatagacaaaccacagatagagagaaaatctttgcaatctaactgacaagggactaataacctgaatatataaagaactcaaacaactaaatagcaaagaaacaaataatttcatttttaaaaatgggcaaaaaattgggacaaacatttttcaaaaagaagacatacaaatggcctacagttatattttttaaatgtttgacattgctaatca

SEQ ID NO: 110754 - DNA, 445 bp, Homo sapiens
gccgtagggcgcgtgtgtggtgggtggcaggggagatgagggcagggtggaaatgactcctttttggacttgatagatttgaaatctgttcccatgaggcatccaaatgaaggtgtcaaaaataagttagacataggtaattggagctctgagatacatacacatttgtaaaggagaccttaccaaacagaggctcttgggtgtcttgggaatgcctttctctctcctagaaaggaaaggcatcatgagaagagtgcccaggatgaagactcaggcatctggcatttagaagtgtacactaggaaaagccagcaaaggagacagaaggaaaatcaagagagtgtggtattagaaagcagtgagtggaaagttttgaggtagagtgatcaagtgggaaatggtgctgtgcagtagaaaaagatgaagaccagcaagtaaccactag

SEQ ID NO: 110755 - DNA, 444 bp, Homo sapiens
ggcagggcagcctcccgccctgaatgctggtgcaggggacctgggggctgctggcagcccacccagtgacaggaggcccaaggtgggaggggcagggtgtcagtggccaagtttggggatcagggcctggtcagcctggaagtgtgggaaagaggctctgcagctgccggggcctcaccaaccttccctccctgggtgtgtgaggggtgctccctgaggctctgccgagactcagataccccgagaagtcatgtgtgtgtggtggccatgaggagtttgtggatcctgagtccagtgaaaggaagttggggcccagtgggcgcaggaaggccaggaagctgtcttctggaggtctctttggggctggccttagatactctcacagatcctgcgggtggggagtcagcccagtagcctttcccaagccaaaccaggaatccttta

SEQ ID NO: 110756 - DNA, 332 bp, Homo sapiens
cagagatgatgtagcccagcttctgagagtaagcaaagcaataaatatgaaacaggaaacgctggtaaataacttcctggggactactctggaggatgggggctgcaaagctaatactttcttgatattttaagggaagctcctctccaaaccacctgggctgtgacaagaaggaaagaaacctggaccctcaaccagtatccaagggctggcttcattttttccccaattagcttgcaacgagttaatagtagctctgtagtgctggattcagggatttgtgtgacatagataaggtttggcattaaaaatgctaaatcattacaactctg

SEQ ID NO: 110757 - DNA, 350 bp, Homo sapiens
cccattgaatatttccaacactaatataaggaaggcagttttattatcttcattttcagatgaagagactgaggcccagagaggttaataaaactgcccaaggtaatagggctgctcagtggtggagttagatataaacctaggtggtctggctctagggtccacatgtccacacccctggtaactgcttctgttgtgccagggtacagcatactttgtgttatagttttcattttaatcttattggcacaatttggatttcttttgattctttttagggtgtcggtattaacttttgtgcatgaaagggagagagggagagaggagagagagaaagagaggaggggagg

SEQ ID NO: 110758 - DNA, 666 bp, Homo sapiens
gtagactgtcctagcactggtgggagtgtagcagtgaggatgaccggaggtgactctcagcgccatcttggttttggtgggttttagctggcgtttttactgcaagctgttttgtcagcaaggtctgtatgacctgtatcttgtgctgattttctgtctcatcctgtgacttagaatgcctaaccatctgggaatgcagcccagtacgcctcaggctccttttacccagccactactcaagatggagttgctctggttcaaacgtctctgacacaacaatactataagaaagagattacaggaattccccaaaatttgacttttaagtaaacaggctaaaagaaagggatgaatttattcaagttcatacacatcatgtaaaagctgagacaaaattctgttaaatttcattgaaaaaatgaaatgctgccagttttgtaaactgactaacagaacctccccagatgaaagaaaaatgttttcaagggcccgagaaataatggttaataaaaacaaaaaatcaaatcaaaataaagttagcaactctaaaaggtactttcccttactaaagacaaacacttattattttggtctttaaaaagtgtactgtaaatccagtagtaaatttctaaaattagcttttcaaaaaaaatttttttttggtcc

SEQ ID NO: 110759 - DNA, 761 bp, Homo sapiens
ccactttcctggaaatccacccagaacctccaccctctgacaccatggtcaactcctgttgtggctctgtgtgctctgaccagggctgtggcctagagaactgctgccgtcccagctgctgccagaccacctgctgcaggaccacctgctgccgccccagctgctgtgtgtccagctgctgcagaccgcagtgctgccagtctgtgtgctgccagcccacctgctgcagccccagctgctgccagaccacttgctgcaggaccacctgctgccgtcccagctgctgtgtgtccagctgcttcagaccccagtgctgccagtctgtgtgctgccagcccacctgctgccgccccagctgtggccagaccacctgctgcaggaccacctgctaccgccccagctgctgtgtgtccacctgctgccgcccaacctgctctagtggctcttgctgctgatgccctcacctatactcacctgcctttattaaccagcattcttgatatggtccacctgtgaactgaatcatgcaaggccaattggacaacctcagttccaaccaattcttggattgagtttggcctccaaatatgctcaccaaacactatgttgctaccctctaccaaatgaatacaagtttgaattttctctgaaatatgtcaaccccatgttccctgaattgaaatatttgctctctaccataatttatcacatggagctattcctctatcttaaataaattttaatttttgaggcatgcaaat

SEQ ID NO: 110760 - DNA, 713 bp, Homo sapiens
atggctgagctgtggaatagggtcattagagctgaactggtgctataaagattgtattactttattatatatctctctttttgtttttgtttttttgagacggagttttgcccttgttgcccaggctggagtgcagtggcacgatctcagctcactgccacctctgcctccttggttcaagcgattcttctgcctcagccccctgagtagctgggattacaagcgcacaccaccacacccagctaatttttttctctttttagtagagacggggtttcatcatgttggccaggggggtctcgatctcccgacctccggtgatccacctgcctcggcctcccaaaatacagggattacaggtgtgagccaccacactggccatatctctttcttattacctgcaagagcctatcaaactcagaaattcactaaactgtttagattcttaatacactcttgcaaatatatgagattgtcatatctgttgaccccttcaaactctttggcaataagcaatatttattctcttagaagttgagaaaaatactcatagtttatgaataagagaagtgaaatatctgaattttcttcttatgttaagaaggtttgtacaacacacatcatctattttagattgtagcattctaaggggcacacatgttttgaatagtttaatccttaaagggagacaaatattgtgcttatttttgtta

SEQ ID NO: 110761 - DNA, 305 bp, Homo sapiens
aatagaataaacagggtgttgtgataaaggaggtagggatcaatttcaactgcagtggttggagatctctctgaggatgtggtactgggacctaaacatgacaaggctcagttatgagagaagaggggtattggggtgggggcagagagagaattccaagaagaatacgtggcttgcagaaggcccggagagcttttccagcatggcttaccccagaaaacaccaatgttactaagaccaatacagtaggccgaaggggcaggaagagagaccccaagcattccctcttctaaattattttacct

SEQ ID NO: 110762 - DNA, 373 bp, Homo sapiens
aaaagacattcttctttttttattgctttaagttcttacctccatataatgtgattccagcctgtcttgctaaactacataactaagagacaggggaaaaaaaactcctttctgaaatcctgttatcacatatcatagaagccagagcactagaccccttgatactgcagtgacctccccaagacccacaggaagctgctgactgatcatttctacaacttacgaaattttcattatgttctaagttaacatgggaaagttaacttatttcatttcaacttatttttcccctttggattaagtatctggatgagctaagaaacttgattggggtgggggcatgggatagtttttttttttattatttaatgtt

SEQ ID NO: 110763 - DNA, 399 bp, Homo sapiens
cacatccttcttcacatggtggcaggaaggagaagtgccaagcaaggcggggaaaagccccttataaaaccatcagatcttgtgagaactcactcattatcaagagaacagcatgggggtaacatcttcctgtacccactctccagagtgtatatatttgtatgctttttgagccagcaactcatttccagcaatttattccaaataaattttcagagctatatattaaagtttatttacaataatcttggggttgtttataatagggataatttggaagcaatctaaagcagttctatctaacagaactttctgtaatgaggaaaagatcctattatctgtattatccaatacagtagtcactagccacatgtgaccatggagcacttgaaatgttgc

SEQ ID NO: 110764 - DNA, 162 bp, Homo sapiens
attttttgaaggcacagaccctttattaactttgttaacaaaggctagagaattgcacctaccacaggcaggagatctttttagatcaatcctcatttaacagcagtcactaataggcaaatggtgtccgatgccttggctaagagattttaatctgagcat

SEQ ID NO: 110765 - DNA, 329 bp, Homo sapiens
ggcatctgtaatcccagctacttcggatattgaagcaggagaatcacttgaacccaggaggcagaggttacagtgagccgagattgtgccactgcactccagcctgggcaacaagagtgaaactccatctcaaaaaaaaaaaaaggctgtttaatgttacggttttttaattttggaaacctaatggccaaaagtaagagtggcacagggcactaagatttgtttccagagcccatattcactcacctctcagttactaaacacatgtacacctctacacctggaccaccccctgcccttccacccagctttttttcctaataagccac

SEQ ID NO: 110766 - DNA, 242 bp, Homo sapiens
tgccaaagtattactatttcaaactagctgtctcactgaatctctgaagatcctacaaggccctcattctgttcctttgtgatttctcctacccacaatatgctcctaccccatctccctatgtctaaagctaaactattctgtaagttacctcaaataccatctcacctgtttaacaaataggcttatttgagaatagagagaccagtcaaagttagatactcagatactgcagtcatatt

SEQ ID NO: 110767 - DNA, 320 bp, Homo sapiens
ctgaaatttgtatcaattgttggttccctgaagattgtgctggacagagtatgccataaattggtatgtttggggtgatcttttttagttttgaaaagcatttgactggacctaaagttataattattttcaagagtattgactgtcattcagttgtctattaatggaattcccagataaattttgcataatattaaaatacggcaaaataaagttagtcaggtcctgaatgtgagaaaatacaacatactttccagaagatcgggcttcttttcctcaagatggtgacctgcttctgttacacattcttgtctttcact

SEQ ID NO: 110768 - DNA, 607 bp, Homo sapiens
tttaaggaacaaagaacgtgatgactagtgtggtcatttcaggcataaaaataggactaaaacaggaatcagtcagaaattgaagactatagcccatgagtgatcatacatttatcagtgggtattaacacactcaggtgggttcatgagtagattctggaatttccataatagtctacatatttaaacatagttgaacctaggtttcatgcagttatgctataggccttaggggaagctcttggttattttacatttttaattgagttctgaagttaagcagtaatactaacaattaaatgttttgagaaatttttataatgcccatgtgttacatagtattggacattatctactagtaatagtgtagagatagacatgttacagtaataggataaaatttaaaagaataacagtaatcaatcactaatagttgcatacttggcagttgtaactcgtggccctcaccacattttgagaatcactgatgcaagtttcaaaattcatggttggccaaacacagtggcttacacctgtaattcagcactttggaggctgaggtgggaggatcacttgagaacagcctgggcaacctgggcaactcacc

SEQ ID NO: 110769 - DNA, 248 bp, Homo sapiens
agacaataggccttccttattcaagacttcactgtcctcagtttcagttactcatagttcaaaaatatcaaatggaaaatttcagaagtaaacactttgtaagttttaaatgctgcaccattctgagaagcatggggaagtatgtcctgcttgcaagataaatcatcccatggtccagtgtgtacacactgtagactctaccagcccattagtcacatagtagatactgcagttaccagatggactgt

SEQ ID NO: 110770 - DNA, 359 bp, Homo sapiens
gttctactgcaacttacattctcacccaggctggaatgcagcagcgcgatctcggctcaccgcaacctccacctcccaggttcaagcgatacttctgcctcagcctcctgagtagctgggactacaggcatgtgccaccacgcccagctaattttcgtattttcagtagagacaggtttcaccatgttggccaggctggtctcgaactcctggtctctcctcagcccactctactctggtttctgccctgttataccactgagactgttcctgtaaaggtcaacagggacacccatgctgctaaatccagggtcacttacttatctgacctccaccccatcaccatatgacttaattaa

SEQ ID NO: 110771 - DNA, 276 bp, Homo sapiens
tttgcgtttttgtaattattttaatcattgaatagtggaaaatagaattggggcgcacatccacttgtttgggatatcccatccaatagcagtgataaaagaaagcagaacaaataacctctgtttctggttactctcaaaacgcgttctgggacttgggctatgtcttattaaatggaatgatttaccgtttatatatttaaagctcagaatatgataaaggtcctgtctccaccacttcaaacgcacagggtttcaaatgacacagttaagatc

SEQ ID NO: 110772 - DNA, 137 bp, Homo sapiens
ccatggagttggccatattaacaaaaaggactgaattgtaaatatcagtaaataaagaatatctattgatacaagtcattttactaactcattcctcaagaatttccttgagcagatatacatatacttttttgttt

SEQ ID NO: 110773 - DNA, 344 bp, Homo sapiens
actacctaagtgaaaatgaggccatttgagaaggagttgaatctcgggtggagattcttaaaaagcacattacagctggtcattgtgaggccaaatgagacaaggaaggttgagtgtctctcaggcagttgtatacgagaagttagtggtctcttttataagaagtatttctgttcagatttatgtgtaatactgattctagaaatagctgatatgtgaactggaagtacaattcactcatataagttctccctcatttgggtcttggttttggagaaagaaaaggtggtccacattctgttccttttgtaggaagcacttggtctcttctaatgggaaacttc

SEQ ID NO: 110774 - DNA, 613 bp, Homo sapiens
tggggccctttgcgccaaggctggagccaaagtggctgggatgcagggaacaatgtcctgaggctgcacgaggcagcagggcccttgacctggccctcgaaaaagtgaaagagtgatgttgcctctgtgtatcaaatgcaggcatggcggtcctcacatctgcccaaggttacagtcagggatagactaagaacagaactcaaagtggacacattcctgctttagtaataaattgcctaccagttttgtaaagcttggtatatcttatttttcttttgacttttgtcaaacacagaagtaatataagtccctcgtatccaactagcagctcctcagttatcaattcgtggcccatctcatttcacctgctcttattttttagtttttcattttgtaatgcttgtattcaacacagtgacgtttagtaagtactatcacgtgccggagattgtattcaatgagtatgtaaaaatggataagaaagtttccttcctcagcttctcatgatccaatagcaaaggcacatgtatccaaagattatataatgtaagcaataactggcataagccaaaggttatgggaacacaggaaagagagcaattagtgcttccct

SEQ ID NO: 110775 - DNA, 381 bp, Homo sapiens
taaagtacaaccaatctcatttgtcatagtaactgataaggaagaagcttaagttttttgtgcacattctatttgttgggtactgtgatcggaacatagatgttctcattgaagactcaacatttataccagtggttcccaaatcttgctatacattggaatcacttagagacctttaaaaaaactgatgcctagctgcagcttcagatattttgatgtaattggtacaggacgtgacatgggcattggatttttataaactcccaggtgattttgatgtgcagccaagtttgggaaccattagtctaagtggtatttaccacttttttccctgttgctctcttcagtgaggttaaataatttacttgtgataacaccact

SEQ ID NO: 110776 - DNA, 474 bp, Homo sapiens
gacaaaagaaatcaaagaggagctaaataaacgaagagaaaccccatgttcatagacaggaagattgccaacttgatctgtgaaaccagcacaatctcaatcaaaattccagcaagttatttgttgatataaatatcaacaaactaattctaaggtttatatggaaaagtaaaagacccagaacatcatattcaatattaaaggagaagacaaaagtcctaagactgacattacccaactttaagacatactgtaaggctatagtaatcaagactgtgatattgacaaaagaataaacaaacagatccatgcaatgaaatagagaactcagaattagacccatgcaaatatagtcacctatcctttaacaaaggagcaaaaacaatatgatggagaaaaacattgtctttttgacaaatgatgccagacaaactggatgtccacacaaataaaaaaataacaataattaaaaaa

SEQ ID NO: 110777 - DNA, 531 bp, Homo sapiens
aagtaccgctcaaagatcaagggaaaatagctcaaagaagtatccaatggatttggtataatggagtttactggtgacctcgacaagagcagttctaggggaagatcagggaagaagccagagtgttaagagttgagttatgaatggggaatgagggattgaagaggagataagatgagcagataattcctttgtctatttgctgataaagtggagcagagaaatggtctggcagctagagggggatgtgggctcaatagaaaatattggagcacatttatatggtaatgaatgagccagtagtcctggagagagagcacagaagagagaaagtataaggaaagttgcaaagctcttgcaaaacaggaggggccggcatagagagtggtctttggtaacaggaaaaacacatcctacattttaacaggcaaatgagaacttgggtacaaatataggtagttgtgtatgtttgttggtgagaagatcaagtggatcggatatgatcacttctgttttctcagtcaaatctga

SEQ ID NO: 110778 - DNA, 858 bp, Homo sapiens
gggcttcggatgtctcagtgcctcttggtgtctctgctttcacacttcttgaccaagggcatagatacactaaaaattatctgcagacaatgaaggtcatccatggtagaaagagaaaataacctgtttatgggagatatctgttcacagtggatgaaatccacactgaggaaggttcagcagaacatggagctgacctatgactgcccccgctcctagttggctgctcttctttggagtctgtcatgcaatcagctgcttaaacacatctattctctatgtgttccttttgtagcctagagataattccatcttttccttgagtcctgactggtgattccaggcctccttgatcaaattgactgtccccaaatgttacacacatttcagcattaaagttactacacttttcccagtaaattacatttttttgttttattttatgttttaaaacttagagtcaatcagtgaagatctacagtggaaatacatatgtataaaattagtgaatttggtataatgatacggtgctgtgataatttaataaaagcattgagaaattaatgtggttttaatactagtagttccccaattttttaatatggccattttcacactttccaaaaatttgataaaaataatactggagacccatgttaccatttatattcaaaattactaacattttgcaatgttatatggagtatatctgcataaatacatataatgtttctagaacctcttcaaggtaaattgtaaagatgacaattgacccctagagacctctcaaagcatgtcacaggaatgaagatattctcccagttccagtgtcattactgtatctaagaacatcatcta

SEQ ID NO: 110779 - DNA, 201 bp, Homo sapiens
acgcgggggactgggcgatgtctagggacatctgtggttgtcacgacttggggcactcctggcatggagtgggtggaggccagggatactgctcattaccctgcagggcccaggatgctcccccaaccagagaaggatcccgcctgtgtccacaagccccttgtctgggagacagagccagtccactgtgtctcccgatcc

SEQ ID NO: 110780 - DNA, 263 bp, Homo sapiens
atgagtggctgccactctaggccttgcagaccccaatgacagggaggtcatcacctccacaggctgcccattggaacaggtggtggctgggaagtcctttatgctgagttgacctctgggtcttggtggctatagcccttggtcagcatgaggactgtccagagcctgtgctgggcggtcatggagcatcatgggtggtttgctgagtgcccttcccatctttgatctcatggaccgggggacccacaggagggggctccaca

SEQ ID NO: 110781 - DNA, 251 bp, Homo sapiens
aatcaccgcgccacatctggcgacctaactcattgtcaagcttcactttcgctcattgtgcccttggcacatcgttttccagtagacaactccatgaacagttttatttatttgcgtatttatctatttgcaaattattcttctcacatttgactgctatcttccccttgtggaaatttttatcttggaagtttggggagcatcagtggagtacatgtggatgctcccaactcacatctgatgaggaagct

SEQ ID NO: 110782 - DNA, 846 bp, Homo sapiens
tgtgtctcctcttttcttctgggatgttatgtgtttagaacttgcaaacctttatttctgtacttctgatgtacctgcctaatgtgtttcttcccaactaccttccccccttcccccctcctttcttatgattgataaggaactctgtaaaatccttcctcctgtgtaccagaaccttctctccattccctccttccaggcttcttatatgtcatgaccaaatcttaccattaatgtatgatgggcagtattcagatgttctgtgacatatcaacatgggaaagtgtggatccccaggattatccgtggggatggggctgggtcttgggatgtcagtgaagaaggggatcatgtaccgtttagatttcatccacatgctccatcatctctatgcagaacagaattaagaaaagagacatttaaagaggatggcattcattgcctggaataacttaaagttctgaaaagagaataattagaagacatttgctgtctaggatgctaaagaaacactattgaaataccctattgcagattaaagaaccagggaaacagctatagcttgaactttgcataaaactgatgtttctggccaggcactgtggctcacacctgtaatcccagcactttgggaggctgaggcgggcagatcacttgaggtcaggagttcaagaccagcctggctaacatgatgaaaccccatctctactaaaaatacaaaaattaactgggcatggtggtgcacgcctgtaatcccagctatttgggaggctgaggtgggagaatcactggaacctgggaagcagaggctgcagtgagccaagattgcaccattgcactccagcc

SEQ ID NO: 110783 - DNA, 668 bp, Homo sapiens
gaggtcaggagttcgagaacagcctggccaatatggtgaaacccctgtctctactaaaaatacaaaaattagctgggcatggtggcggacgcctgtaatcccagtcgctcaggaggctgaggcaggagaatcgcttggacccaggaggcagaggttgcaatgagctgagattgtgccattgcactgcttcttgggtgtcacagcgacactccatctcaaaacaaacaaacaaaaaatccctgtacaaagaaaaataaataatgcttgtaaatggatacgtgcaggcccatattttcccctgaagtgttggtagttggtaagtgtaagatacagaggaacttttcaccctccatggcacattgccagatcaaacctttctcagccagaagtggctttggaagctctaacagaagtttcctgcatgcaagtgaggtacccaaagctctcatccttggagtcacatctctagtcagagtgtctgccacaggacaagaccctggcgcgatgggacatgctgtgccttatttcatcagaggtgtccagctttccccagcacatgcgttctccctgaggaaggctgccggcacagatatcaggggctggatgttcttggaggtgcaccttggggaaccgctgggctctctagcttgctgtttccttgaatccag

SEQ ID NO: 110784 - DNA, 142 bp, Homo sapiens
tgctgggattacaggtgtgagccaccgtgcccagtctcctgatgcattcaaacacatttcagatttctccagaagagaatccctttgtctttgtcaaacccatctcaacttctcatttctgccctatttctttctctctctc

SEQ ID NO: 110785 - DNA, 288 bp, Homo sapiens
ggcagcaggcgagtaatattcagtgcctggcatgtgtgggctcataaagttaacacactgaagatgcacagttatatgggttgtgatggggtgatatgtagagttgggtgaaaccgcactactaggtctggttttccttgtcattcaaagcttgaaagccaccttagagacaaagcttcttatgaatacctcatagctaggaacaggtctgtcatagctctttgagcatgaaagggctatgttgatcattcctcatctcatctctaggtcctcatggcatcctatatc

SEQ ID NO: 110786 - DNA, 365 bp, Homo sapiens
aagaatttggggttttcttatttagttggaatgccttattaggtattaaagtcagtgacgttaagttttctgctgctatcttttgaataaaatttattgaagaaaaatgtcaccaacaaaacatgattttaaaactaacacataaggccaggcgcggtggctcacgcctgtaataccagcactttgggaggccaaggtgggcggatcacaaggtcaggagattgagaccatcctggctaacacggtgaaaccccatctctacaaaaatacaaaaacaaagaaaaattagccaggcgtggtggcaggtgcctgtagtcccagctactcgggaggctgaggcaggagaatggcgggaacctgggaag

SEQ ID NO: 110787 - DNA, 238 bp, Homo sapiens
agcatgtgtaagcaagtataagcaggtgtgattatgagacctggtgtgaggtgtatgagcaggtgtgtgaacatgagtgtgtgaacctggtgtgaggtgtgtgtgagcaggtgtgagtgggcatatgagtgtgagaaggtgcattgggtgtgaccgtgtgtgggggcagtaagtgggtctgagtgtgtgtgcatgtgtgtgagtgggtgcattgggtgggtgtgagtgtgcatgtgag

SEQ ID NO: 110788 - DNA, 373 bp, Homo sapiens
acatggtgtcatgcacctgtagtcctagctactccagagactgatgttggggaattacttgagcccaggaatttgaggctccagtgagctataccatgatcccgccattgcactccaacctgggtgacagagcaagattccatttctgaaaacaaaaacaaaaagccaaatgctacaggaagcaaattccaggcaggatcattagagaagacttaatagaagaagtaacctttacatgtagacatgtagaagaaacgtttttcgaggtggagagaatatcatgaggtcagagacacaagacaaaggagggattgtggcaaggatggagttgcagaaggattgaatgggggtcagcttgcccaggcacagaatg

SEQ ID NO: 110789 - DNA, 160 bp, Homo sapiens
tggccacagaacagtgaaccttttactggggattcaagtttaaaatcacacagcttaacagtaatgttagttttaccactaggtggcaatgacacagctgcattgggctgacatgattaattttaaaaactgtgcaaatccagacagaaattccaagatc

SEQ ID NO: 110790 - DNA, 105 bp, Homo sapiens
ctaatatctacatgccttggtttgctctaggtgattgtctcccccgctagactgagagctcttacaagactgggactgtgtttcattttccttttgtcttccctc

SEQ ID NO: 110791 - DNA, 444 bp, Homo sapiens
cagcacttatctaatgccgagctacaaactctttgtgctaccttaagcagccttggaaacataaaagacaacaccttattttcagagattgcattaactttcaaagaaagctttatggctagactaactcattcatctggcttcatcaaggaattatgtatgctaacaatatgcaaactttataaataacttggaatgccaaaacttttgcctgcttttgatagacttcctatttttgatggtaataccaaaatgtacttcacactttcttgctttctcggagaacactgaacagaatgtacctttcctcagacacgatacactgtcttcaccaatgagctttgcgctttcacatagtaatgtattcaggaacaagacaggtgtgcaggacccctcagccccctcactaattggccccaagctggcttcggtgctgcagtccac

SEQ ID NO: 110792 - DNA, 878 bp, Homo sapiens
ggactggaactgtaccattggctctgctaggtctccagcttgcccattgcagaaagtgggacttcttggcctctctctctccgtagctgtaggctaacccaagaagaataaagcatcggcttccctgacctgctgctccccccaaaacagagtgccaatatgattccaaggttcttagcacactgtatattacctcactcctcctacagtggtctggaactgaacttgcaatttctccaagatatgtcggtatctctctccatgctgtgctgcgtgggctttgggagcggtgatgtggaccatttgaaattgtccttgctacctctttaatgcatatttttatatttctatgctccacccaagtgctgtagtctctcaactgccttctttttgttcttcagcttttatgaagctattttcaagtgtgagtagttgtccaaattcatgtttcttgagggaacaagtgacttgtttgtaagttgacttgtatatctttttatagctgagattttatcctgtgatcttactaactcaggaattttttggagattctttgcagttttctaagtagaataaccatattatatttattattattttccttcttactttggttttaatttgctctttttttacatgttttctgagttagaaacttaggttattgatttgatacccttattcctttataacatatgcatttgattgtgtaagtttttctctaagcactgctttagtgcatcccacaaattttgatctgttgtatattttttatttactttaatatatcttctaattttcttttgactttatctttgaccaatgaaatattcagaaatgtgtaatttctaaatatttgggagattttctaaatattt

SEQ ID NO: 110793 - DNA, 1545 bp, Homo sapiens
ggcagggcgccagtgaccgctggggccagagccctgccgggaaaggagggcttccgccttgcagcgcagctcggatcagcagcagcccaggaggcctcccgcccgtactttcccgcgtccatccctctgtcccacggtcggtgagtcagcggagcctgatggaggccttgggctctgggcactatgtgggaggcagcatcaggtccatggcggcggcggccctgtctggcctggcggtgcggctgtcgcgcccgcaggggacccgcggctcttacggcgccttctgcaagacgctcacgcgcacgctgctcaccttcttcgacctggcctggcggctgcgcaagaacttcttttacttctatattctggcctcggtgattctcaacgtccacctgcaggtatatatttagagccactaactttgtggcatttgggggctcctcgtcaggatggctgacttccacccacctgctcacccaccctagagcaaagcgaccaactccgctcctgcatgcagacttgccactcattctttccattgcctcatcttttagtataaatgggtggcaaaaaaagaaaaaaacagcatttgtggaaagcctgaaatataacccaaatcgtctaagatagaatgaaaaattgactctcaaggaaatatttgaaggaacagaatacagcttaaaaatttgaaaatccttaaaaatatctgagaagtttttgcatccgtaaaacagaaaacagcacgaactttaggaaatgacaatgggcacagaatgcaataaaaaaaaaaaaacggggaaaggtaactaaaaacttaaggaaagataaactgaacaagaatggctcagacagcaggcaaatctccccaattagaaacgaagtgaatagacccaattgaatgagatgaattctaagcaatagatggattgaataataagctggaggacattaataacatgttctggaaggcatacatttcttcaacccaaaggaaaaaaaatgacagaaagaaactacagggaagaacattaaaaactgtgcaagaaacttatgtttcacatatgaagcaacctcagatgtggcatggttttgaacagttgccgaaagtgtgagaaagggaatctgtttgaatattggcacatggatcaagactctggagtcggtgatgagaaaatccaatcagagcattccactttgctattcattgaaccaggtagccaacagaagagttaaaaattagtgatatgactatattcagggggaaggagagctgaggggggcggcaggaagtcagcagaaaatgcctcatgtcattaagtcaagaaatagtaataaaggcatgttattgaaaaagggggtgtaatctctaaacaagcacgtgtagaagtttgtgtttctgatttggggaagcaagagttgagaaggagggacagttctattacttttcattatatgtcctttttctactgtttgatttttaaaaactatacacatgtattgcttttgcttcgattaaaaatcaagacattaaaatgaaaaaaaaaa

SEQ ID NO: 110794 - DNA, 968 bp, Homo sapiens
ggcagggcgccagtgaccgctggggccagagccctgccgggaaaggagggcttccgccttgcagcgcagctcggatcagcagcagcccaggaggcctcccgcccgtactttcccgcgtccatccctctgtcccacggtcggtgagtcagcggagcctgatggaggccttgggctctgggcactatgtgggaggcagcatcaggtccatggcggcggcggccctgtctggcctggcggtgcggctgtcgcgcccgcaggggacccgcggctcttacggcgccttctgcaagacgctcacgcgcacgctgctcaccttcttcgacctggcctggcggctgcgcaagaacttcttttacttctatattctggcctcggtgattctcaacgtccacctgcaggtatatatttagagccactaactttgtggcatttgggggctcctcgtcaggatggctgacttccacccacctgctcacccaccctagagcaaagcgaccaactccgctcctgcatgcagacttgccactcattctttccattgcctcatcttttagtataaatgggtggcaaaaaaagaaaaaaacagcatttgtggaaagcctgaaatataacccaaatcgtctaagatagaatgaaaaattgactctcaaggaaatatttgaaggaacagaatacagcttaaaaatttgaaaatccttaaaaatatctgagaagtttttgcatccgtaaaacagaaaacagcacgaactttaggaaatgacaatgggcacagaatgcaataaaaaaaaaaaaacggggaaaggtaactaaaaaaaaggggggggtataaatcgggagggaagttcgctaccgtttggaaagggcctgagggtaaaagggagggcggtaaacgacggaacggtggcttgggactctcggggagatgcggcgcgaaggggaataggtgagacgctgggttgtataaggaa

SEQ ID NO: 110795 - DNA, 199 bp, Homo sapiens
cctagttttagaagttcatagcaaaggcttgaggtggcagtatgtttgatgggtagccaacagaagagttaaaaattagtgatatgactatattcagggggaaggagagctgaggggggcggcaggaagtcagcagaaaatgcccattgctgcctgggaaaaagaaatgaatcactgactagttttagaagtttcaata

SEQ ID NO: 110796 - DNA, 620 bp, Homo sapiens
cctagttttagaagtttccatagcaattctataccattaccactctgaagaaactgaatcatttaaaccctagttttagaagtttcaatagccgggaagaacattaaaaactgtgcaagaaacttatgtttcacatatgaagcaacctcagatgtggcatggttttgaacagttgccgaaagtgtgagaaagggaatctgtttgaatattggcacatggatcaagactctggagtcggtgatgagaaaatccaatcagagcattccactttgctattcattgaaccaggtagccaacagaagagttaaaaattagtgatatgactatattcagggggaaggagagctgaggggggcggcaggaagtcagcagaaaatgcctcatgtcattaagtcaagaaatagtaataaaggcatgttattgaaaaagggggtgtaatctctaaacaagcacgtgtagaagtttgtgtttctgatttggggaagcaagagttgagaaggagggacagttctattacttttcattatatgtcctttttctactgtttgatttttaaaaactatacacatgtattgcttttgcttcgattaaaaatcaagacattaaaatgaaaaaaaaaa

SEQ ID NO: 110797 - DNA, 822 bp, Homo sapiens
gctatctagaggatccattctcgctcatatctctcccttcgccatattctctccataaaaaaaaaaaaaacggggaaaggtaactaaaaacttaaggaaagataaactgaacaagaatggctcagacagcaggcaaatctccccaattagaaacgaagtgaatagacccaattgaatgagatgaattctaagcaatagatggattgaataataagctggaggacattaataacatgttctggaaggcatacatttcttcaacccaaaggaaaaaaaatgacagaaagaaactacagggaagaacattaaaaactgtgcaagaaacttatgtttcacatatgaagcaacctcagatgtggcatggttttgaacagttgccgaaagtgtgagaaagggaatctgtttgaatattggcacatggatcaagactctggagtcggtgatgagaaaatccaatcagagcattccactttgctattcattgaaccaggtagccaacagaagagttaaaaattagtgatatgactatattcagggggaaggagagctgaggggggcggcaggaagtcagcagaaaatgcctcatgtcattaagtcaagaaatagtaataaaggcatgttattgaaaaagggggtgtaatctctaaacaagcacgtgtagaagtttgtgtttctgatttggggaagcaagagttgagaaggagggacagttctattacttttcattatatgtcctttttctactgtttgatttttaaaaactatacacatgtattgcttttgcttcgattaaaaatcaagacattaaaatgaaaaaaaaaa

SEQ ID NO: 110798 - DNA, 561 bp, Homo sapiens
ctctcactcccctccctagtctgcaaatggccaaaaatagtttccattgtcattgacttaaatttccattttgattatggaaataaatatttttactgccctttcctgaaacaggaataaatttttccattcaagttctcctaatcagactctgagaaccaaaccctgaccacaaagtgcagaggacacccaaacagacaagacaaggtgtgtctgcctcctgcgctcaggaccaaagaagttggcctcagctccctgcttcatggctaccacatactgggtccattccctgattcagctaccacattctcctgagctctggtctcagtactgtggggacagctataaacatgacacaccctgcccctaccctcatggagcttaaaatttaaacccaaggcctgggcgcggtggctcacacctgtaatcccagcactttgggaggccaaggtgggtggatcacctgaggtcaggagttcgagactagcctggccaacatgggaaaacctcgtcactattgaaaatacaaaaactagccgggcatggtggtgggagcctgta

SEQ ID NO: 110799 - DNA, 1568 bp, Homo sapiens
ttgttggcctactggaaaaaaaaaaaaaaaaaaaaaaaaaaaaacacattcgaggtggtaatatgatacttttaaaccggaacctgcatctgatatcctggaatttgtttctctacttcctgtatttctcctatcatgaatgactgctctgacaaagaatatgtcatgggacacaccttcagctaactttgctttttcatgcttgttttcaattcactagaagaaaatctaacttgtcaggaagcaagtacataataggaagtgtctgtcttagtttgtcttcaacagttaagaaaatgaatgtttccactcttactacattcttagtcacctgtccactgaccaagagccttgtggccctgagtaatcatttagaacttggaatcagcaggggcgctctctctagttgcagtttagggaatgggttattagctttctaggatatttatcatgctttgaaataatttaatgaattttattccataagatccaattcaggttaggcttgtttgattttttttttcagaaaatgtattccataaagtttgtacttagaccagacgggtgtactaagaatcattcatgagtaaatgtgtgttgaatatctacccttgacctttttttgagaaatagagtaaacacagtccctgtagtctgacagctaatggggagagagggtagacttttcatcgaattaaatttctacatgcacctttcccccagaaatcttactcatggctggtctcaagtaagtctttattgaaaaatattgacatatcttcttcctcttccttctcctcactgtcttccttttagtagttaggcagagttaataggtaagaaaaattatctgcatttatgtgtagtttgtaatctactaaaggggttctagaataaatgttgacattttgtaacttacattgttgttgctactgattaaacacataacccaagtgtggatgaactctagcattacaaagcttaagcacctcaggctcctatgatgttgtaatggactctttttacaattagagtagggtggggtaacagagggtctcaaagaaaatgcatatttaaatttcaggcttctcagataacctctggagccctactgtctggaaacagccagtttccatgctgttacaataatttggcaatggcaattggttaatctccagtttctttgccacctgaaattttgagttgttcagccagtagatattggattaaatagaacaactttgttaagctggtttaataatgattatgaaaaaccaaatagagaaaaggtgaaaataaggcagaattgaggagcatgacctttggcatatcatcagagtaatagcagtaaaaaggattaaaatatttctaatttaagaataatggcaataataatagtgatgttgatggcaaaagtggcttgtcagaactttaaactcttagccaggcttggtggcacatgcctgtaatcctagctacaagtaagactgagatgagaggatcccctgagggaaggagtctgaggccagcctgggcaacatagcaagaccctgtcttaaaaaaaaaaa

SEQ ID NO: 110800 - DNA, 307 bp, Homo sapiens
agtagctgttatagtgtgacttcatctacatgagcagagatgattttgttttctttcaaaactgtatatattttacttctgctgattatagtgactaggtatttcagaatgttattaaaataaagtgaaaaggggagccatccttgttttttctctgacttcaatggaaatagtttttttaaaacatagattaccctacttacacatgttcaattcaaaatgagaaaattaggacgctatcagtattttaaaactattattttaaagttttagttcattaaaacaacagatgaagtggtaacattct

SEQ ID NO: 110801 - DNA, 338 bp, Homo sapiens
ccagtgttaaggagattctttcttcctcacttcagagacagcttaatgtgttgtatttggatgtagggatgtgtcagttacctattgctacatgacaaccgaattcaaatttaatggctgaaaacaacagtcatttattggttcacagttctgtatgttggcaatttggtcagggctcagctgttgagttcttctgctggtttctcctttcttgtgcagttacaattcattggcaacttgatggagttttgtggcctaatagtgtctccctcagatgcctcgtggttggtttcagctgtcagcttggcctttctctacatgtggtctcttatccccaa

SEQ ID NO: 110802 - DNA, 309 bp, Homo sapiens
attgtacatgaatgttcacagcaggtttatttgtaatagctaaaaactggaaataacccaaatgaccatcaatagatgaacaggtaaacaaattgtggtatacccagaacaataaactactactctgcaataaaaaaggaataaactattgatacatgcataatctggatgagtatcaaattaattatgctgagtgaaaaaagccacacacacttccttccaccccaagaagagtactcactatatgtttccatttatttaaaaatttctagaaaatgcaaaccaatctataattacagaaagcagatc

SEQ ID NO: 110803 - DNA, 377 bp, Homo sapiens
tactcaatattactgaataacctaagaatgctttcagttgttgagaaatgtaacttttaaatgtattcaagaaacatttgtagtgtacatattatatatagggtattgcaccaggcagtggagttggatacaagcagagcaggtattggtccctgacttgaaggattctagcaaaagaaacagacaaactggtgcttataagggttataaggaaagtacaaggtcctatgggactgcataaccaaagcacttacgaacttaaagagacaaaaatttctgagaggaggtcaattaagatgtgaacctgagtccagtatggtggcacccagtggcagtgtgaactgtgaggagttcgccgagttccaggaattactcaa

SEQ ID NO: 110804 - DNA, 650 bp, Homo sapiens
ggtcttcatcattgtcgttttcatattgaataggctgaagaggaggaggaagaagaggaggggttggtcttgctatctcaggggtggcagaggaagaaaaaaaattagagtgtaagtgaacccgcacagttcaaacccctgttgttcaagggtaaactgtagtttaaatctgagtgtcaactccaataaattggtagaggcttcctggaatgatgtattaatatgattctaagattgcatctcagtgcagaagaaagcgtactgtgatagattaacaatgtctgctgaggcaaagataggaatttggagtcaacatgccatgaatttatttgttatttcatgaactgaaataaagccaaaatcttatagatacccctgtagctataagactaccaggcaatcatcacgtagtgcatcgaatcatgaaaccaacaggaaaaataagacatccagctgtctggaagatagaacaaaggaaatggtccattttttcgtcgactctgcaaggcacaacagtgtttaagttatccatcatatgagcctttccacacagacataatacacaggagatgaagaacgagaaatgctttagtgtaggttactgcttggatctggactgagagacaagctaattgagcaattgcctatga

SEQ ID NO: 110805 - DNA, 266 bp, Homo sapiens
gggcactactcagatcccattcatgagggctccaccctcatgacctcatgtaatcctaattacctccccaagactacacctcctaataccctcaggggaatagtttcaacataggaattttagggagacacagacacaagcattccgtccgtaacagccaccaccttcccagataccttggttttagaaaattttattgatttatttttttgagttggagtctctctctgtcacccaggctggagtgcagtggcgcaatctcgcaa

SEQ ID NO: 110806 - DNA, 149 bp, Homo sapiens
tgctgggattacaggcgtgagccaccatgcccagccagttctgtcactttaataagggtgtaacaacctggggtacgtctggaggaggaagatttggacagtgagtaattctgaaatctttactaaaatacagtgggaagagtcattgg

SEQ ID NO: 110807 - DNA, 106 bp, Homo sapiens
tgaaggatggattgatggtgccagaagattcatgaccacgtactttctgttttattcttacttaagtttttaaagggcattttagtgtcctttatgttgctattgg

SEQ ID NO: 110808 - DNA, 587 bp, Homo sapiens
tgaaactgagcatggaaaatttcaccttaccagacaggcctttttggaaaccatacacagtgggacggggggttaaatttatatttaacttcaaaagattttttcttccacaaatgatataatatggggtactgagcaatcattttttggtataattgagctagcttgttggtctgttcaattatttatgagccacttacagatttatttaggtatttcagcatactctgacctccatctctcagaactgaacatcgacagtttttcttttttcctttttgggtgcataaataagagaatttcatgtcagtaaaaaatatttccatgttgcaaaacaataaggtgattatgtattatgtgaagttgttggaacccctaaaacataaagaatgagaaaaaaatgacatagatctcactgatactccatattgatatgatctgaaactgaattaaggaaaaggtggggacaatgttgggagggcaaggaatttgcttctctattttctcatttaaagttttatggttttaaaaaatggacaaactagggatttgagcatttggaaatattaaatcaaaagtaccaaact

SEQ ID NO: 110809 - DNA, 428 bp, Homo sapiens
gtagatcgtatttgaattttaccagttttcccattaacttcctttttctgtcccaagatctaatgttgggtcccaccttacatttagtttcatgtccccttagtttcctccaatctgtgacagtttcttaattttttcttgtcttctgtgaccttgacacttctgaagaaaacatttccttgatatttctgatgaaaatgattattatgtagaatgtccttcaacttgaattggtctttttctcatgattagaatgaggttctgggtttttggcaagcagagaacagaagcgatactatatttttctcagtgcgtcatatcggggtcatgatgtcagtgtgtcttatactggtacactaacccatgtctgctaggtttctttccaatacagtcactgtttttctcattacaactaataaacatcctat

SEQ ID NO: 110810 - DNA, 707 bp, Homo sapiens
tcaagcacaggtgaccatcaggatgtacggatgagacggcccagttggtgggagctcaccagactgacattaaaaggaaaggccaccccaaacctccatagcagtagctgggaaggcctgaatggctgtgtctggcctggaggaactgctcccttcaggaaccgtagcccttcaggggcctgaagcatttcagagacgaagagggagcccctgagacgcccacatgtagacactccaggaaacagcagtacctgactacactcaacaaacccgaagtcctcacggcctggcaggctcttcacctctggcgcctgccacactccagcctcacggctttccctcccctccctgctcttcccactccctgtgacactcttccctgcgacagcttcatggcttactactggtctctgcatcaatgtcacctcctcctgaaagccttccctgatcacccttggtgtgtgtctcctgtctgtcacagggcagggaacttgtgtctggctgccagtggcatccccagcagccagatccctgcctggcaatagtagctgctctgtcaatatctgtccatggttgagtccagctcctattcctcgcagctctgtgaggtccccaaggacttggttacaaggtgctctcagctgagtggccttaactaagattatcatgggtgatgctggtaggtttcccccaaatcgacatgactg

SEQ ID NO: 110811 - DNA, 242 bp, Homo sapiens
tttctcagttattgaacacacctcactctcctgtcagtctcatgcatttcaaggctttaaataccattcataggtcagtgactccaaaatacctatgtccagctcagacctctctcctgaactccacacttgaacatccagctgcctactcctgatctctatgtggatacctaaaaagtgcctcaaatttaacattgccctggtagcaccctcagtgataccaacaaagctggtacatctgc

SEQ ID NO: 110812 - DNA, 298 bp, Homo sapiens
aatttttaaaataggaaaaaaggatcttgtagttacccatgtagttactgattccagggctcttcattctctcatgtagagtcagattcccttttgctaccattgctcttctgtgggaaggacttcctttcacttttcatgatgtgcagctctgcaggggatgcatattctcacttttgtatgtctagaaaagtttcagccaggcatggtggctcatgcccgtaatgccagcatttagggaagccgaggctgtcagatcacctgaggtcaggagttcgagaccagtctggccaacagg

SEQ ID NO: 110813 - DNA, 646 bp, Homo sapiens
ggcaggattgttagagttagccgcatttccagtaatggccttagttgtaatcacctgttgaatgtttgtatctttgtttttctacttagtatttttgaaagactatatctagcaaacatggtgcgttactaagaatgtaagaatgaatacaatggttcagacctggtaactgtcagggtgagaaacaaaaggattttggtctgttaggaatatgcccatacatctcttaataaattttagtaaatctattttctctgatctaatctgaatatagttttaaacttttattatggaaaattataaaagtaaagggaacaaattaatacacctacacctaaaattaatacacctaaaagtaaagagaacagattaattttttttttaattttattttactttaagttccgggatacaagtgcagaatgtgcagatttgttacataggtatacgtgtgccatggtggtttgctgtacctatcaatctgttatctaggttttaagccccacgtgtattagctatttgtcctaatgctctccctcccttgcacccaaccccctgactgtccccagtctgtgttgttccctcactgtgcccatatattctcattagagaacagattaattaacttgcattgtcatttttgtgt

SEQ ID NO: 110814 - DNA, 386 bp, Homo sapiens
ttgtgatctgcccacctcggcctcccaaagtgctgggattacaagtatgagccaccgtgtccagcccctcctttgattgtttacagaagagagataactagcataccttcaactcaatgatggattgagcctttgtaggctcaggtttaccaacttttcaaggttttcttcaatggcaatatgttctgatgttcccttttcccagaatctgtcattattgataccatagtgctttaatatatcgttataatattatcaacaaaaatgatgtttaccaagggaaaagtaggttagtcaagtactagagggcgatgaagcagtagaggatggagtaggaatcatcccacagtgtaattgaagactctgaggtctttattacactactg

SEQ ID NO: 110815 - DNA, 148 bp, Homo sapiens
tctgccttgcatagtactttaaataggttgcttttctaaatgcataggtaagtaggcagtttaatactactagaattatttatttcactgttacttttcctactgtatacacctcttgtttatccctattcctctccccctttttttt

SEQ ID NO: 110816 - DNA, 436 bp, Homo sapiens
tgagtagctgggattacaggcatgcgccaccatgcctagctaatgtttgtatttttagtagagatggggtttcgccatgttggccaggctggtctcgaactcctaacttcaggtgatccacctgctccggcctcccaaagtgctaggattataggcgtgagccactgtgcccggccgctttgctcaatttttagtttgcttggctgagagatgtcccttagaagcaattttacccctaagatttagacatcactggaaatttttgcttcagtgaggggaaaaaaagatggaaggacctgatttctacacttacaagattacagaaattaataaggataaagtggctgcattctctctttggcaagagaaataatatgtcaaaaggcacttaaggattcaaagcttccaatctgagattttaatttctcacacatct

SEQ ID NO: 110817 - DNA, 373 bp, Homo sapiens
ctgaaaggaggaccagctttatcaagaatctttttgtcctctttgatggaatgttcctgtggggatttttcagtttatactaatttatactgggatgatttcagctaattctgatttctttagaatgtttttaaatttaaagctaaatttaactttatactttcatatatatatatatatatttttttagatggagtctcactctgtcacccaggctgcagtacagtggcacaatcttggcctactgcaacctctgcctcctggattcaagcgattctcctgcctcagcctcctgagtagctgggatatttattacaggcaccgccaccatgtctggctaatttttgtatttttagtagagacggggtttcac

SEQ ID NO: 110818 - DNA, 414 bp, Homo sapiens
cctgtagtcccaaccacttgggaggctgaggtgggaggattgcctgaggccaggagtttgagacctgggcagcatatgaagaccctgtctctaaaaaactaaaaataaaaaatagccaggtgtggttggtgtgcttgtggtcccagctactcaagaggctgaggcaagagggttgcttgagcccagaagttggaggctgccgtgaactgtgattgcaccactgcacttcagcctgggtgacatagcaagaccctgtctctgtggtggtggtgggtgggggtgggggaaggatttaagaagggtttgtgaggtatgtattatttataaatgggcttttaactttacccttcacatcttgggttgaaattaattgtatccattctcagtttttctgtcttgctatatatttaaact

SEQ ID NO: 110819 - DNA, 368 bp, Homo sapiens
gacctcgtgatccacctgcctcggcctcccaaagtgctgggattacagcggtgagccactgcgcccagcctcctttaacatttcttgtaatgcaggtctactgacaataaattttcttggttttcttttatttgaaaatatctttattttaccttaactcttggagaatatttttactggatgtaaaattctggtttaattttttaaattcccatagaactttaaagatgtttcattgtcttctggcttttattgtttctgataaaaatctgaagacattttgaatcatccattcttccccgtatgttagagagagagagcgtgtgtgtgtgtgtgtgtgtgtgtgtgtgtgtgtgtgtgtgtgtgtg

SEQ ID NO: 110820 - DNA, 870 bp, Homo sapiens
atggtaattgtcaagaatcatatttgtaaccacaaagaacaataatctcacactatcttctgggtaaactgctcctacgtttgaattgattttgtaaagaggtaactgtggtttgtggatgaaaacatttgtttatttgcattttttgttgttgttgtttgttttcttgagacggagttttgctcttgtcgcccaggctggagtgcagtggtgctatcttggctcactacaacctccgcctcctgggttcaagcgattctcctgcctcagcctcctgagtagctgggattacaggcacacgccaccacaccagggtaatttttgtattgttggtagagatggagtttcaccacattggccaggctggttttgaattcctgacctcaggtgatccgcctgccttggcctcccaaagtgctgggattacaggtgtgaaccaccgcacctggcctatttatttgtgttttatgatactatttaccttctcactgccaccattctcagggctttatcagtaccccacaaaaaacacaccttttgatttcctccctttttacctgtggtagtaactcatttaatgccatgttccccccttcatgaagcatcttctagttgcttagtctagaggttgaatttttctttatgctgtcactgtttttagcttgcgtttcttctgggcattccttggcaatgcataatttcgtaattattaagtgtacatatctcatttttaaactgcagaattcctcaaaggttaaactacctttatgacctttatgtctccatggcgttttataataccttagcattccttaaatattcaaatgtataatatgaagtgtgtttgacattctcatagtaatagaataa

SEQ ID NO: 110821 - DNA, 325 bp, Homo sapiens
tttgaattttttgtagaaatggggtttcaccatgtcggtcaggctggtcttgaactcctgacctcaagtagtccacctgcctcggcctcccaaagtgctgggattacaggcatgagccactgcgcctggcctattggttggaattatgttgtaaagaagtgcttttgtttctcccccatttgcttattatcactgtggatatttgggtttgcattttattcagtgagttataatctgttactgtccttatggattccggtgctctagtgctcttgtcccagatttggctactgagagctccttcaggctgattccatcatctttt

SEQ ID NO: 110822 - DNA, 469 bp, Homo sapiens
catatagagcaactagcctcattgtttttgaattgcaagatctctgattggttcttatgcgggggtgatttctgggctttcttgctctataattcactataatttgattgccattgagaatgaaatattttctaggctatggtgcagtggaacctcaggtgaaggattttaaaattaggggagtaggcttgacgcagtggctcatgcctgtaatcccaggattttaggaggccaaggcaggaggatcacttgagcccaggagtttgagaccagcctgggcaatatagtgagaccccatctctattattttattattgttattattattttatactttaatttctagggtacatgtgcacaatgtgcaggtttgttacataggtgtgcaggtttgttacataggtgtacatgtgccatgttggtttgctgcacccattaactcgtcatttacattaggtatttctcctaa

SEQ ID NO: 110823 - DNA, 350 bp, Homo sapiens
ttgttcttctatagtcctcaaccattcccacctgcccacctctactcatgctatcacttctttgctggcctggatggtggtctgagccagtctcctcctcagagactcaaatagaacatccaaaagtcttttgtagcaggcaagtttctgatgcctaatcttagccccatttcttcagctttatgctatatattctgtgctgaattatcacattcttatttttatgttgatttatagccattctatgattgtttcaagagagtttttttttcctcttttctgtgaaagtggatgtaccataaagataagtaccacatcttttaatttattgcatcttaactaaataaatt

SEQ ID NO: 110824 - DNA, 288 bp, Homo sapiens
tggatgaaatttctccttcaaagcttcatgccttggtctttccacattttgaaaattaaaacacccacgggagaataataagctagctgtttcaggtattcactattatcaggagctgggaactggcttgaaaggccttggaggaccaaagaattagggaaaattatgaggagaaaaattacttctgaaaataagaattgactatagaattttaggacgagtgctaaatttgaaggtaggcagaactgtgttcaaattcaagccagaccacaactagctgtatgccct

SEQ ID NO: 110825 - DNA, 285 bp, Homo sapiens
agctggaagtatacttatgatatatctacaagttgctacttcaaaagcaaccttcctacttttccaaataatttataggagtgtgataagctggaaaatggtccaccaaaagatatctacatcctacactgtgaaacctataaatgttttatgatttgggggaaaaacaggtctttgcaggtgtgattaagttgagaatcttgagatgaggggattatccttcatcatcaaggtgggccctaaatgccatcacaaatgttgagagagggagggggcaatctgaca

SEQ ID NO: 110826 - DNA, 409 bp, Homo sapiens
cgcaaccatcttttttatcctcagttggaaaagtgtctgttttcttctaattataaagatgctgcatgctcattacaggaagttctaagagtatcaaaaagtgtgaagaattaaagattaaccaaaattctgggaaaagattgttataacaatgttgacaggcatttacaacaaagcataacattattctttgacattatgctttgttgttgtttttaacaagctatatctagcttcctattattttcattttgaagtgcgacattcacccatcagaatatacactgaactcataaaaatattccatgtttcaaaagatgaaatacaacctttaaataaacacctagaaaaatggcctccctgggcacaggggtgcatgcctgtagtcccagctcctcgggaggctgag

SEQ ID NO: 110827 - DNA, 380 bp, Homo sapiens
aattcttgtgaagattaataatatatgtaaaagtgaattgtaagatactgagctatatagatgttaggtagagtagtttgtaattttatgactatgattgtgtgtagcagtggttttaatttcggctatgcacttgaattacttgtgaagatgtaaagagttgccttggcatctctattttgaaaggtttataggtgattctgatatgcaaagttgagaagcactgccttatattaacaatgttttgcataaatgtcttatgtaagtattatatgaaaagtaatattttattgccatttaaagttcattcatttgctaaatacatattatgcatcaggcattgtcataggttctgaataaacagatgaatcatagcctct

SEQ ID NO: 110828 - DNA, 119 bp, Homo sapiens
gctgaccaatctctgtgcttctgtcccatcacccttcttctgaaatggggatgctgatgtatccacctcctaaggttgatgcgaggatgaagttatttcacctataaagtgctgagact

SEQ ID NO: 110829 - DNA, 393 bp, Homo sapiens
tctgtgcttcagtttgaatattttctactgatctttttttcaagttcactaattctgtcttctcactagttcactaattcagtgttcagcctgctgtgaagcacagagaaaaaaatggaaaaaacaaaaaagacaaaacaatggcttctagaagaaaacataggtaatagcttcttgtcctgggagtaggcaaagatgtcttaaacagaatgccaaagcaccatatatagaaagaaatttgatagacctcattaaaactaagaactcttgttcatcaaaagactcgagtgtgcttctagaagaaaacataggataatcttatctatgtggccttgggtgggcaaaatttcttaggacacacaaaagactaaacataaaaatgtataagataaa

SEQ ID NO: 110830 - DNA, 583 bp, Homo sapiens
ggtaataggagcaaactcagatgatccacatgttgcagttagtagtcaaggattttaacataagtattataaatgtcttgaaaaaaagaaaaatgaacagatagaaaattttgacagagaattggagtctataattaaaaggaatcaaatagatattctagaactgaaaaatatatttgaaattaacattggatgggcttaacagcaggctgaacactgaattagtgaactagtgagaagacagaattagtgaacttgaaaaaagatcagtagaaaatattcaaactgaagcacagagaaaaaaatggaaaaaacaaaaaagacaaaacaatggcttctagaagaaaacataggtaatagcttcttgtcctgggagtaggcaaagatgtcttaaacagaatgccaaagcaccatatatagaaagaaatttgatagacctcattaaaactaagaactcttgttcatcaaaagactcgagtgtgcttctagaagaaaacataggataatcttatctatgtggccttgggtgggcaaaatttcttaggacacacaaaagactaaacataaaaatgtataagataaa

SEQ ID NO: 110831 - DNA, 361 bp, Homo sapiens
ctttgttacctaaacttttcacaacctttataggttacctgtttgttaagatcacttttataagctagtattacaggttgcaaagatctggagatgagtggagagaagagagtgtgtctgtatgtgtgtgtactcagtgatagcagaatagattagaaagagtatgtgtttaaaataacacacaactttattaatttatacaactttgggtaaaatacatcatttctgagtctgtttttccctctataatgggaatacagcaaggttattgtattaaatgagaatgtacagcacatagcatatcacagatgttcaaaagtaactattatgtttattattgtttattaataaaaatgctagt

SEQ ID NO: 110832 - DNA, 407 bp, Homo sapiens
cctaagcccccaggtgaccacactgccctggatgctggatgaggctctgacattgtggccttgagcaagtcccttctctccatgctgacctctaataagtccagtacaaagtgtgaacctgggtcaggcgcggtggtcacgcctgtaatcccagcactttgggaggccgagtagggaggatcacttgagctcaggagttcgagaccagtctgggcaacgtggcaaaaccttgtctctggaaaatatacaaaaattagctgggtatggtggcatgtgcctgtagtcccagctactcaggaggctgaggagggaggattggttgagtccaggaggctgaggctgcagtgagccgtgattgtgccactgcactccagcctgggcaacagagtgagaccctgtctaaaaaa

SEQ ID NO: 110833 - DNA, 450 bp, Homo sapiens
tagaggatcccctcctgcttgtccctaattcctgtttccctaactgaccacctgctttcagttggccacctttccttccttaccctttctaattcctgttttcccacacatagtcacactccttccttgctgtataaactttcgattttagtcagttagagatacagatttgagactgatctctcatctccttggctgcagcaccccaataaagccttcttccctggcaatactcatagtctcagtgactggctttctgtgaggtgaggaacaagccctagaccaaacccctggtgtttcagtaatacctggactcccttctgtggattttcctagagggcagcctttccttgtacaactccatgttccaaacattgctgaccctggggccagaggaactgatataaatagaataggatggaaaacacatcacagggagcaggagaacca

SEQ ID NO: 110834 - DNA, 170 bp, Homo sapiens
tgggcgacaagagtgaaactccatctcaaaaaacaaacaaacaaaaataaatcaatttccaaagcacccttaatgacatatcttgagataatctggcagactagaaagaaaaaaatagtaaactattcccaaacccacggttcaaagatttagtaccctaaatttaggct

SEQ ID NO: 110835 - DNA, 356 bp, Homo sapiens
ttactagttgtccctcaatattccttccattttctttcatataaaaaaactatctgggtatgtaactgcccaacctcctctgaaactaggtttgatgcatgagatgttaagaaggacctgtgtgcctactttatgaaatacctggtgcactcccttttgctgttttcctctcttccttccatcttgtagtctggaatctagatgctaccttggaccatgaggatgcagatcacaccctagaaattagagagttctgaagtggatgtggttgatctgtgggaactttatttaagcactgcaacttgggttttcttcttactcattgctaaatccagtcttaatgcataaatctggat

SEQ ID NO: 110836 - DNA, 614 bp, Homo sapiens
cctcgtctgtgtggacatttcctctccctccctatccctgcacactagggattaacaatctgcacttgttggggagggaaagaagtcacgtttgtcatgttttgtctggcattgttttttctgaaatgattccgttttaggatgtgagctccttcaaataggagtttcaattccttatatataatatacagtactcagcacacagtagtttcctatatataatttttaaaaatcattaagcatttcatctctgtatttcatattttagcttgagttaatagctgtttggggaaaaaaaagatgactagcaccataaatcatattttggtgaccaaaattagtcaaaaagaatatattatactgattttgatattttggattagggagacaacttgatgttaacttacatttaacagaggttccattttagcaacaatatatgcatatcagataaagaacaaaggaaatcagatactgttgtgatgaaatccatcaaattttcaggtaaggcttaaaaagatgaagatagggagaaaaaaccttccatggccatatcaaatgatggaaattaactcagcctcaagggaaaatatcatagaaaatgatgaattgaa

SEQ ID NO: 110837 - DNA, 306 bp, Homo sapiens
ggggttcagcataattatttgcttggttggcaagtttttggactctatccttgagtttttttatgttgtcatataccaggccagattgatttaggtaaaaacaacactcttcatttaaaaatatacagagtcgtcctttttcagcaatgagtaaattgaggccttggcgattttggaggaaagagaattgcaaagccagcaattgtttctttttttatttatttatttacttatttttttaaattatactttaagttatagggtacatgtacacaatgtgcaggtttgttacatatgtatacatgt

SEQ ID NO: 110838 - DNA, 686 bp, Homo sapiens
cagtttccaaaggaaccatttaaaaattattgtctgtattttgggcccattaaactctactaaaaaatcattgactatctgggaaaattgtctacatactcccatctccccctcacctatgaagagggtgcatttaaacctcagctctctggcccttctttgagtctcatagtttttatggttcctgggctcatgtacattaatatatgtgtatgccttttttgcctgttaatgtttctattgtcagtttctttcaacagagttgaactttcagagggaaaggaaaatttctcttcactcctatgaaaggaaaatttctcttcactcctataccaatcagctatatattttgttgatacagtaaaaatagtaaatagtaaataataaactttcatattttcaggaatttgtttaggaagaatatttgaataaactggatattttgcttaattagcaattatcacactataaatattatatgcatcacacagatgattattttccagataaatagggtacaatggaattaatgtatcactaaaattctgttaaaaatcattgacaacctgattaaaaattcgaagacctttcaaagctttaggttcaccattctaaatatatatttaattaccaagaatcttagatagaagcagggattatgtggtggtagaattttatttgcaaat

SEQ ID NO: 110839 - DNA, 664 bp, Homo sapiens
gaaacttaaacctaattagcttcatggtaagttcacctcttttccccaggacaaacaacttaatgtctgtttggagtttttcccttcataaacatgtttttttttctcatgcaccagcaatcctttactttctacaaccactaccacaaactctccctccctgccattttccctgccccaaaattaaggtaaaaaacaaaccaaaagggggcgttagagaaataaaactatattaaggatatatccttcttggaggatcatttagctggcatagggcaaaaatatgacaaattaggattgggatgaatcactgattatgtagtgtatgttgagtatagaattagcagctgattgggaaattcatccaaagctgtataatatgtgacctctggcaaataaattgagctcacctataaaatgaggggattgtattatatgcttgataaaatatatggtgaagtggtattaagtgctatttggctctagcattcaggaatacccacatcccaccagcaactgcagtaactacttttcaccctctcatcccaaactgttcccacagaagagtagtagcaaagttaaaaaacaaaaatctctctttctctcccccttccttcctgcctccctctttctctctccctctctctttacctctctctccctc

SEQ ID NO: 110840 - DNA, 308 bp, Homo sapiens
aggtaggaggatcatttgagaccaggagtttgaaaccagcctggacagcatagtgaggctttgtctttacaaaaaaaattagattaaaaagaaaaaggagttggaggatatctgctgataggagtagagtctcccagtttagtagctatcaatgggcattagggaatgaatgaatgaatgtggaaccaatatgcacgtgtcaactcaatgagattgacatgtggaaattgagattcccaaatgggtgtttttgtttgttgtttatttgttccttttaatctctaccatttgtgtcttttgccacttct

SEQ ID NO: 110841 - DNA, 731 bp, Homo sapiens
atcattatcaccatgaactaaaaactttctagacaataaaattagtattatgtgatgaatccaatatgtgtaattgaagtttttcagagaactctaattagtgcaagttctcctgtgctttttggtcctttcaccctttcatctcttttaaactttagaagcagaatgatactctcaatatattgattgtattccctccattttattggagagactagatcatagttaataaaatatgttattggactgttaggattatgtatatatttagaaaataagacttttaaaatactttgtgaacactagcaaattttacaggtggtaatagctatccagattgctaagttatttttaagaatatctgtcttgagaatggatccacataagtaagttgataaatgccactagttgataataatagcaggttatcagcatgcactgatttaattttcatactttaaaattttcaaggctactctgaagtttgatggtatttttgtaattttgctgaagcataaaatcttaaaaaaaaaaaagttttatgaagctcctggataggctaagtcgtaaagaagcctactagccacaacaactttttcatttcaaatgaccttttgatttctaataaaattcctctttatcatgaagttttcctctaatagaatttgagaaattaagtattagtgtggaaaatgctaagtgctagttgaatgaatataaattgtgtggtg

SEQ ID NO: 110842 - DNA, 845 bp, Homo sapiens
cacagtggctctcgtctgtaatcctggcgctttgggaggccaaggcgggtgatcatctgaggtcaggagttcaagaccagccttgccaacatggtgaaaccacgactctacaaactacaaaaatgagccaggcatgatggcaggtgcctgtaatcccagctacttgggaagctgaggtgggagaatcacttgaacgggaggcggaggttgcagtgagccgagattgcgccatagcactccagcctgggtgacagagcgagactccatctcgcggggtggggaagtgaaatccagtacattttactaacagtggaaatacaactagaagttgttgggtgaaggagaaaaggagtaagggaattaatattcagtgagggcttactataattgaacttcttttccattctgtgttcttttattttatgcttattattttaattgactgttaggattaagcaatccaaataagccggaacctatgaaaataacttctaattaccaataagctttcattcaaaacttcactcaaaggccgggtgcggtggctcatgcctgtaatcccagcactttgggaggccgaggcaggcagatcacgaggtcaagagattgagaccatcctggccaacatggtgaagccccgtctctactaaaaatacaaaaaattagctgggcgtggtggtgggcatctgtagtcccagctacttgggaggctgaggcaggagaatcgcttgaacctgggaggtggaggttgcagtgagctgagatcgcaccactgcactccagcctgggtgacagagtgggactccatctcaaaaacacaaaaacaaaaacaacttcactcttca

SEQ ID NO: 110843 - DNA, 264 bp, Homo sapiens
aaatgaaggaggcagtaatcagggtgcaacaccaggtaattcagaaggctccatgtgacaatctcagaaggagccccagcagcctgtagagccctaggagacttcctgaggatgtgagcccgtgtgtcaccttgggctcgcttcgacttggatcatgagtaaggcaacctcactgtataaagcaattggtgagtaaatccacaacttcaatgagaaagccaaggaatcaggtgggcacagtggctcacacctataatcctggca

SEQ ID NO: 110844 - DNA, 137 bp, Homo sapiens
ctgcagagggtgggggcagctacttttctttcccatttccgctgcgacagttgtggtcttgcctcacgggagcttccacggttggctagaggttccctgagaagcaagtctttgtctcaaaaaaaaaaagtaaataa

SEQ ID NO: 110845 - DNA, 296 bp, Homo sapiens
cctgtgcctggctaatttttgtatttttagtagagatggggttttgccatgttggccaggctggtctcgaactcctgacctcaggtgatccacctgcctcagcctcctgaagtgttggggattacaggcgtgagccactgtgcctggccaaaatatttttttaatttagaaaaaaaaaaaaaaaaaagcactctggctcctgtgtggaaaagtaagtgtgagagatgcagaatcgaagtaagagaaatcattggtaggctaggactctgctgggagctgtcggtagcttatactaa

SEQ ID NO: 110846 - DNA, 361 bp, Homo sapiens
ttgcgccccttcctgcgagttcggatgcacccctcctagaagcgcactgtctgctatacccatcctagaagcgctttctctttcatcacgggtgctgcaaaatcgaaacgtagctacagagaaggtaagagcgaatatcgccctttcctcctctgaaagggaaaatgctggttatcctagagctgcatgtgaattttacaaacatttactagaacaaccaactcttcaagccttcaggctctatctgtttaaaccagtgaatggataattaatagcagcctccttttggggttttgactagattgccagattctgcacagctagggtcttcttgcctccaacttgccttcctgagccgtgc

SEQ ID NO: 110847 - DNA, 605 bp, Homo sapiens
caaacaaaaaaagattgaagtaatgaattttatttcagtggtatggggaaccttgtttctgacagtaggggaagctatcatgttcctggtaggaggttgcatcttatttcaagcggtgggaaaacaggacctggctttgcattagtaactgaagccaggtggtgaactctcagcatgtgtaaggagccggctgagaaggagctttgctcccatgatattaaattatctgattattgaaaacttttgtaaatggtcattagtgagcaaattgtctttttaaaaattctattatgaaagagttttaaacttaacagaaaataggcaagaacagtgccaagaactcctgtacactcctttgcccagagactattcctttagagcaaaggctacagcccagaatcacgcgcttcaccccattcatcacagctctcctttctgtccatctggtgccactcctcagttttcctgaacttccgcgattttggcgtttgtggaggttataggctgatcattttgtagaatgtctttcaatgtggattcgttgatgtttctgcatgattagaccccacctgtgtgtacttgaagcctgaatgtcacagactctg

SEQ ID NO: 110848 - DNA, 720 bp, Homo sapiens
gggcactatctaaaggctcacaagtatataatcatcacaagtatgtctcattgcctcccccttttaaggaaaatgcataaatgctaaatctcctgagaacctcttagggaaaaagcagccacaaaggtagctgtgacttgggtttttcccaggcatgctctcaagctggaataatagaccttgatgacggagccttctgcctcagtcactcatttcggttgtcagtactaatgaaagtaagaattttatgtttttgtgctttacaaatatacttctatatagtaagagactgataactctttcatttacctttttaataataattcaagtgctctaatgccacaaagctaactttttgaccttaagagaataccacaatttctttggcctttggtttccgtgtaaaatccaggattttaagtaggtcatctccaaggctctgactggttctaaggactgcaggagggaggaataagacttcttcatagcttataaattgattgagacagttgcaaaaatacttgtatttagttctgtctgttgacaaatgcagaaatcaaagatgaagtctgcaatgatgcgcctaccaaatcacatatatgttgtaacatgtaggccgatgtataagagacatgtgtgactcatggccagattttaggtttacagtttaattcaggtacatgatttgtgtcctttgagtttacatttgacataaaatat

SEQ ID NO: 110849 - DNA, 369 bp, Homo sapiens
cctcgcccggctaattttttgtatttttattagagacggggtttcactgtgttagccaggatggtctcgatctcctgatgacaaattatttttctaatatcataatgaactcatggatttaagtgtatttgatggatttcaagctactataattattacacaatcatgcatcattcaatgacgggcatatgttctgagaaatgtgtcattaggtgatttagtcactttgcaaacatcacagggtgtacttacacaaacctagcttactacacacctaggctatatgttatagcctgttgcttctgggctacaaacctgtacagtatggtactatattgaatactgtaggcaattgtaacacaatggtag

SEQ ID NO: 110850 - DNA, 733 bp, Homo sapiens
aggttgtccaattactagcagggctgagttttatcactgggttaaagcagtgtctgttgtaaaaacacattttccatttgtaattaatcagtaatgtatggaggtagtaactggaggctgtgaacatcatgttccccaacatttcactcagaggattttgtgtccattgatgattcttcctaattagttattacattgttggctacaaagtgatgatttctaatttaattatgattcctttttatatattagcagatattcttcagtataagtcagctatattccccttttaaaatatctggacttccggcctcatgaactcatggattctcttttagatacagtattataatccattaacactgatattctttttgaagctcaaattgtccaaactttggccaataacagctcctttagtgccacgttggtggtataatggtgagcgtagctgccttccaataaaagctccttcgagctgactgctgtgtccttttgaaacgtcctcattagtctttcaacaattctttgctttttagcagaataagatattccaggctctgcttctacttttactaccctagatctgaaatgagcaatttctccaaggaaaacctggttcctttttgtgggaaatcatatttattaatagtaaccaaggtctgggtggcagttatgctcattgctactgggtactattgcttctaggccttgtctggaaagagctaatgtg

SEQ ID NO: 110851 - DNA, 309 bp, Homo sapiens
agaagggtgattttcctgcaaggaaggcagacactgctgtgagcaaggggcatgtggccacacagaggtgagccaggcatgctattgctccccattgagctcacaattggagaacacccagccagtccttgccagccaaagtcacatggcatctcaaggacgctcacctgttcaggctttcaccacagcaacgaaacatatacaactctctgccaagaagtccctgcctaatatggtttggctgtgtccttgcccaaatctcaccttgaattgtaataatccccatgtgtcaagggtggggccaggtgg

SEQ ID NO: 110852 - DNA, 416 bp, Homo sapiens
gagaaatctgacatagttgactccttcttgcttctagctttcaagctgtccttggtcattcctaggcattggccaagctaattttgggaggatttagtttatagtttaaccttaaagcaaggatgataatagcccttcccaaaactaaactgcttttgtaaaattaatgagaggccaaaagattaggattatgctgggggcttgaattctgctaagacataggcatagttaaataacaaccagccattgttccagaggtcacaagatttgtaacttctccaattactcctatagatggcatcactattgtagaacctaagattgctcttttgagatatttttcagactttgcattttggcaactgactgactccacctggactcatgactcaactggtcttgtggcccccaaccaa

SEQ ID NO: 110853 - DNA, 349 bp, Homo sapiens
aaaaatgcttgaagaatttgtaatcatggacttttatacaccatttaaatgaaaactcagtatttgaatctggtggtgatttaaatatttatgtaaaagaggacattatcagattattttcctgtcattcttattcctctataattttccccaaatttttgatattggccacttttgtacctcctgcagatgtcaacaatacaagggtcctcatgtattgaaatacccacttacgggtatttcagagactgagccgctggaagcccttggcagtgttttcataagggctgatgcattctcttatgggtagaggccatggctcttacagaaaagattattaggcttaaaa

SEQ ID NO: 110854 - DNA, 248 bp, Homo sapiens
gctctgacttggctgtctgtatacaatatggtggaagagagtttggcaccctgcaagaactcaagaaagcctagatgaacaagaacataaacatggtaattctgctacgggtaagtatcatgacagaaatacacagagtgatgtgatgacaaggagtggcaggaagagggataacttcagtggttagaccttttttttttttttttgagacagtctcgctctgtcacccaggctggagtgcagtggtg

SEQ ID NO: 110855 - DNA, 397 bp, Homo sapiens
taaaaggccagtattacttgccataaatagaaggttactgtaaaaacagtgaacaaactcatgttttcaaattatagctagatactgtttgcagaaggctttggtgctcccgcttcactctctgttgcaaagggaattcataattaatggaagtgttagaagcacactagcaccagactgagtctttttactgggaagaatcagaattaaagaagaattgagaaatgaacaactttcttatgatgtgatttctgagtcccacatgtctagaactactcaagttatacaagaaatacgtgccccagagctttggagttcctcatcaacccagagcctaccaatgagtgggccacagcacatgacagtcctatgaatgggttggaatttgctcaatatt

SEQ ID NO: 110856 - DNA, 533 bp, Homo sapiens
tgctgaatgaagtgagtgtgctctgtaggccggacaccgtggctcatgcctgtaatcccggcactttgggagactgaggtgagtagatggcttgaggtcaggagttcgagaccagcctgggcaacatagtgagaccttgtctctactaaaaatacaaaaattagctgggtgtggtggcatgcacctgtaatcccagctactcaggaggctgaggcacgagaatcatttgaacccaggaggcggaggttgcagtgaacagagatcgagctgctgcactccagcttgggtagcacagcaaggctctatctcaaaacaaaaaacaaaaaaaaaagtgtgctctgtccataatatggaatgctatttagcaacaaaaaggaatgaagtacagatacacacaacgacatggattaacttcagaaaccttatgctaagttaaagaagccagatgcaagagactacagactttataccgtataattccatttttatgaaatgtctagaaaaggcagatagaaacagacagatgagtgttt

SEQ ID NO: 110857 - DNA, 248 bp, Homo sapiens
ctctgcctttacacctacgatctccagagcactggcgagcctccagacaaactcaggaggaaagaaagatgagccacatttaaaaggcacttgttttctggagaggggtgggggtgtaaatgatgactagaaaaccattcacagatttatgcttcgaccctcactttacacccttgtagtatctgaccattactcacagtgggtatcttatcaggagccttactatattttatttacaagggagcttg

SEQ ID NO: 110858 - DNA, 295 bp, Homo sapiens
tttttgaggcagagtttcactcttgtcacccaagctggagtgcagcggcatgatctcggctcactgcaacatccgcctgcccatttatggtgataacaacttcttcctctcttacttcctccctctctgtcttcgccctgcccccagctatccgtctatactagttttctatttctgctgtagtaagttatcacaaatgtagtggttcatacaacacaagtttattatcttacagctctttaggttagaagtacaatatggcttggctctgtgtccccgcttaaatctcctgtca

SEQ ID NO: 110859 - DNA, 398 bp, Homo sapiens
tttcagtacacactgtcctttgaatgtattttccccagtagagctaaacatatttctctcttaaaaacttctaatgccttccgttagaatggagacctttgtgtggcctttagcatacctgcctctctgcctcgcccacactgatggccatttagtttctccaacttgacattttgtctcctgcctagggcttttgcatattcctcttgtcccaacttgttcttcacatgcattcttcagctctcagctcattcattccttcagaaaagcctttctgaatcccagattagctcaggttcttctgttatacctgcaccccatgtgtttccttcaaggcatttatagtagttggaatggtacactgtatgactatgcgatcatgactgtcttccctgtta

SEQ ID NO: 110860 - DNA, 160 bp, Homo sapiens
ggagcagcagcctttccttctgcaggacgggggcacaggccatgtctggtgcccgggagaagcgtgtcagcaagcgcctgagcccctgcccagggcccgactcccaccaggcaggggacagaaggtctactgcacgatggggcaaggaaggacgaagcag

SEQ ID NO: 110861 - DNA, 469 bp, Homo sapiens
atggtagaaatatttttatgaaaaactttgaaacaaacaagccttctacgtccattaagataattttgcgttgcttacagcactacaaatcttccaaatacaggcagtccccaacgtacagacatacaggacacctcccaaatgtaaacgacagccacacagcagggcttgcatgtgcaggaactcttcttctcccagtgagcagactaagcactctgaatcccaccccactgcctcgcagagggaaagaaggcaggacagatgcaagaagagtaatgtcaggggctccatcacagctgcccaggggcttctgctgtagttcatattttcctcattcccatctctggtttctcccataacccagaagtccctgccaggggcggtgggtcacgcctgtaatcccagcactttgggagaccgaggcaggtgggtcacctgaggtcgggagttcgagatcagcctggccaat

SEQ ID NO: 110862 - DNA, 524 bp, Homo sapiens
ggtaaacatttgttaagttaatgaataaattgttccctctttgcataaaattcaaacacttaatttggtctagaaaatctttcacgatctggcccctgccaacaccactttctcatgtactcatggcaatcttgtcacactggctctttgcatggctgtttccttctcattctttatgtctaagaggtcttccatggtcatctcatctaaagtaggtgcttcttgtcctctctctgagtactttgttttactttaggcaaatcatgattaattgttaaatacatggtataggcttgctattccctgggaatttgtaagagatgcagaatcttggttgtcaccccagatttactgaatcggaatctgtatttttacaagatcgtctaataagttgtgatgacatcagagtttgagaagctgggatagaaactgaaaggacagctgggcacggtgcctcagcctcccgagttgctgggactacaggcacacgccaccatgcccggcaaatttttgtattttttttt

SEQ ID NO: 110863 - DNA, 548 bp, Homo sapiens
atccttcattatgccaataaaccaccgtaggctttcctcaaaatgtagatgagacatcaccatgttcagatacctcagcttcttcatatataaaatgggaatgacagtaatatccacctctaaaggctattatgaatagcacaatgtaaatgaagcacagtgacaggcttatagcaagagcacaagaagttagagtttgagctgggtacagtggctctcgcctatagcccgagctacttggtaggactgtttgagctcaggaattcaagtccatcctgggcaacatagtggaacctcatctcaaattgtagtttgagtctattcattggacttacatgttttttgttcttgttgcctctgctgctctgtatgcagctgactaaatcaagtcactgttcagtgtcatatggatgtatcccaacacagctaaaccaggaggtttgataatgtcatatcatggaaattttaacatgaatctctatgttgtcctgtattttagttatattgaatattatgttaattttaagtaaatttctgttgcctttaca

SEQ ID NO: 110864 - DNA, 332 bp, Homo sapiens
tatatatgcaaccaacaacactggagtacccaggtatattaaacaaatattattagtgctaaagagatagaccccaatacaataatagttagggatggcaacatttcatactcagcattggacaattcatttggatggaaaaatatcaacaaggaaatattagatttgaactgctgcttcgttagcacacagcacattctccaggatataccatatgttaggacacaaaacgggtctcaataaatttttaaaagtcaaaatcttatcaagtatcttctcagaccacaatggaataaaactggaaatcaataacaagaggaacttctgaaatt

SEQ ID NO: 110865 - DNA, 344 bp, Homo sapiens
aaacctttccaaggcttggtttacttatctgtcaaatgaagatggtggtgcagttttcaggctgcaagtgagtgtgtaaggtcacttagctcataatatggtgacacatttcacaggtctcatgatcagatgaggaagcacatagtatcattcggccttttatacaggtccactggttacctgttcttggtaacagggtgaaggctggggtaacaagtcctgccgggagactgtaagaggttgcatggcactgtgggtcagagtagcatggatccagaccgcctgcatgtacattctggctctgccacttattagctgtgtgccattgggcaaattatttaacc

SEQ ID NO: 110866 - DNA, 225 bp, Homo sapiens
gctagaattataggcttgagccactgcacctggctggctgtgttccctgttgtgtgttaattatagtcagaattggttcaagacaacttggacactgtgtatgtggggacagcccatgagaaagaaccaccaactactttaggtttctaaggtttcatattgaagctcaacaggaactccaaccaaacctactgtaagaaggaactgacttacgaggcacagtga

SEQ ID NO: 110867 - DNA, 695 bp, Homo sapiens
gcttttattaggatcttgttatgtgcaagcaaaggtatgcatgccatatcacatttaatctccaaaacaggcctacaagataagttctctttccatgctcatcttaaagatgaggaaaacaaggctgatagatattccttaaaattactggagttaggccaggcgcggtggctcactcttgtaatcccagcactttgggagactgaagcgggcggatcacctaggtcaggagttcgagaccagcctggccaacatggtgaaaccccgtctctactaaaaatacaaaaattagccaggcatgatggcgcatgcctgtaatcccagctactcaggaggctgagacaggagaatcacttgaacctgggaggtggaggttgcagtgagccgatgtcatgccattgcactccagcctgggcaacagagcgagactccatctcaaaaaaaattactggagttatagagaagcccagatcccatagagaccctgacttgcacacaggtctctggcatctacatttctgaccttcgttacatcagtttgcactctccttgcctcttccaaatcagcacaaaatattaatgctcttcctagttgctctcaaggaacttacctcttagagtaccaggctgcatgctggccaggctatacttggcaagagcagagtttctagaatcatctcttgtgcactttgatg

SEQ ID NO: 110868 - DNA, 764 bp, Homo sapiens
tattgataaattttattctattaaaactcagaattgatatttattaaaagattccataaagaaagcaaaaatcaagctacaaacattttaacatacataatcaaaaaattatttgcatacaaaatatgttctaattctttaaaccatttatgtgtgttatatacactattctgaaaacaaaaaccagcacccaagacagacaaagcgtgtggagctagtgtggctaagttgaggcgggaaattaatgctgcaacaaagttactgactgtctccaacctgttttgtggtgttacacatgggcataataatagctccttcctcataaggctctcggagctataaaccacagtgtgtctaaaataccttgcccagggtctggcgcatggcaagagctcaaccaatggtgaatggttggaactataaataaataatcgtgtcagagccgagtgggaatcaaactcagctccttaagtcctccatgacctagacaggattattccagaccatgtggcagaagttaaggggccttggcgatgaaggcaagaatgcccacactgtttctcctgttcctccctctttctgtccctgaggcagtagctgtttactccaaactgagtctcccacacatatccagcagggctcagcctcagggaatccataggattctgggggtggacctttgggaggagaaaccatctcaactaagacactttcctctctcgtcagcaaagatattcagagatggatagccgacttacattttt

SEQ ID NO: 110869 - DNA, 317 bp, Homo sapiens
gtgacataaacgtgcatagctagaggttgtctagcaatatgaatgtgtcctatggcatctggcacccaaagtgtgtggttagtagaggaaaaacaaggtttgatgtcaaaagccagtctggggaaaattctttaagattttgtagctttaatgaaagagacttgttaagaattttcccaggtttgaccatagtcctaaaagttgatataacattatttattgatgatgttcctgtgctaaaagaaaacttttctaagccatcaataacaacaggctgagcgtggtggcttacgcctgtaatcccagcactttgggag

SEQ ID NO: 110870 - DNA, 248 bp, Homo sapiens
catatggctgagtctagctccagtgaaagccaagaaatacagtattacaagtggccatgttccagctaaaaatcagcattccattattaagaagggaaagaatcattatttgatagaaaacttgcagtgtcagacacaaattccatgccagggagtctgggctttatggagcaggtaacctttgaagaattctcagcaggtcttatgacatgagtggatttatattttacttttacgtgcgggtgggg

SEQ ID NO: 110871 - DNA, 409 bp, Homo sapiens
ttttttttttaaagacggagtctcgctctgttgcccaggctggagtgcgatggcacaatcttggctcactgcaacctccacctcctgggtgcaagctgattctcctgcctcagcctcccgagtagctgggattacaggtgcgtgccaccacgcccagatgatttttgtatttttagtagagatggggtttcaccatgttcgtcaggctggtctcaaactcctgacctcaggtgatcagcccaccttggcctcccaaagtactgggattacaggcgtgagccactgcgcccagccccaccttgctctttctcttctaccacacactacagaatcttctcccactctgcaccctcaactgatgaccttgcttcccatttcaccaagaaaagagaatcaccgggaagtgagc

SEQ ID NO: 110872 - DNA, 513 bp, Homo sapiens
tgaatagtcaactgttgtgactatttcgatcactttttgtgcacagacaattgtaattgggccttttgagggtaacgtttgggaaacgagcattctgagaatttggggtggcttaaggaacgtatatcacgttactcatacccaccaaacatgtatctcctttaaaaaacaaaaatggtaaatgaaaggaaagaaaaaaaatgcatacctcagaatgcactgctttacattctctggatttctgaattctcatttgtagtggccagtaggactgcttacatatcttctggttctcctgttctggtcttatggtaggattgtatttcctttcactctttagtgttaggcatggatatatcactaattttggccagtcatatgtgagctaagtgctagtgtgttagttcccatgtcccctcagctctgcttccttgggccccttagtgacgacagtgagctgcccctccctaacccccaattctatattaacaataaggtaggagtgagatagaa

SEQ ID NO: 110873 - DNA, 268 bp, Homo sapiens
ttgacagtgcaggccgggtatggaggtaacataaagccttccaagactcaagctcctcctactgcattgttcagttaaaccccattgtaaggtttgtccttagaattcaagatgattgctagaactccagccattacatctgcattcgtggcaacagaatggaaacagggaagaagggccttgccttttaaggagactccatgaaagtctcacacaagactttcatatacatcttattggccagaacttagaacatggttccaccagg

SEQ ID NO: 110874 - DNA, 344 bp, Homo sapiens
cacacacgcccacacgtgcttacacacacaccttaactttttttgcacagaagttgtgttgttcctggtcagtgtataacattttttgcaactttttgagtcactctggaagacatattcacattcatgtggcttaaacttactccttgaaagtcttggaggaaaatgcttaaaataaaacaaatttgagtttgcgacatgggccccttatttaactgcggaacaaatggttgttattttaattaccttttgtttcattgtattttaactcatgaaatgcaagtgttactgctactggtaggctttttccagatggaactaagcctatttattcttaaaaacat

SEQ ID NO: 110875 - DNA, 502 bp, Homo sapiens
ttgttgatcttttttgttgatctttttacttacatgattaattaggtgggatggctgggtaaaatccttgccatttttttgttacccctttaattttgtcatattcctacaatactttcattgtttcaggaaattatattcgaaatttaggatttctgtgttggtttattaaccttaaaatgagtttgaatttgtgaagtagtaaaatgtaggtagttggcatttatttgatcagattacattgtctcaaattggtttctgagttttattgattttgcagctcagcctttcagtttttctctaaaattattctgcaaagtgtactttttcttttagatatctcaaactaatgattattttggcaaatcgactctttcattcattcaaaacatatttatggtatgcatgccatgtgccagaatctctgctaggctctggggaggtgatggccagtggaaacatccctgcccttgtgaaactttgcagtgaactggggaaagga

SEQ ID NO: 110876 - DNA, 504 bp, Homo sapiens
cgctccccaatgacgtaactgccctgcagcttctagtagcttttcgcagtgtctcctaccgccgggcgcggtggcgcgtgcctgtagtcccagctactcgggaggctgaggtgggaggatcgcttgagcccaggagttctgggctgtagtgcgctatgccgatcgggtgtccgcactaagttcggcatcaatatggtgacctcccgggagcgggggaccaccaggttgcctaaggaggggtgaaccggcccaggtcggaaacggagcaggtcaaaactcccgtgctgatcagtagtgggatcgcgcctgtgaatagccactgcactccagcctgagcaacatagcgagaccccgtctctactaaaaatacaaaatattagccgggcgtggtggcgggcgcctgtagtcctagctactcgggaggctgaggcaggagaatggcgtgaacccaggaggcggagcttgtagcgagccgagatcgtgccactgtactgcagcctgggc

SEQ ID NO: 110877 - DNA, 343 bp, Homo sapiens
cgctccccaatgacgtaactgccctgcagcttctagtagcttttcgcagtgtctcctaccgccgggcgcggtggcgcgtgcctgtagtcccagctactcgggaggctgaggtgggaggatcgcttgagcccaggagttctgggctgtagtgcgctatgccgatcgggtgtccgcactaagttcggcatcaatatggtgacctcccgggagcgggggaccaccaggttgcctaaggaggggtgaaccggcccaggtcggaaacggagcaggtcaaaactcccgtgctgatcagtagtgggatcgcgcccacaacccacgcgcccacaacccacaacccatgacg

SEQ ID NO: 110878 - DNA, 497 bp, Homo sapiens
gaaaagagacttgatcatttctggtgccttagaaagctgctagcgcgtgcctgtagtcccagctactcgggaggctgaggtgggaggatcgcttgagcccaggagttctgggctgtagtgcgctatgccgatcgggtgtccgcactaagttcggcatcaatatggtgacctcccgggagcgggggaccaccaggttgcctaaggaggggtgaaccggcccaggtcggaaacggagcaggtcaaaactcccgtgctgatcagtagtgggatcgcgcctgtgaatagccactgcactccagcctgagcaacatagcgagaccccctctactaaaaatacaaaaattagcctggtgtggtggtgcgtgcctgtagtcccagctactcgggaggctgaggcaggagaatcacttgaacctgggaggcagtggttgcagtgagctgagatcatgccattgtactccagctcaggtgacagagtgagattcagtctcaaaaag

SEQ ID NO: 110879 - DNA, 364 bp, Homo sapiens
caggcggatcacgaggtcaggagtttgagaccagcctgaccaacatggcgaaaccctgtctctactaaaaatacaaaaattagctgggtgtggtggtgtacgcctgctgaggctggaggatcccttgagttcaggagttctgggctgtagtgcgctatgccgatcgggtgtccgcactgagttcggcatcaatatggtgacctcccgggagcgggggaccaccaggttgcctaaggaggggtgaaccggcccaggtcggaaacggagcaggtcaaaactcccgtgctgatcagtagtgggatcgcgcctgtgaatagccactgcactccagcctgggcaacatagtgagaccctgcctcttttg

SEQ ID NO: 110880 - DNA, 246 bp, Homo sapiens
cctggctctgaacttaggggacaagagtattattaaaacatccgcgcgtgcctgtagtcccagctactcgggaggctgaggtgggaggatcgcttgagcccaggagttctgggctgtagtgcgctatgccgatcgggtgtccgcactaagttcggcatcaatatggtgacctcccgggagcgggggaccaccaggttgcctaagttcagaccagtgaatcctctagagtcacctcagcatagcact

SEQ ID NO: 110881 - DNA, 391 bp, Homo sapiens
  misc_feature (383)..(383): n is a, c, g, or t
cgctccccaatgacgtaactgccctgcagcttctagtagcttttcgcagtgtctcctaccgccgggcgcggtggcgcgtgcctgtagtcccagctactcgggaggctgaggtgggaggatcgcttgagcccaggagttctgggctgtagtgcgctatgccgatcgggtgtccgcactaagttcggcatcaatatggtgacctcccgggagcgggggaccaccaggttgcctaaggaggggtgaaccggcccaggtcggaaacggagcaggtcaaaactcccgtgctgatcagtagtgggatcgcgcctgtgaatagccactgcactccagcctgagcaacatagcgagaccccgacagacctgcctgccgggatcctctaagntagctcac

SEQ ID NO: 110882 - DNA, 467 bp, Homo sapiens
  misc_feature (18)..(18): n is a, c, g, or t
gacaattccagctcggtnccccttttggggtctttggcgcgtgcctgtagtcccagctactcgggaggctgaggtgggaggatcgcttgagcccaggagttctgggctgtagtgcgctatgccgatcgggtgtccgcactaagttcggcatcaatatggtgacctcccgggagcgggggaccaccaggttgcctaaggaggggtgaaccggcccaggtcggaaacggagcaggtcaaaactcccgtgctgatcagtagtgggatcgcgcctgtgaatagccactgcactccagcctgagcaacatagcgagaccccgtctctactaaaaatacaaaatattagccgggcgtggtggcgggcgcctgtagtcctagctactcgggaggctgaggcaggagaatggcgtgaacccaggaggcggagcttgtagcgagccgagatcgtgccactgtactgcagcctgggc

SEQ ID NO: 110883 - DNA, 459 bp, Homo sapiens
tagaggatccccagttcccacactgcacgcgcgtgcctgtagtcccagctactcgggaggctgaggtgggaggatcgcttgagcccaggagttctgggctgtagtgcgctatgccgatcgggtgtccgcactaagttcggcatcaatatggtgacctcccgggagcgggggaccaccaggttgcctaaggaggggtgaaccggcccaggtcggaaacggagcaggtcaaaactcccgtgctgatcagtagtgggatcgcgcctgtgaatagccactgcactccagcctgagcaacatagcgagaccccgtctctactaaaaatacaaaatattagccgggcgtggtggcgggcgcctgtagtcctagctactcgggaggctgaggcaggagaatggcgtgaacccaggaggcggagcttgtagcgagccgagatcgtgccactgtactgcagcctgggc

SEQ ID NO: 110884 - DNA, 621 bp, Homo sapiens
atcccccgaacatgccgtggctgggcatggtggctcatgtctgtaatcccagcacttagggaaactgaggcaggaggcacgcttaaatccaggggttcaagatgcctggacaacacagcgagaaccccatcactaccaaaaaaaaaaaaaaaaaaagcaaaagcaatccaggtggcatggtggtacatgtgcgcgtgcctgtagtcccagctactcgggaggctgaggtgggaggatcgcttgagcccaggagttctgggctgtagtgcgctatgccgatcgggtgtccgcactaagttcggcatcaatatggtgacctcccgggagcgggggaccaccaggttgcctaaggaggggtgaaccggcccaggtcggaaacggagcaggtcaaaactcccgtgctgatcagtagtgggatcgcgcctgtgaatagccactgcactccagcctgagcaacatagcgagaccccgtctctactaaaaatacaaaatattagccgggcgtggtggcgggcgcctgtagtcctagctactcgggaggctgaggcaggagaatggcgtgaacccaggaggcggagcttgtagcgagccgagatcgtgccactgtactgcagcctgggc

SEQ ID NO: 110885 - DNA, 489 bp, Homo sapiens
cagtcggtaccatgttgaaacccgtctctactaaaaatacaaaaaattagccaggtgtgcgcgtgcctgtagtcccagctactcgggaggctgaggtgggaggatcgcttgagcccaggagttctgggctgtagtgcgctatgccgatcgggtgtccgcactaagttcggcatcaatatggtgacctcccgggagcgggggaccaccaggttgcctaaggaggggtgaaccggcccaggtcggaaacggagcaggtcaaaactcccgtgctgatcagtagtgggatcgcgcctgtgaatagccactgcactccagcctgagcaacatagcgagaccccgtctctactaaaaatacaaaatattagccgggcgtggtggcgggcgcctgtagtcctagctactcgggaggctgaggcaggagaatggcgtgaacccaggaggcggagcttgtagcgagccgagatcgtgccactgtactgcagcctgggc

SEQ ID NO: 110886 - DNA, 459 bp, Homo sapiens
ttggctgggcatcgatcagaatgaatttgcgcgtgcctgtagtcccagctactcgggaggctgaggtgggaggatcgcttgagcccaggagttctgggctgtagtgcgctatgccgatcgggtgtccgcactaagttcggcatcaatatggtgacctcccgggagcgggggaccaccaggttgcctaaggaggggtgaaccggcccaggtcggaaacggagcaggtcaaaactcccgtgctgatcagtagtgggatcgcgcctgtgaatagccactgcactccagcctgagcaacatagcgagaccccgtctctactaaaaatacaaaatattagccgggcgtggtggcgggcgcctgtagtcctagctactcgggaggctgaggcaggagaatggcgtgaacccaggaggcggagcttgtagcgagccgagatcgtgccactgtactgcagcctgggc

SEQ ID NO: 110887 - DNA, 519 bp, Homo sapiens
gatgggatgagaatattcacatttcattctcataaaaatgctgccaaggtcaggcacagtggcacatgctacctgtaatcctggcactgcgcgtgcctgtagtcccagctactcgggaggctgaggtgggaggatcgcttgagcccaggagttctgggctgtagtgcgctatgccgatcgggtgtccgcactaagttcggcatcaatatggtgacctcccgggagcgggggaccaccaggttgcctaaggaggggtgaaccggcccaggtcggaaacggagcaggtcaaaactcccgtgctgatcagtagtgggatcgcgcctgtgaatagccactgcactccagcctgagcaacatagcgagaccccgtctctactaaaaatacaaaatattagccgggcgtggtggcgggcgcctgtagtcctagctactcgggaggctgaggcaggagaatggcgtgaacccaggaggcggagcttgtagcgagccgagatcgtgccactgtactgcagcctgggc

SEQ ID NO: 110888 - DNA, 617 bp, Homo sapiens
cgctccccaatgacgtaactgccctgcagcttctagtagcttttcgcagtgtctcctaccgccgggcgcggtggcgcgtgcctgtagtcccagctactcgggaggctgaggtgggaggatcgcttgagcccaggagttctgggctgtagtgcgctatgccgatcgggtgtccgcactaagttcggcatcaatatggtgacctcccgggagcgggggaccaccaggttgcctaaggaggggtgaaccggcccaggtcggaaacggagcaggggcttgctacaacccccacctcccagccgcctgccttggcctcccaaagtgctgagatcgcagcctctgcccggccgccaccccgtctaggaagtgaggagtgcctcttcctggctgccaccccatctaggaagtgaggagcgtctctgcctggcagcccatcctctgggatgtgaggagcccctctgcccggctgcccagtctgggaagtgagaagcgcctcttcccggccctcatcctgtctaggaagtgaggagcgtctctgcctggccgcccatcgtctgggatgtgggaagcgcctctgcccggccgccccgtctgggaggtgaggagcatctctacccggc

SEQ ID NO: 110889 - DNA, 334 bp, Homo sapiens
cgctccccaatgacgtaactgccctgcagcttctagtagcttttcgcagtgtctcctaccgccgggcgcggtggcgcgtgcctgtagtcccagctactcgggaggctgaggtgggaggatcgcttgagcccaggagttctgggctgtagtgcgctatgccgatcgggtgtccgcactaagttcggcatcaatatggtgacctcccgggagcgggggaccaccaggttgcctaaggaggggtgaaccggcccaggtcggaaacggagcagggccaagatcacgccactgcactccagcctgggcgaaagagcgaaactccgactcaaaaaaaaaa

SEQ ID NO: 110890 - DNA, 1980 bp, Homo sapiens
agcagctattttttccggtcctgtgatatcagaattgaccaaggaatacgtatattgtaattgacacgtggtggtatcttccaggtacaaattctctaaattttgtggttagcagaatgggacttgtgataagaatagcttggttttagcataactagggtttaaaataattgtttaattatagagactgaccaggctttggccatctaaactggaaagtgttagtaccctaccttcttttgaaaatggctatggtaaggaaaatgtgttagtaaattatgtattttcttgaaaaatacataattatggttggatgggaatcactaagttgggtgttaactgatgtctcaattagtaacattaggattttcattaataaacctaaaaagctttccctaagaacaggcctggcacagtggctcatgcctgtaatcccaacactttgggagaccagggtgggtggatcccttgaggtcaggagttgaagagcagcctggccaacatggcaaaaccccatctctacaaaaaatatgaaaatcagccgggcttggtggcataccatagtcccagctacttgggaggctgaggtgagaggatcgcctgagcccaggagacggaggttgcagtgggctgagattgtgccactgtactccagtctgggtgacagagccagaccctgtctcaaaaataaagaggattctgagtttgtatagtgagggcttgcagaaattttgaaacttattttgtaagtttacaatgaatttgtacatgatgtgctcatgtcttgggttgagtatcctagacatgattttttcatttgctgcatattaaacatttgttggttgtagtcggtatttcttaaatagaagtttgtcaatattagattagtttcaagaaggacttagctcaggaaaaggatagttatttctgtggttctcagctttgatgcctacagagattctgatttaaattgctggaggagggcccaggcatacattttttaagtttcccaagtgattctaatttacatctagggttaaaaacagccaggcgcggtggctcatgcctgtaatcccagcacttggggaggccggggtgggtggatcacctgaggtcaggagatcgagaccagcctggccagcgtggtgaaaccccatctctattaaaaatacaaaactgaccggtgtggtggcaggagcctgtaatcccagctacttgggaggctgaggcaggagaatcacttgaactcaggaggaggaggttacagtgagccgagatcgtgccattgcactccagcctgggcaaaaagagcaaaactccatctcaaaaaacaaaaacacctcactgctgtttcctaagtacatacttaagaaaattgggatacatggtggtggttcatggatgttgataaggaattaaaatgtaccgtgcgactctctgtttcagtggtgacttttacctgtttagtataaatattcctttgcttccaaccataaatgtgttcttagaaatgggcctatagtttagtaacctatagtttggtaataggcttgtttgttttcagatggattttggttctgtgagctaaagctattttgcattaaagccttcgtcctcacacattgttttgacatatttctagtcttcataaacttttttaatttagatttttttcccttcacaagtatacatctgttttagcaaatagccttatgaaggttgtagatgtattattttgggcatgcctggtgatttctatattttttccaattacatttaaagctttatgttttaggaatataagtacattttatttctactttttattatatatatttaattgcacaagtactactgtctagaaaaaaatgggatgttgctaacacagcattgttggcttgtaggcagtgctgtcctgtaaatagattgaaatgtatttttatcagctggtatataaatttgaggaaagaaaaaaaagga

SEQ ID NO: 110891 - DNA, 1926 bp, Homo sapiens
agcagctattttttccggtcctgtgatatcagaattgaccaaggaatacgtatattgtaattgacacgtggtggtatcttccaggtacaaattctctaaattttgtggttagcagaatgggacttgtgataagaatagcttggttttagcataactagggtttaaaataattgtttaattatagagactgaccaggctttggccatctaaactggaaagtgttagtaccctaccttcttttgaaaatggctatggtaaggaaaatgtgttagtaaattatgtattttcttgaaaaatacataattatggttggatgggaatcactaagttgggtgttaactgatgtctcaattagtaacattaggattttcattaataaacctaaaaagctttccctaagaacaggcctggcacagtggctcatgcctgtaatcccaacactttgggagaccagggtgggtggatcccttgaggtcaggagttgaagagcagcctggccaacatggcaaaaccccatctctacaaaaaatatgaaaatcagccgggcttggtggcataccatagtcccagctacttgggaggctgaggtgagaggatcgcctgagcccaggagacggaggttgcagtgggctgagattgtgccactgtactccagtctgggtgacagagccagaccctgtctcaaaaataaagaggattctgagtttgtatagtgagggcttgcagaaattttgaaacttattttgtaagtttacaatgaatttgtacatgatgtgctcatgtcttgggttgagtatcctagacatgattttttcatttgctgcatattaaacatttgttggttgtagtcggtatttcttaaatagaagtttgtcaatattagattagtttcaagaaggacttagctcaggaaaaggatagttatttctgtggttctcagctttgatgcctacagagattctgatttaaattgctggaggagggcccaggcatacattttttaagtttcccaagtgattctaatttacatctagggttaaaaacagccaggcgcggtggctcatgcctgtaatcccagcacttggggaggccggggtgggtggatcacctgaggtcaggagatcgagaccagcctggccagcgtggtgaaaccccatctctattaaaaatacaaaactgaccggtgtggtggcaggagcctgtaatcccagctacttgggaggctgaggcaggagaatcacttgaactcaggaggaggaggttacagtgagccgagatcgtgccattgcactccagcctgggcaaaaagagcaaaactccatctcaaaaaacaaaaacacctcactgctgtttcctaagtacatacttaagaaaattgggatacatggtggtggttcatggatgttgataaggaattaaaattcctttgcttccaaccataaatgtgttcttagaaatgggcctatagtttagtaacctatagtttggtaataggcttgtttgttttcagatggattttggttctgtgagctaaagctattttgcattaaagccttcgtcctcacacattgttttgacatatttctagtcttcataaacttttttaatttagatttttttcccttcacaagtatacatctgttttagcaaatagccttatgaaggttgtagatgtattattttgggcatgcctggtgatttctatattttttccaattacatttaaagctttatgttttaggaatataagtacattttatttctactttttattatatatatttaattgcacaagtactactgtctagaaaaaaatgggatgttgctaacacagcattgttggcttgtaggcagtgctgtcctgtaaatagattgaaatgtatttttatcagctggtatataaatttgaggaaagaaaaaaaagga

SEQ ID NO: 110892 - DNA, 833 bp, Homo sapiens
tggagacggagtcttgctctgttgcccatgctggagggcaatggtgcaatcttggctcactgcaacgtctgcctcctgggtgcaggagaatcacttgaactcaggaggaggaggttacagtgagccgagatcgtgccattgcactccagcctgggcaaaaagagcaaaactccatctcaaaaaacaaaaacacctcactgctgtttcctaagtacatacttaagaaaattgggatacatggtggtggttcatggatgttgataaggaattaaaatgtaccgtgcgactctctgtttcagtggtgacttttacctgtttagtataaatattcctttgcttccaaccataaatgtgttcttagaaatgggcctatagtttagtaacctatagtttggtaataggcttgtttgttttcagatggattttggttctgtgagctaaagctattttgcattaaagccttcgtcctcacacattgttttgacatatttctagtcttcataaacttttttaatttagatttttttcccttcacaagtatacatctgttttagcaaatagccttatgaaggttgtagatgtattattttgggcatgcctggtgatttctatattttttccaattacatttaaagctttatgttttaggaatataagtacattttatttctactttttattatatatatttaattgcacaagtactactgtctagaaaaaaatgggatgttgctaacacagcattgttggcttgtaggcagtgctgtcctgtaaatagattgaaatgtatttttatcagctggtatataaatttgaggaaagaaaaaaaagga

SEQ ID NO: 110893 - DNA, 896 bp, Homo sapiens
ttttttttttgaagatataattcaaaataaagtagatgctttacaaatgataatcgagctgccaaaattcagaaacaataattactttgaccattcattacaccacagctttgtattctcacctttcagttacatcatatatatatttccttaggaaccactaactctctgacatatcagcttcccagctgaaaatgcatttacctctgcagcatttagaattaaaaattatgttttcgatgtatattttcagtctgaaaatgtctcctccactccctgaaaacaaccccagccagtaaatgcaattctttgaataaataaggtgggcttttttgtttgttttttcatatattctggcagggtcttgctctgttgcccaggctggagtgcagtggcaggatcacagctcactacagactccacctcctgggctcaagcagtcctcccacctcagcctcccgagtagctgggactacaggtacacactatcatgcgcagctaattttaaaatttttggtggagacggaacctcactctgttgctcaggctgatctctaactcctagactcaggcaatcctcccgcctcagcctcttgaagtgctgggattacaggtgtgagccactgtgcctagcaaacaaggtgtgttgaattaattaattttagttaatttccaaataatttttctacagcagtttttaaagatattatgtacatacaataaaatgcccagatcttaattatcctaccagatgacaatgttattaacccatgtaatccccatgtcaatcaagatataggacattcccatcactccagaaagttccaaggaaatgttttttcagtattccccagctgtacctgccacacagaggcggacacttctactgtgggttt

SEQ ID NO: 110894 - DNA, 664 bp, Homo sapiens
ttttttgagaaaagccagaaatatgaatttttacataaaatttcccaattttaaaatgtacccagtgaatttaatttttttcaaaatattttgtaaatgtaacgaaacatatcaataggtccgagacgggctcaggaaccattcagtttttttgccttcggctctagagtatgtataatatggcattttaatcttatacattgagaagaaattaagttgtaaataagaaaggagctgggactacaggtacacactatcatgcgcagctaattttaaaatttttggtggagacggaacctcactctgttgctcaggctgatctctaactcctagactcaggcaatcctcccgcctcagcctcttgaagtgctgggattacaggtgtgagccactgtgcctagcaaacaaggtgtgttgaattaattaattttagttaatttccaaataatttttctacagcagtttttaaagatattatgtacatacaataaaatgcccagatcttaattatcctaccagatgacaatgttattaacccatgtaatccccatgtcaatcaagatataggacattcccatcactccagaaagttccaaggaaatgttttttcagtattccccagctgtacctgccacacagaggcggacacttctactgtgggttt

SEQ ID NO: 110895 - DNA, 290 bp, Homo sapiens
ttcatagggaaaaatatacagctttgatataatagtagacatatatagaatatagtgaattacaaccttaagtgcgagctgtgctaaaaatcatctttagtaaatgtgttctttgaaactgttggtccttgtaagtctgaagcactatgtaatacctaatacgatactaaaaccagccaggcccagtagctcacccctataatcccagcattttgggaggctgaggtgggaggatctcttaagcccaggagttaaagaatagcctgggcaacaaagtgagaccacgcctc

SEQ ID NO: 110896 - DNA, 506 bp, Homo sapiens
aagaggatccggtctcatatcagtccataatctcttcttttagattgttagccctttagtgtatattcccccaaagggttgaagttacccagctaataacgggcaaagacatttcgggacctcagaaataactgaaacaggaactagaaaatccagaaaccactcttcttccttctcatctatctatgcttttcaccatgtgttagtgttattctcacagattaactctacaaagttggacaatagctgccaacatcttccagtctcatatcttcttaactttgccattcaaagaataaggttctcttcttcccttaattccaatttggaaaacctcagagaaggtctctgattggcccaggtctcattgtaaaactgtatgtgtggctgggaggagttggtcctatgataggcaatccttattttaatcacgtagttggagtaagcagaaaataggttcctcaaataaggcacgtatttttttttcacctcaaagctaatgatga

SEQ ID NO: 110897 - DNA, 245 bp, Homo sapiens
ggtcatactgggaagggagggctttaatttataggtgagtggaaattgttttgaggaggaaatgagagaatttactgtgtgtcttctccactagatggtaaacatctagaatgcagagacattataatacaattttattccctgtacgtggcacatagtagatgctcagtaaatgtctctcaagctcaaagctgttcttcaggaagatggccctgatagcagcaggaagaactgagtagagggag

SEQ ID NO: 110898 - DNA, 399 bp, Homo sapiens
cattcaattgctcctattctaccttcccaccttttaaaacaagattcccaagcaatttaggattaacctgtgcttatttctgaactgaagaatatctgaaccaaggacttagaaacttttcccaactactcaatatgcagatgagaatactgaggcccagaaaatttaagctaactgtgcagacacagagctggtcagtggggactcacactagaatccatgtctcctgacttcaagctaagtgctttcactataacccatgtgcaaaaagtcagatttcagatccaagactggacatagggagttcaagaccagcctgaccaacatggagaaaccccgtctctactaaaaatacaaaatcagccagacatggtggcacatgcctgtaatcctagctac

SEQ ID NO: 110899 - DNA, 271 bp, Homo sapiens
acgactgtaattccagcactttgggaggccgaggtgggcagattgtttgaacctaggagtttgagaccagcccgagtaacatggtgaaactctgtttctacaaaaaatacaaaaaactagctgggcatggtggcgtatgcctgcagtacagctacttggaaggctgagacaggaggatcgatttagcccaggaggttgaggctgcagtgagccatgtgagtgctattgcattccagccccagctcaggcgacagaacaagaccctatctca

SEQ ID NO: 110900 - DNA, 265 bp, Homo sapiens
gaagcatttgtgccggttgacatctttgcattatggctttgctcctggattcctccgaagttttggttggctcctaggaaaatgtctctcctgatatatagatcgtgtagtctctctaaattatggaaatcagcatgtgaaactgtatcaggtgggataactctgtgcctttctgcttagtggcttgaagtacttgaagaaaatatgctgttttctttccttggagcctttcagaaatgttttccaaaagtgatacatgcttgtt

SEQ ID NO: 110901 - DNA, 334 bp, Homo sapiens
caggtcctgtatactctgccgttgatcttagttcttggtccctggctgtgactctctcagtctgtctctaaaagccacccattcacttggcgggaacaggatggaggaagctttgtccacccaagctcttagccactgaggaaccagggactccccccaccccacccacagcagaggaggagactgtcaccccagagcctgagtgctgcctcccctacatcccgttgtgctgtggggggaggcaggaccgggcagatgggggcaaggtacaggccagggagtagtctcatcttcccagcatctcaggccaggaatcccagcctaggagttgagc

SEQ ID NO: 110902 - DNA, 298 bp, Homo sapiens
ctcaaacagtaacaattttaacattttccccaatgaggaactctagattacaaaagtataatagatgtttataacttaaatatcaatctgtagtgtgaaaattaaaggaagaccagatcccatcatgatcttagttctgcctagatgttagtatcacatagtgttcttgtttcttctgcatttacatgtccttctcagtttttcttccacactacttgatattactgtctaccattaaaagtttaaacggctcatcaaactagctacccctcccttactgcttttagatcagtgttca

SEQ ID NO: 110903 - DNA, 418 bp, Homo sapiens
actgtacgcacagatctaccccgtctactgtgaggcaacaggtaaggagagcataggctttggggtttcatcaggctttggtgtgagacctgtctcaccatttaatagctttgtacattttggtaaataccttaagcagccagagactcatttttcctgtatgtaaaatggccacacagctgccccacagagttactgaggcatggcggattgcttgaacccagaaattcaagaccagtgtgtctctacaaaaaattaaaaattagacaggtatggtggcatgtgtctgtagtgccagttactcaggagactgaggtgggaggatggcttgagcccaggagttggaggctgctgtgagccatgattgcaccactgcactccagcctgtgtgacagagcaagtccccatctctcttatt

SEQ ID NO: 110904 - DNA, 527 bp, Homo sapiens
gaagaatccatcaaaatgagtgccaaaacattgtgatgccaaaaagctaggaaatacagaataaaagacaaatgtccagtgctccaccactttaaagtgactcaggagatttggtcacctttagcttaactcctccaaccatccctgcgtgtattatgtgccagaaattgggctaggctttcagttagagctatatataaaaacaacatcagcaagaatgaccacgcacagatgatttaaaaagctctgccatcaaatatagaccatgttttatcttttgctattagcttctcctcacaccttaaaaactaaaatttagcctttgcttttccctgctcctttccaataaagagctctaccaggtacctttggcaaaaaatgaaccttctttctaggagcacaaagcattttttaagtaaccctctgtcagagtcttcaagaagcttaacatgatctgatcaaaggaaaagactgagattgaggcaaaactggtgcagggccaccactgccaatcatcacccttcacg

SEQ ID NO: 110905 - DNA, 270 bp, Homo sapiens
ctttagcacatattgagaagctttatatggttctagtctttcaaagtaaaaataggcaagcagatatctagcactgaaggtggacttagttttataagcttcagatcctcatttagaaaagctgtgcatgaatcttatcgtcaccttcaaaagggcctggcaaaattctgcatgcctcgcaaaagttgagagatgaaactggacaccaagacgagtcggctgtgtcccatttttcatttccaatctgaaatgtggcttgcacttggtgaa

SEQ ID NO: 110906 - DNA, 415 bp, Homo sapiens
aaagctttggctgaccttagtaagactttatttactgtgccttacatgtctccacccacattttagccttgaacttacacttacggaaattccccacttcttccttcactaaccacttcaatgaacttgtgtgtgcattcacacctgttattacacgggttcattcactgcaactagatctcaacagttaattggcacaggaaacaaaacagaaatgtaagtggggtagagcacaatgctctctgaagactttagacctgactctggcattaagtgagccatttcttcctcctaaactgtaaagtcagagtcccttctgtctataaaattgagtgattctatgaagtgtcattacttaccttagttgagttggatgtcagcctagcctagcagtagaggtcaatgttccccaagg

SEQ ID NO: 110907 - DNA, 733 bp, Homo sapiens
cctggacacagctatagccagtaacaaattttactctgcttctctagactgggcactacagctaaataatacacagtttctacccttcgtgcactgaaagtgtactgaggggaaatggactgagaagcaaggacaataatgtttcctagattaaatgatacatctgaatttctatattttagtatagatactctaaataaaatacatcttttatgtcttcttaattttcaaatatatctaactaaaattgggatctctatgttctttccactttaagctttcctctatttgattttttttctgctatcattaattaaaaactaagcagaaaatgggtaagggatataaaatataaagtatgttgtatattatttttagtaaaatgaagattttattttatatgacctgtggaaaccttttacttgaaatgtgtctggctatactaagtatagattagttcatttcttgcttttgttttatttttgttctcaagttgagtgacaactgagagtagtatcaatacctgtacctcccatggatcaacaggtacactctgttctccctaatctgaattcagccaataatttgtcatgttatttgtgttttgttcttttgtttaaaggttactgaagaggttctcattgtacagagtataactacatgatgtattctagagctagattgaaaagcaatctgtaattagccaacagataattagcactttcaggatacc

SEQ ID NO: 110908 - DNA, 477 bp, Homo sapiens
aggagtactctatcaatatcctgtggtatacaccttttccaaaataacatatctttgttcctggttgtagaagtaatgaggttcagtgttaagagcaatcagtgcttagtggtaatagaaaatcaggtaatacagaaaggtataaagaagagagcagtgaaaatgactagtagttctaccacccagaggttaacattttgatgtatagtttcgctgactttttggtgtatagacacatacacatgtttttaaaatacaaatagatttataataggcatgttgtttttaattctaatttcatttattatattttggccattattctatgtcattatacatttatatcttcattcaaaaaaaaattaaaaaaataaaataggacattgaggcaggatatgatggaattacccaagatcgtgcagaaagtaaatgattaagccaggattttaatctaagtctgattaaatcctgtgcttt

SEQ ID NO: 110909 - DNA, 241 bp, Homo sapiens
tggaagtatactctacctcttaacggaagagtgaaaagaatgcattttagaatagtatgtggaatggaagatacagctgcaaacaactctggaaaaataaaatctatgtgacacaaggacactcccaacaaatgttttcagaatatacactagtccccgttatctatggttttgctttacatggtttcagttacttgtggtcaaccacattccaaaaatattacatgcaataaaatatttg

SEQ ID NO: 110910 - DNA, 591 bp, Homo sapiens
aaagaaaagaaaggaaaaaacaaagaaagaaaaagaaaaggaaggaaggaaagaaagaaagaaaatggggcatgagagtaagagtatagctgtatgaatggagttatcactttatggaatagaaaatactagagtagaactagttttgttggggtaaggggaattacaagtttggtttgagtcatattaatttgagatcactgttaagccttccactggagaagtaaagaaaatagctggatataaagcaatttttaaaaatgtttgacatttgagaaatatgtctggtgaccaccaacatggaaatgtagtcagttctctggaagtacatggtgttacctaagaaaggaatgcaaaaagaaaagagaagaggttcttagaggcagacctgaggcatttagcattcagaaacaagaaagatgagaaagattcaatttaaaacctgaagagatcaataactgaaataaatcagaaagttgacaattacctccccaaaggctttgaattataatgattttatggataattctttccatatttttgagaagcaaaggaagtattcaacttccaaatacgcagaaacaaatatta

SEQ ID NO: 110911 - DNA, 351 bp, Homo sapiens
aggagaggggaaagggaggaagagggcttggacttgacctaagccacacacgagctccgtggaggaggactggcctgcacaggagactgaaggagtctccagagagcagaaagggcacatggcccagaggtgcccgggaaccagcatttcaaggaggcaggcacgaacagtcacagctgccgaggggtcagggaagctaaacatgttcctgggattcggtggcacagaagtcacatgcagccagggaggaggaagaaccatgatctcaaggtctgagtcaggtgtctcccagccagacttaagtgttaagggaagtgggggggatgagcaaaccggtttccatacgttttt

SEQ ID NO: 110912 - DNA, 600 bp, Homo sapiens
  misc_feature (577)..(577): n is a, c, g, or t
cagacctgcgtgatgcactacaccgggatgcttgaagatggaaagaaatttgattcctcccgggacagaaacaagccctttaagtttatgctaggcaagcaggaggtgatccgaggctgggaagaaggggttgcccagatgagtgtgggtcagagagccaaactgactatatctccagattatgcctatggtgccactgggcacccaggcatcatcccaccacatgccactctcgtcttcgatgtggagcttctaaaactggaatgacaggaatggcctcctcccttagctccctgttcttgggtaaggaaatggaatactgaagggcccttcactgcctttgctcctcccatgttatgcccagcgtttgatgggtagcagagagaacaaaaaacaccacaaggctatttttccccctgcattctttctgtattgagtatcctttcagtgttattagtgtatgctttgaatgtaaaaattggtcaccctaaggaaaggaattggcatgtgtatgttcccagttcaactcatggagatggcagctgtttaaatgtttttctatgtagtttataaattnaaactgaattgaggactatgaaa

SEQ ID NO: 110913 - DNA, 594 bp, Homo sapiens
ggaaatgcacagactcactaacagggtcccctggacaagcagacggacacaatgacagggccacacacagttgcagaaacacccacactgatgatcacacctgggcccacaaactgtgttcacaaacaaccctaccgaacaggcacccacaccacacacacggtggtgcaaccacacagacataggcggagtgcttatcaggaaacacaaacttgctgataggcacaggggacacacacatacacacagacacctgttacagggatacctggatacacggccaaatccaaatcacactcccacagggacatacacaaatgcactcacacaatttcacagctaacacattaaaactatcagaaagtgacattcgcccgacacggtggctcatgcctgtaatcccagcactttgggaggccaaggtgcgtggactgcctgaggtcaggaattcgagaccagtgttttctgtgggtgcgctaagtgtgtgtgctgctgggctgtgtgggattagagttagctgtagggtgtgtgtgtgtgtgtgttgctgacagttggtgatgatgtttgagggttgcgtgaggagggtgggttggt

SEQ ID NO: 110914 - DNA, 658 bp, Homo sapiens
atgtaattttataattatttttaaagaacttttcattttcttagtgaatttttgcctataatattgggtacaggatgagaatttatatgtaatatttgaattatagatactttggataaaatgacttcttaattccttaaaaaactaattattgcttttttttaaaactaggtaattaggtagttgaaagacagaatgtcattaagttaactaaattaccactgtattacagtaaatacaaacaacatacttacagtgtaaactatggtaaataaaaactaaaaaaacacttccttgaaagtattttttaaccaaacttcacaaggatggatagaattaacactataaattctgcacagaaaaaaaatagtgcatactaaattgagaacagatgcacagaagtgctatttttagaaattaaaaaatggtaaagatgataataggcagatcagaagtcccacatatttatcagggttgtaaataaaaacccagttcaaaaacatgcattactaactggctgtgtgatttttaggcaagttacttaacctttctgtgactgtttgttcttgtaaaataggaataatagacttatagaactgtaacgaggaatggatgagttaatatttctaaagcatttggaatagtgcttgacacatag

SEQ ID NO: 110915 - DNA, 141 bp, Homo sapiens
taaacaagaaaaaaattaagaaagatccatagaaattattttaatattcaaattctatttctctctacagcttatcatgcaaactaaaggaaaaggaggctaaggatataagcacccctgaaaaatcccaaaattttcttg

SEQ ID NO: 110916 - DNA, 561 bp, Homo sapiens
cccgactctggctttccctccgctcccgccaggccagagcttgatgcgcatgcgcgggaggcagtgggctccgttcgtttcgttttccacgtgactcggcgctagcggaacacgtgtctcctcccctttctggcgtggagggggcgggagctgtggaatgtctttgtctgcgcgcgggcccgcggagtgtggggcgggagacctgttactcgcggggccacgccctctccaacggctgagcagtggagggaggctgtggggagtggggtggggggcggtcaccgaagtaaggaagtaaaagactgccgagagggtcacggaaaggggagggagagagaattgagaccgcctggggaggaagacaggagtgagacagactgcacagggagaaaggaaggctgagggagagtctgatgcagggggaaagttggggaagggaaacctggagggagaaattgaggaaggacggcttggtggaaacactgaaggcgattggagtacttgaactaagagggatggttcagatcagagatctgaagtctagcaaagaaaagggtccca

SEQ ID NO: 110917 - DNA, 215 bp, Homo sapiens
acaaaaaaaggaagagaaagaaaaaaagaaaccacctgagatctgcgggtggacttttgaagtgcttcttgagtgaataaaagagcaattcctattttcatccaaggaagatgaattggcccaaattccagctagagttttagtgtcccactcccatgcacaggtcaaggaaggaggggccagcaagggaggacatgacatatggctgcattcgg

SEQ ID NO: 110918 - DNA, 729 bp, Homo sapiens
ctcgtgcaatttcggcagagggtgttttgtatgatgattattagtgagtgaatcaggccactggggttttgggatagagactctgggatattcaagaaccttgggggcaggatggtgaataggcctttagacccttcacctgcccacttgggaattggccctcccacccattgtaggagcttggccaggaggagctcttcgtggctgtggagatgctctcagctgtggtcctgattaaccgggccctggaggcccgggatgccagtggcttctggagcagcctggtgaaccctgccacaggcctggctgaggtggaaggagaaaatgcccagcggtgagaaaggcttagccacacattgggagtgagggatgggggaatgcagccaagactcagcactcttctgttggagacttgccttgtgtacgatgtcccattcttgggcccaggcccaccctctgggtctgttcacagttccttggcctgtgtttcttcctgggagtggatgggatcacagtcattccttttttcttcattgattcattctttcctagcagatgtttgagtactgacccatgtgccagatattactctaggtgctgggaaacagcagtgaacaaaacactttctgctcttgtcaaacttacatgctagtaaagggagacagatgatgagaaaagaagatgaggtggctgggtgcagtggctcacgcctgtaatcccagcactttg

SEQ ID NO: 110919 - DNA, 415 bp, Homo sapiens
ggaacaactgaatagccacatgtaaaagaaggaaactggacccctacctcacaccatacacaaaaaggaactaagaatgaatcaatgacccaaacgtaagaggtaaaaacgtaaaattcctggaagaaaataaaggcgtaaatcttcttgaccttggattaggcaatgtttacttggatatggcatcaaaagcacaagcaatcaaaggaaaaatagataacgtggacttttgtccttcaaaggacactatcaagaaagtgaaaagacaacctacagaatggaagaaaatatttgtatatcatatatctgaagacagttgtatccaaaatatatttttaaaaaaactcttataactactcaataattaaaaacaacacagccaggcacaggtggctcacatccataatcctagcac

SEQ ID NO: 110920 - DNA, 314 bp, Homo sapiens
taaagatgaacatttacagctcctttttcttttattataggcctatttccttggtagtaaaagtagcatggcagttcatagtctgtttaagtctcctagtaagacatacatccaactaaaaacaagagatgaaaatataaaggtaatgcttacaattcacttgagaattacaatataattggactatcttgcttttgatatgtacatattaattaaggtttttttctaggtgggatcgccttttgagttggtggttagtggcaacaaacgattgaaggagttaagctatatggtaatctcttatagaatctaaa

SEQ ID NO: 110921 - DNA, 694 bp, Homo sapiens
ggacaattaatctgctagtgttgtttagaatggattgaagaacagaggggaagaaggtagggagaccaaattgtttcattaaattatataaaaaattttcaaaaaaagtcagcttctattgtggaggaaaactattgtacagaccccagtcagaacagtgaagatacttgtactgtcctcaagtgtcattgtacttgttgattaacatatattaaaaacaagcaggtgtggtggctcacactggtaatctttgcactttgggtggccaaggcaggaggattgcttgagcccaggagtttgagaccagcctgggcaacttagtaagactcctgtctgtacaaaaaataaacaaaattagtcaagcctggtggtgtgccctgtagttccactacttaggaggctgaggtcagggattgcttgagctcgggaagtcaaggctacagtgagtcgagatggggccactgcactccagctttggtgacagtgtgagacactgtttcagacacacacacatacacacacacatacacacatacacacacacacacacaaccaaaaaaggaagccatatattaaaaatgttgccataaaaaatattggggacagggtatataggagccacaaagacgtggctgcatccgggggctagtaatagccaagctcctcccactcctaggcctgaggggtgagggag

SEQ ID NO: 110922 - DNA, 384 bp, Homo sapiens
cggcacgaggggcctcgcttgggagggctgtggccaggccttgagtccttggctcagtgggaccttctgaaacagcctccaagctgcacccctgcttcctttgcttttggatgaccccctccagcagctttggtgctgatgggaataagtcgacctgcagcggaagttcagcccaagtctcagcccagcagcctccccaaacctggccagggtctggtcatgctgccgtctctgcggtactctgtggagttgtggtttctgtaccttgaagagaacttccccttctgggacccagaaacccagtgaaccctcaggaaaaaagggaatgaaattactgaagacaactctgtggcagggagagggaaaagaggctctttgtttttg

SEQ ID NO: 110923 - DNA, 570 bp, Homo sapiens
agataacattccagtgccccagaagtctcctttgtgtcacctgctagccaaaaatgccgtccttgaggttatcactgttctgaccttgatcaccataaatttttgcctggggacatgtttctttttctccaccgtacacccatgttcatgcagaacagtggagtgggagcagggcagggtctgtatgtgccaaatactacactagacacattcccagacttaaataaattctcccgtaaaacacagacctgggcttatataacttgtctaaactcaatcccatgtcattgatgccaaagtcagtgttttttccattgcgccatgctctatgtcttcaactgacatttgccataatcattatcattatcattaatgaaaagtcatctgacacttgccagtagtttatatgatcaaagaacatcagttaacacccagttctcatttctaagtgcgtttaaatggtcaagagcttttaacataactctcttgggaagcagaatgaattaagttaatttagaaccaaaagataatggcaatttcttcatttaatgagtgccttgtttgtgcaag

SEQ ID NO: 110924 - DNA, 264 bp, Homo sapiens
gatgggttctacggcccccagggaccgaacgtccagcatcagagccacattggagccccgcctgcaggcatagcccaccactgcctagtgagcacccaatcatatttgcttttcttttctttttatcttttcttttagagatagggtctctctctgttgcccaggtctggagtgtgatggcactattatggctcacagcagcctcaaactcctgggctgaagcaatcctcccacctcagcctccagagtaactgggaccacagg

SEQ ID NO: 110925 - DNA, 308 bp, Homo sapiens
aagtgttccatattaaatttttcattttgcctacaacatacatacataattaagtgcttcattggaagatgcttatttttcatttcttttgtaattctccttctgctttccactcagactttagggctgtattgtattctataaagagtatatacttaataaatcaatatttactaacgtaaaaccataaacctgtcaataaccggtggggaacttatcatgaattttaaaaaatgtttactttcccatcagtcttaactgctatatttgaaatatagcgtgtttttctagctatgtcatgttaacct

SEQ ID NO: 110926 - DNA, 570 bp, Homo sapiens
gtagctgggattacaggcgcccgccaccacacccagctaatttttgtatttttagtagaaacggagtttcaccatgttggccaggctggtctcgaacgacctcaagtgatccacccgcctcgaccacccaaagtgctgggatgcgtgagccactgcacctggtcgggaacttccttttttcttacaaacatggggtaaagatgaaacccagacagtatgtcaaccaaaagggtcgatgatatcttttcttgaaaggcattttatattgaacctaaagtgaggagagacattttaaagggtaaatcctctattcaaacattttactttaagagtttcttctaaacatttgagcattttacttttctttcttgaatttaactcaaaatctatatctttggcttaataaagctccttcctggtgtttaggagctggaaattcaacaaagccagccatcgccctctttgagtgggagggaggtggtgaggcctccatgagggaggaggccagtgcagttccccctgcacattgcacatggccccagaacggccttcctgcccagggccctgagg

SEQ ID NO: 110927 - DNA, 1138 bp, Homo sapiens
agagatttctttttaagattttagattcacttaatgtaatgttgaattgccatgaatgtaacctggagtttgatttgagacattctgtgggataaggaatagttttctattgaactgtggtggcttttgccactaatcaggatttagggctgtgcacctccatctgttaagtgaaatggaacttggcttcctaaacactatattagaccaacttgagtcaatacttttattaagtttaatcagggattctcaaaatatttaggattcaaattagcccaattagaaagcagtgcattaaatgttaccaaaatatctgaagatactttagaactattttacacaaagcttatgtctttcctatggaaagtatcatacataaaattttacattcttttaaaaaacagaatctaatgtcttcagatacctagagcttggaaattataatagagttgggctttgacccgaagtcagcagttcttttcattttagattttcaggcaagtttcagtagtttggagacttcttcagtagtgaccccagcttaacctacatataatcactttgcacacattttaagttaatcagatgcttccagagtcttggatttggttacccctttgttagataaggagacagattctaggttgggacaaacatcttaatttattctctaataataaagtactgattaaagagcaagttctcagagaattcacaaaatttctagaatccatgaaagatctagagaacataacaaatgaaactctagaaatttgaaagaaaaaaaaacacttagctgtaagtgctttgacctattttttttaaaaaaaaaaaacctgtcttaattctgtgactgcattgcacccttcaccagcactaagagaagtcggaatggaagaaattaccgtatgtaattcttattcacttaaaatctttgtgcgcataggccttagcactttgacaaataaactctgccttttagctcctcactattgtcttctttcctgtcacttttaggctgtttcattggtcgtataaaaacaaccttcttcgaagttgaatgtatgtttctgcacatagacaaaccatattttactgactcattctatgttgaataaaggcatacagttttacccta

SEQ ID NO: 110928 - DNA, 1080 bp, Homo sapiens
agagatttctttttaagattttagattcacttaatgtaatgttgaattgccatgaatgtaacctggagtttgatttgagacattctgtgggataaggaatagttttctattgaactgtggtggcttttgccactaatcaggatttagggctgtgcacctccatctgttaagtgaaatggaacttggcttcctaaacactatattagaccaacttgagtcaatacttttattaagtttaatcagggattctcaaaatatttaggattcaaattagcccaattagaaagcagtgcattaaatgttaccaaaatatctgaagatactttagaactattttacacaaagcttatgtctttcctatggaaagtatcatacataaaattttacattcttttaaaaaacagaatctaatgtcttcagatacctagagcttggaaattataatagagttgggctttgacccgaagtcagcagttcttttcattttagattttcaggcaagtttcagtagtttggagacttcttcagtagtgaccccagcttaacctacatataatcactttgcacacattttaagttaatcagatgcttccagagtcttggatttggttacccctttgttagataaggagacagattctaggttgggacaaacatcttaatttattctctaataataaagtactgattaaagagcaagttctcagagaattcacaaaatttctagaatccatgaaagatctagagaacataacaaatgaaactaaaaaaaaaaaacctgtcttaattctgtgactgcattgcacccttcaccagcactaagagaagtcggaatggaagaaattaccgtatgtaattcttattcacttaaaatctttgtgcgcataggccttagcactttgacaaataaactctgccttttagctcctcactattgtcttctttcctgtcacttttaggctgtttcattggtcgtataaaaacaaccttcttcgaagttgaatgtatgtttctgcacatagacaaaccatattttactgactcattctatgttgaataaaggcatacagttttacccta

SEQ ID NO: 110929 - DNA, 797 bp, Homo sapiens
ggatatgataggagcaaaatggtgcctacatcgtctttataaagaaaagtatatagcccattttttaacaaatgaataatatatcgaatcattgatgacctaaaagaaaaattgttaaggtcagattttcgagagtgtatcttgatgacccataaaactgactttttattgtagttcactagttcccataattgcccagctgtggttactttcactgaaaagaaaaaatatattttggaagttaatgtaaggatacattggctttttttttttttctttacattggctttttaaaagacagtttttatttttcagatactggaatgtcaagtatctgggttgtcccaagacgttggagataattcagccttccaagagaacagcagtctagatcttagctgaaaatgtgctgtttctaaaggaagcttcttaagtctcaggggacattagcatcttcataatttccatatataataagaatgaaggtaaaatatttaaatgtgtataaactaatccataatgaccatttacaaagattgactccccatttctggtacatatttatcattatttagatgggtctcctatcttgtgggaagataaatttatattcaggtgatgacatgggtgcctgcaagtagagttggtctgcagctgagggagaaggcaacataccagaagacaaggcagcttcaacctggatccccagctaccctttatttacttcactgagtcagaaacccgtgttcattgcttctgagactacttgacctcagctggtctttagaagtctggta

SEQ ID NO: 110930 - DNA, 608 bp, Homo sapiens
ggatatgataggagcaaaatggtgcctacatcgtctttataaagaaaagtatatagcccattttttaacaaatgaataatatatcgaatcattgatgacctaaaagaaaaattgttaaggtcagattttcgagagtgtatcttgatgacccataaaactgactttttattgtagttcactagttcccataattgcccagctgtggttactttcactgaaaagaaaaaatatattttggaagttaatgtaaggatacattggctttttttttttttctttacattggctttttaaaagacagtttttatttttcagatactggaatgtcaagtatctgggttgtcccaagacgttggagataattcagccttccaagagaacagcagtctagatcttagctgaaaatgtgctgtttctaaaggaagcttcttaagtctcaggggacattagcatcttcataatttccatatataataagaatgaaggtaaaatatttaaatgtgtataaaaacaaccttcttcgaagttgaatgtatgtttctgcacatagacaaaccatattttactgactcattctatgttgaataaaggcatacagttttacccta

SEQ ID NO: 110931 - DNA, 302 bp, Homo sapiens
cctgggctccaggctcctcccacctcagcctcctgagtagctgaaactccaggaggatgccaccatatgttcttatgtggcagtggaacaagatactacagaattttagttagaaggagaaggataattttctttgggtaggtggttaggaaacatgtggcctgaaacttgagtggtggtaatgagccgtgggaagatctgcatgaggaataatccagagagacctacaggtgcacagagcctgagctgaaacaggaggccattgtactcagagcagagtgagcagggggttgtagattagg

SEQ ID NO: 110932 - DNA, 471 bp, Homo sapiens
gaatggatcgtgcacagggttgtaatacaaatggtaaggggtaaggctagagacgtgagctggggccgtggtacaaaggccttatgaaccgtgtgaaggacgtttaccctagtacagacaatgaggatacactgaattaaagagggaataccatgattctaactgcagtttagaatgacgaatctaggctgggcgcggtggctcatgcttataatctttgcaatttgggaggccgaggcagacgattgcttgagcccaggagtttgagaccagccaggacaatatggcaaaaccccgtctctaccaaaaatacaaaaatcagctgggtatggtggcatgtgcctatagtcccagctactcaggaggctgatgtgggaggatcacttgagcccaggagttcgaggctgcagtgagccgtgattgtgccagtgcactccagcctaggtgagagagcaagaccctgtctcaaag

SEQ ID NO: 110933 - DNA, 418 bp, Homo sapiens
aaaaacaagattaagtatcatcattgatttaaagagtacaaagtttgaagaaaatgcttccccgagacatttggcaaggatacagctttcctctattatgcccaggcagccacctctgaaagctccctagaatataactcaagaatggcacccaaaatccctgagcatcttgttcctctccagccatacaaagggatgacaacaacatggatccagcaaccggaaggtatgtttgccactgtgtgtcagccagacttcaaaatggtccccagtgattcttgcctcctggtattcatgacccatgtagtcaggtaggtctgacctacataaccaacaggatgctgcagaaatgacagtatgggacttccaaggctagggctctgggggaaaccagtccacatgttgtgaggacattcaa

SEQ ID NO: 110934 - DNA, 403 bp, Homo sapiens
tcgcactgccccgcctcccacctcaccccagatggggtcagcagcctgctgggggtcagcagggtagggcatcctaaccccctctggcaggtgaaaaaccctgaggctcagagaggggaagtgacttccccagtgtcacacacctcttggagggcagggggaaggtcaacacctgacctcctgactctgagattgaagcaagaaagtataatgttaataatccaaaatcttccaggtttgtttctgcttctacaaacacagagggctaagctcacgctcccacagttatgctcacgcttccacagtttgacttttaatctcatgattgtcaagctgggatcatgtggcagacaccattctgcaacatgccgttctcactgcccctgtctgggccatctttccc

SEQ ID NO: 110935 - DNA, 322 bp, Homo sapiens
ccgtggcacgcagtcctctccttccagtctgcacaggctttcctcctctggacactttacacacatggactcaggccatgtggctttccgtgtctggcttctgtctccaagcatgttttcccggctcctccaggctgttgcttgtgttggtgacgcattctttttcgtggctgaatcatattccgtcacatgtgtacaccacgtttattcatccaggcatccattgaaggactttggggctgtttccacattctggctcctggaaatggtgctgctgtgaacatccctctgtgtgtgcatctgggtgaggaaacgcgctttc

SEQ ID NO: 110936 - DNA, 464 bp, Homo sapiens
tccacaacttgaatgccatattcaatgaaaaaaaattttatttgtccagccaaatgtattttttgtctattattcctcaagcatgctgccactgaagtaaaagaatgtatggctcagttcatcctaatacaaaatattacataacctgcttttaataaactatgtatgcttacattctccctctgcatttaaaaagattggctattagaacaaatcctagaaccatgcttcttcgtttcaaatcctgtctgtcacttatcattacacagtggagtaaaataagtgtcccctgttattactggtacttgaattaaaaagttttagaagcagagaatggcagaaaagctcacacgaggagggttgaatttgaattctgggtctgatgctcacgagttgtgtgagttggttgagtttgcctgataagtttatctagaatccatactgatgggacaggcaaatcatta

SEQ ID NO: 110937 - DNA, 451 bp, Homo sapiens
aggattagcaacagccatgcacttctcacttccaggcctgcgggaggggcagaggagagggctgccttggaggaagggagggttggaggacctggcccagctgcagccgcacctcagcgaggcaacccggggaacactccccatctccgctgtcccttttcatcttcctcctactgttgatcctcattgctgaatccaaccagaacctgagggtgagtgtccgggtgaagggttggtataggtcagccaggtggctgctggggcacagagcaggatagacagtggttttcaagaacaggtggaagattccagcactgtactagtcctgtggctgctgtaacatgaccacaaactgggcagcttgcaacaacagaaacttaattctgtcacagctctggaggccagaagtctgaaatcagggtaccctgttccctctggaggctctagggga

SEQ ID NO: 110938 - DNA, 198 bp, Homo sapiens
ctgatttctcttgatacactattgtgtgccagtgatatgaaatgatatgcggcacctcaaagctacaacattaatgcaagttactgatagagaatgctatcagagtgaaaaggaaaaacttgaagattattttggcttttttaaaaatagcaaagattacattattttattatattttgcttttgagagtaaagttgg

SEQ ID NO: 110939 - DNA, 245 bp, Homo sapiens
ccagccagctgtgctggaggctgggaatttcaccaaaattcatgtgtatgcttctgccctttgggaggttcaaagtctggtgggaagcagacaaaacgtgaagagtgtacattacagcctgtgctgttttgtctatgaaagcgacaaacacactaatgggagactgaaaatgagaaggtggtgaggaacagacctctttgaagtgatgctatggtggctgagagcaaagctggaaggtgctggcc

SEQ ID NO: 110940 - DNA, 435 bp, Homo sapiens
  misc_feature (380)..(380): n is a, c, g, or t
gacagggcaggctgcacactgtacgtagctgcccctgagaaagctccctagggaaaggtggccagaagaagcagagagctgaaggagataaagactgaagccatgctgcccatctgggaaggatgttcctaagcgtatgcttggtgtgtgggggccacttggctggagcagcatgaaggtatgggacagtgacctgtacttgtggggaggtgggatcacccaggaacctcaaagaccagagtaaagactttgcttttgccttgcattctcagcgagagaaccagccacgaggggattcccgctgaaagagtaacacaacctgccttttgttttagcacagtgctgtgcagaacttcctgcaacgccgacacgttctacgntctgtgctgtctgcacagtgactatgaaccagacgtggctatttaagttaattaa

SEQ ID NO: 110941 - DNA, 300 bp, Homo sapiens
gggattacaggcgtgagcaaccgcgcccggcctgcgtgagtcacttttcagctgaaaacgctgcagagctgcatgactttccagagacggtccacacccaccacccatcccaggtccacccctccttcttcctctcctgtagcctgaggagacctctgcacctttgcgtgtgctgttgcttctccccagattgctcttccctgcctctgcctgcctggtgaactgccagttcctcctagaagcccagctcaagcctcatcttctgaatccttccctgatgctcttcctttgcccttcagc

SEQ ID NO: 110942 - DNA, 319 bp, Homo sapiens
agtctgagggcagagacataacccagtcaacaaacagacctaatagagagtaaaacaaggacaacagatgcagggcagacacaaacactgtgtgttctttaaaggcaattcctttttaccccaagccctgtgacttgcctccaaacttccttacctatactgcccctagtgtgcacttctcaggtccccaaagggctgcacaattttttgcccaggcatgttgaagaggtctcaggctgtggagtgaaatggatctggccctgaaccctgactctgcccgaccaggagcaaacagccgcttttcccctctgagccataa

SEQ ID NO: 110943 - DNA, 620 bp, Homo sapiens
atggtgtggaagacagttagatggtgaatacctcagggaacaccatagtctcctcggttttcaccagagtttgcctgggagccgggacatccctatcattttatgggctatttctgttttcttcatcatttgtcccctgtccattagacaacaatggattgatctttttctaatctgaattaggccaggcacaaacaggtaagttaccttccggtttccataattacgggaacaggcaagtacttcttccaaactcaggccttcagagaaaaataactgtggtgggaggggtgcaatccctggggaaacagcgttcttggtgaggacaatgctgaggtcacccatcggtctccgaagaatagcagttctacttctcaagggaagagagccccaactctaagaatttcaggtacatgaaaaaaaagtgccacaatccattgtccaagtttgccttatgttctatttatagtcagagtgcgtgctctgaatctgttttagaatcatgttcttcaggacaacttgaaataaaaatcagagaagtttagtttcaaaaaaggcagagaggtgactatccacccaggagacttcacccattcccgccacgccagtgtccccagtca

SEQ ID NO: 110944 - DNA, 830 bp, Homo sapiens
tccttgactgtaatttaatatagtcacagaattcagatcagattttccttaactagaaaggcagtataccatagtgtttaagtacagaggcataaaacagactgcctggattagaaatatgactttaccacttgctagctgaacaactttagctaagttactaaacctctctgttttctctatttgtaaaatggggacaataatagcttctatctcataaggtaattgtgagaactgaatgaattcatgcctgggaagttgttagaatgtctatctagtacacagtgttagctgtttctagaactttgaaaattgtcagagaattagtatattttctgtttatttctgtcaaagcgattgacagaaatgaacaggtgagaaaaattaggataaagtagtaaaaatgaaaaaacataaaaatagatgataaaattgggggggaaactgcataccatgcagttgagagagtgggtaagtgtgtgggcccacagtgctgctccccagtcctcagaaaagagaagctgtggcccagggaccacagcagcactgtaagtgtgatggctgtttttatagatctgtcaattaaagctctcaatacaagcttcttgtattaatgtcaaagtgcagatctaaacttgagacccctgctggtcaggaacatccaaactggtagaggccttaagtattagatgacgatctgtcagtcccgtatatctatcttaaaatttcatgacgttctgcaacacaacatgctgtaataaatgtcctaatttgaggaaattgggactgtacagtggctgattaatctaaaaaaaaggaagaaaaattga

SEQ ID NO: 110945 - DNA, 334 bp, Homo sapiens
cagaacagagtatttggttggaaggaagtttgagattccaggttgtaatcatgggattctgaggttctaaagttgaatgattttaagctgcacagatgctgcaacatcttgtcctgtacaactttttaagttttgtgggaagtggcacatagtaagtgatcagtaaatatttctgaatgagtaaatgaatgtgtgaagatcattaaagtcaacatgatcaagaaaatgtgagaccagagtgttatgaattaaattattccaatatgtcaatagaagttgagatgaaaaggaatcagatacccaacactcaggcattacttagatatcccaaatc

SEQ ID NO: 110946 - DNA, 405 bp, Homo sapiens
acaatgctggaagtctctgcaggaagctgttagctggagactggttgaccgctgtcctcactgggttagaggcctgctcagagatcgagccatgaggacctgagcttgcctgtcctttcaagagtgcagcaaactccttcagcagagcctgtgcagaagaaaatgtaggcacccttttccgaaagccagcactttgggatattccacaagtcttcacaataacaagctaaaattttccagaagctcggctgcccccaagtccaactgctgctcagtccccatggttgctggacctcacagggtcaagagacacaagagcaaaagcaggggcaggaggcgttgcttgctggcgttgctctctgcttctcctcactgccattgctcaccgggcacctgagtctctgc

SEQ ID NO: 110947 - DNA, 490 bp, Homo sapiens
tactcagatgttgtaggatgtcacttatgctgaattctactgtctaaagcaagtcacaaaactggcctagacttaaagtgtgagctaattccacctcctgataggaagacttatacaggtgcattgcagagggtatagataaagggaagagtagggaagtgtggctggttttgtaatctaccatactgactgcagtatagtttggtaagtgtggtgaggaaggcaacatctagattctaaaaagcattaaacaaatttcaacttagttaattcaatttcagcttagttttcctataacagggatgctactaaaggaaaaaagaaaaactgggttgtttatcttatattaggatcctactgtgtgttttctaaaatcattaagttatcaccagatgatgctgttttgcctacttaatacattactcagtttcatcctgagcccataaggaagttgtttactagtgtcgtcttatggcataggaagttgacg

SEQ ID NO: 110948 - DNA, 415 bp, Homo sapiens
cttcctgtgtcgctgggcagcaggccgcctccaggctgtgcgcgtcttcgactttttgactcatgggaaagaagctgtgatggactcgaggtggccatgtgtgttgggcagtggctcccaggtgttgggccagcagggaagggcgttgcagatggaaaggggttcagagacacacggatatgatacatccctacatcctttgcccctgccctcttcccacgtcagggctttttctacaccacagggatccttacgtccctccctggggcctccaccccgaccctgtattccagctgttttgcacagaggtctgataaggactctgctgcttctgcaggccttaccctggctttgcccctttccatggctgaccaggccttgaacacagctgcagtgttagaactgcgcccactgt

SEQ ID NO: 110949 - DNA, 819 bp, Homo sapiens
  misc_feature (79)..(79): n is a, c, g, or t
  misc_feature (214)..(214): n is a, c, g, or t
  misc_feature (227)..(227): n is a, c, g, or t
  misc_feature (230)..(230): n is a, c, g, or t
  misc_feature (275)..(275): n is a, c, g, or t
  misc_feature (376)..(376): n is a, c, g, or t
  misc_feature (421)..(421): n is a, c, g, or t
aaaattaaccatttcaattttctcaaatagttttaagtacagcagattaaactaaatgtctttaactaaagcactaacnggtataatgataacaatttggtaagtcacagtaaagtctcttaactatccttcagatattaataaagtgaataactctaataaccagtaacagattctttcacaaatcaggtgggttccagttctttgctttcancaaaactgaaggnggncctaactgagttattaagtcaataaaaataattactgatgagagngcaatataatttttggcatataacttgtaaacatttcaaaaaaactgagtggcaatgctgtttttaaaaattaattccatccaaatggaattaacatttgnttttgttgtagaaaagcatcctggagtgattaataaaagactttncaagcataaaaatgggttatattagtatattgttctatggggaagaatggaaatatgagttcaaaaatataaaataacgatgtgaaattttgactattaaaaaagagtctcatataacttttaatggataatggcaggcatcaaataggtatggcatttaaattcattggataaattttagaaagacatgagactctttgaacgtcaatatttgtcatatgttaaaaatcacatcctacaattaagcttttgatgagaactgttagatgtcagcttaaacacgtgtaaggggatttacagattttcaaaattattttaggggtacacaactaagaacactgaacaatcactgctataatggcaccctattactctaccacaggaacaaaagctcccgg

SEQ ID NO: 110950 - DNA, 635 bp, Homo sapiens
catgatctcttccttgccctaaaatgtctttgtaactcacatcattaatctgctcccctcctaatccagttttctactgacctaaaggtctctcctctcagtctttaaacattttagccctgtctctctccagcgcaaactcttacataactcataattatcttttcctcccacggtctcccagtttctggatctcccttcagataatcttacctgaaacctcctttccttaccataagcaaggccttgccatgacagataacggtgccccataaccactgttaagcgtctctccctaccttctctctttctagctcatcccctccagtattctgactccaaaaatcttccaaacccaatgagtcctccagtgcattgaccttagaagttgttctgaccctcaccaaacttatgtccccttttccttagtgagcttagagtaaatatggcagcataatcacttctttgcatatccttttaaaactcagacttcactgaaatatctcatctctgttaaaccaacctttttcaaaccgtgcttgttgtggcctaagcagtcaatgatagttgaggaaaaacacaaccatgatgactttgaatttgtaactactggcctgaggtggctccttagtgcc

SEQ ID NO: 110951 - DNA, 900 bp, Homo sapiens
tctcaaagtccagcctttcgacttgctgagttacttgggtaaattattcaacctttccatgcctcagcttccttatctaaggattgggataacaatggtagtcactgtttaaggttcatatgaggattaaatatgaattcatgtaaactacctagaaagtgctagaaacatttgctgttgtcattatttaaaccaataaacggatttagtttctcacattaaaaaaaaaatcagaggtaggcagtccaggtggtgcagccacatcacaaagccaggaaggaactaggctccttctgtctccctgcttggacatttcctgcatgtcagtttcattctctgggatgtaaaatgtaagtacctccttcggcattccagacagaagaaagaggaaaggcaaggaacaaaaatgacttattccagtggcctttggcttttattccagaagggaaggcctcccaaagggtttttcctacagctcattagccacaatgatgtcctatggtcatgcttgcttcagtggaggggggaagtttagtccttcattttcctctccagtggaggaaggcaggggagaatgggactgggaatgggggttgagtgaactgaccttcagtaccgcccagcaggcccagctcaaaccccacctacttgtctttcccaattatcaacattacctagccatttctttggcactaatttttcattctttctgcctaggaacaatacttttgcatagttggtttcttctcaaccttcagattccagttaatgtcttctcagaaagggattctctagccacccattgaatatatgttcctcctcttactctcttaattagcactctgtttatttcctttataatgcttaattcaattttcagagtgagagagagaatatctg

SEQ ID NO: 110952 - DNA, 325 bp, Homo sapiens
tattaaaaattcaaaaaaataagaaaaaagaaaattatatgttgatgcactaaacaaaagctttgtattcaccaaatatttattgagtgtcccccaagggataggcacagtaccagtagatggggctttggtaataatcaagatcaacatagcctctgtcctcaaggaagttacggtctaattgtacaggtaaataaacaattataatctaaggtaaaaggtgctaggatgggggcagtgccccagggccccttagcaagggcatctgatctagctttgggatcaggtttctcaaacacagtgacgtctagtttgatgtcagtcc

SEQ ID NO: 110953 - DNA, 611 bp, Homo sapiens
tagggtttgcatttttcaattaaaattcattcaaagaactcctgcccagaggcatttgattatgcctacacctgctatctagttgcagtgttgaaaggcatgggctctggagttagatcgggcgatatccatatgttttctcaacctgaattcccttgtttgcataacagagataataaaggtccctagctcataagcttgctctgaggagtaagtgacatgatgcttgcaaagcacttagcacggtgccaggcgcaatactttttaatgctgatcactgtcatcagcatttcaaccagagacacacagtccacagtaattgagccacataatgggttcttgagaagtgactagaaggttaatgctttggtaaaagattaggaaagttgattctacctatgatctagaattaatttctctagagatgcatgggatgtgtaaagattcttttaatcaattactgttgaattacattgcagcagcaaggaattttaattcttaaaaactacctggctatgtagattcctctaacagtaatttttgggggataaggagtagtgagatgcttggccacagtttttaactttcccccaaattacacccactacata

SEQ ID NO: 110954 - DNA, 444 bp, Homo sapiens
gccctgataatgaggatttctccgcattatgaaaggaatgatggagtggtctggggaggggaccatacattccaggttaagggacagcatgagcaaaggtaggtgtacagatgcttataagagcaaggggcagcagggcgtggtggctcacgcctgtaatcccagcactttgggaggccgaggcgggtggatcgcctgaggtcaggtgttccagcttggccaacatagtgaaaccctgcctctactaaaaatacaaaaacttagccgggcatggtggtgggagcctgtaatcccagctacttgggaggctgaggcaggagaatcacttgaacctaggagacggaggttgcagtgagccgagattgtgccattgcactccagcctgagcaacaagagcgaaactctatctcaaaagaaaaaaaaaagagagcaagttacctggaa

SEQ ID NO: 110955 - DNA, 320 bp, Homo sapiens
aattctgccacccacagcccaagtgtacctgcctctttctatctcgctgttacgattttggttaagccaccaccttctctcaccttgactgctgcattgcctttccccgtctccttgcttttgctcttcattcgaccattcatttctttcacaactgtcagctattcatactgttttgctgtgtctccacccaaatctcattttgaattgtaactcccacaattcccgcgtattgtgggaggaacccggtgggaggtgactgaattatgagggcgggtctttcctgcgctgttctcgtgatagtaaatgagtctcacgtg

SEQ ID NO: 110956 - DNA, 330 bp, Homo sapiens
gatggcagagtggaaagatgggaagacctgggtcccaattaatgtaataaagtttctgagttagccatttctttttcttctttgaatcagtgatttggtttttctgtcacttgaggttaaaatgatcctaactaatggaggaagggggagtccctgaattggtaaacaaagaaggctcacttgatctgtaatgttttatttattttaactaaaaaataatatctgttgtcaactctgcgtagtgagtatgtaggtcattattctctaattttaaaatgaagtgggtagtattatttaaactgttctttaattttttttaaaaaaaggaag

SEQ ID NO: 110957 - DNA, 325 bp, Homo sapiens
aaatgatgatcaagtaaatagtctattaaaaacaaaaacaccaaactaatttctgtagcagacctttgtatatatgaccagagaggagcgacttatacactactctaatgcctttatagactaaaatatttgaaaccttgaaaagcgtacaaaggatcccctgaattaggggaagaatcaaggttcaaatttaagtgtgcaataatatgattaattcctttgtgagagattgtaatctctgtggataagaatgttttttgaaaaaaatatatcatctagaatttcagaatatcagggtgtcattttcacagcaaagttttaattg

SEQ ID NO: 110958 - DNA, 573 bp, Homo sapiens
  misc_feature (339)..(339): n is a, c, g, or t
  misc_feature (454)..(454): n is a, c, g, or t
aaaaggttttgctctttttttcccaaataccgtttcaacagaaagaacccaaagagaccctcaaaatgcctgtaaaattattgcttttctttctctaagtcaggcaggcgaggcaacggaaaggaagagatttggtaagtaaattacagttttgtgattgctcccactaccgtgactgcatgtctgtgggtgccagccgacgagacaatcgtctctcacactctggtagcattcactcaacctacaacactgaggaagaaagccacactgaagacacaaggaaaacaagtcaatccagtctagagaacaacattcagggaaacagagtaccaacacctncttagaacatggaaataaaaaataactccatcagagctacctcgccaaggagcatgttgaaagtccaaaatagcaccattcatcagtgtctcaggtcctgtggcagcatctcggncagttaccacaaggaaacaatgagtttcaaactacttctatacatcaaaagagtacatggataaaatatagagatatacagacattgcataaactactaggtttgttacattctaaatg

SEQ ID NO: 110959 - DNA, 272 bp, Homo sapiens
tttaggcattacctgttgacttgctactatgaaagaggaagattttcacttttgccccaccagcctgcccccaccatcttgagtccctcattctcattctccacatatagctacaccacaagttttggttacatagatattcagtggttacctaaatatcgatcaaagtgagccatgtgctgtgttatggattatatttcttttcttgcataacaagtgtcaaaaattatgaaaaactttcaaatgggaaaacaagaattaatggctcaccc

SEQ ID NO: 110960 - DNA, 549 bp, Homo sapiens
caccagatgctcccaccaagaacgaaaaagtgggccacatgggttattgctcaaggtctatgctgagagcaccatgaatcactaagacatctggcccgagaactttaatcagctgctctacctaaaatgcaatattctgttttcctcccaaactgggtggtcacctgggtgtcggggaggaaagcaaggaaggcttgcccttgtccgtgtgtctgttctgtctctggcacggcaggctgctgagttactggactgtgtccttcaatcactccactttgctttctgtccacttcaccagcccagagcagagccccgcagaagggactgctgaggccaggcagagcggtgatcaagttccaccttccaggaagagacagcacgcccggtgccccatggtggctgcgcatgacagcctggctgcagactactgtgtgcttccatctgtcaccttccaatgcaatgtgacagcagccctccggcgatccatctgcttccctggagctccatcccgactcccccaccccattctgtcggtgggagcatctggtg

SEQ ID NO: 110961 - DNA, 171 bp, Homo sapiens
tcccaggtgggaagggtcggagagcggaggtatctgagagggagggctctgagggggaaagatctgagagtggaaggctctgaggcggaaagatctgagagtggaaggctctgagggggaaagaaagatctggtcagccccagggaaggtaagtgtccggtctgcttatag

SEQ ID NO: 110962 - DNA, 144 bp, Homo sapiens
aggctggagtacagtggtttaatcatagctcactgcagccctggcatcctgggtttaagcgatccttccacgtcacctcagcctctggagtaggtggggactactacaggcatgtgtcaccctactgggctttttttttttttt

SEQ ID NO: 110963 - DNA, 267 bp, Homo sapiens
gtcaatagcagaggcaatggaatgagctgtaataagagtcagcaaatctgagtggacttggcttctcccgtttgccatggtgtaaatatccccaccatgattgttttcaggctaccaacatgatgtcactaaatgtggaattgagaagggatgtccaaaatatacatcaataaatcagccctcatttgattttcttctcagtgaactatgtggttaaatgacttttatctacctttatctcgccattagcaggagacattatggaaa

SEQ ID NO: 110964 - DNA, 258 bp, Homo sapiens
aaggtaggtgatttggggctgttaacagtaactttgtgatgttgtcaaagactcatgctctgtccagctttctattccttcctatataggatatcactcttatcttcatgttctcgtcctacacagaaggaagaggaaaggggaacagtgctaaaaatgcaaccgagtcttcctactatttttatttatttattttttagacagggtctcactgtgttgcccagccaagaatgtagtggtgcaatcacaggacaccac

SEQ ID NO: 110965 - DNA, 125 bp, Homo sapiens
ggagaagaaaaggtcaggaaaagaaagaacagtcaaataagtaaacgctaattgaattccatgttttttctgggtaatattcccatgggttggctgcctcaccctcagtatctctcttgactttg

SEQ ID NO: 110966 - DNA, 230 bp, Homo sapiens
tgttgtctgacaagacataatgttgagtgtgaacagctgtactctgttatcaaagggaggcagtatatatgagatcagacttgaggaggcccttaaggcacaaggaagttacatgagggatttgccagtatgtccatggtccctatttcccctacattaccttctctctttcaatccatacctaagtcttcctgcctaagacaagttgactgaggaagggaaaaaaaaaa

SEQ ID NO: 110967 - DNA, 521 bp, Homo sapiens
agtgatcagcggccccaaacacgtcagtctccccagcacagtggatacctgcgctccaggagacagaatcaagttgagactgatataagtaccccggagttaaagcacacagtccaggagttaggaacttagcaccggtcccttaaaaccttccagaacacagtcacttggctgaatccaccttattccacagttaaaccctcaaggtcatcaaatataggatacaagaaaaaaaaattggctgggcacagtggtccatgtctgtaattccagcactttgggaggcagaggcaggtggatcacttaaggtcaggagttcgagaccagtttggccaacatggtgaaaccccatctctactagaaatacaaaaatgagctgggtgttgtggcatgtgcctgtaatcccaactactcaggaagctgaggcaggacaatcacttgaacctggcaggtggacgctgcagtaagccaagatcatgccacggcactccagtctgggcaacatagcaagaccctatctc

SEQ ID NO: 110968 - DNA, 267 bp, Homo sapiens
agtgatcagcggccccaaacacgtcagtctccccagcacagtggatacctgcgctccaggagacagaatcaagttgagactgatataagtaccccggagttaaagcacacagtccaggagttaggaacttagcaccggtcccttaaaaccttccagaacacagtcacttggctgaatccaccttattccactgaaaaccaatgaaatgttccaatgagaaagttgttaatcaagagcagtcgtataatcaatggataaatttttata

SEQ ID NO: 110969 - DNA, 476 bp, Homo sapiens
ggctgaagtgcagtggcatgatctcagctcactgcaagctctgcctcccaggttcatgccattctcctgtctcagcctcccgagtagctgggactacgggcacctaccgccacacatggctaattttgtttttttgtatttttaatagagacagggtttcactgtgttggccaggatggtctgtatctcctgacctcgtgatccacctgccttggcctcccaaagtgctgggattacaggcgtgagccaccgcgcctggccctgatcactttttaaattcagagcatgagtcttcgattaggctggtttgtgtgactgtcactgtgctcagtcctgttattacagctgtgctgaggtacttagtgtggctgttttccagacttgacttgctcaaattaccatttctctatcttctccagttgcttgctgacccagccttttccactatacttagtggcagtgaccatctaaatatg

SEQ ID NO: 110970 - DNA, 548 bp, Homo sapiens
ttctactccagggcacttacacaatatgggtaagggttgtatctttcttttccaacatttaacagtttgagcacaccattatttttcttgtacgtactgtactcaaatgcataaatagaaaaaaatacacgtttcaccgtcagtcatattacactgaccttgctaatagattatcacacctggggaaaaggtgagttctggtctcaagggcttgtctccatcaaggctggcagagtagggaagacagagagaggttggggtgatcagagaatgagaagatgcaaggagaaaaaaagaacgcagaccagaagcatgtggaaaattgtgggtggcaaaccacccaggtgctgaggcaagagactgaggacacgagctgttccagtataataaaatataaaacaagaatagttataccagatatagatcttagatatgattatatatgaatatcattaatcattatttgtagcaattactctttattccaatattataataatcctcactctacaatcataacctaggaaaaaccaggccatacagagata

SEQ ID NO: 110971 - DNA, 429 bp, Homo sapiens
atcactcatcattggttaaagccgagctcacagcagaataagccaccatgaggctgtcggtgtgtctcctgctgctcacgctggccctttgctgctaccgggcaaatgcagtggtctgccaagctcttggttctgaaatcacaggcttcttattagctggaaaacctgtgttcaagttccaacttgccaaatttaaggcacctctggaagctgttgcagccaagatggaagtgaagaaatgcgtggatacgatggcctatgagaaaagagtgctaattacaaaaacattgggaaaaatagcagagaaatgtgatcgctgagatgtaaaaagtttttaatgctagtttccaccatctttcaatgataccctgatcttcactgcagaatgtaaaggtttcaacgtcttgctctaataaatcacttgccctg

SEQ ID NO: 110972 - DNA, 231 bp, Homo sapiens
atctcatacttttttcagaaaatcaaattttaggctgagggaagggagtgggtagggaaagggaagatgctgatcaaaagggacaaagtctcagtaagacaggaagaataagctttagtaatctaatgcacagaatggtgactttaataaataacaatacactgtatactcaaaattgctaaaagagattttaaatgtttttaccatgaaaaaagataagcacgtaagggg

SEQ ID NO: 110973 - DNA, 129 bp, Homo sapiens
cctcctgggttaaagcgtttctctagcctcagcccccccagtagctgggactataggcaggcatgagccgccatgcccagctgattttttttgtattccttgtagaaatggggtttcgccatgttgccc

SEQ ID NO: 110974 - DNA, 184 bp, Homo sapiens
tgtgcattgtgacacacttgtctagggatgcctggaaatgtataaaattggactgcatttcttagagtgttttactatagatcagtctcatgggccatctcttcctcagatgtaaatgatatctggttaagtgttatatggaataaagtggacattttaaaactagcaaagttaaaaacaaaaa

SEQ ID NO: 110975 - DNA, 494 bp, Homo sapiens
gccgcgattttcctaaaaccttaaacttaggacttttggcagaattgatggtccttaaccaacaattacaaggcagaccaggccctggggaaaactagctctgactatcctcacccagggaaggctcattggaaacactccgagagatggcttaattattaatatttaccatagagattgttctaggagcaacgcctccttgggaaaccaaagttatatcaagaggaggcttggtaagtgttgggggcagggaatgggccgctgccgctcagagactcttctgttgcctggtttaattttcctagtggcacctatctaatatttccttgcatgtttacttgcttatctattgtcagtctccatgagaacaaagatcttgccagtgctgttggttgcctgatttccagcccctggaatacagcctggtaggtggcaggccctcagtaactatttgttgaatgactaaataaatggagaggggtgggtgtgggctc

SEQ ID NO: 110976 - DNA, 202 bp, Homo sapiens
aaactataaatgctttttaaatccttggcaaatttgtattttctacctcattgcacagtaatattaataaagctaattgaaagttagttacatttaaattgtactttcattataaagtagttaagaattgtcctaaaattttaacgtgtttcatatgtctgtgctctctaaaattagaatgagtaaatgacactgatttaaa

SEQ ID NO: 110977 - DNA, 417 bp, Homo sapiens
ggattatagacatgagcaattgtgcttggctcaaatattcgttttaattgggctttttgtcagaagaatgtgccactctgaatttgtttttggtattaagtttgtttcttgcattacctgaacctattttacattgattttattttattttatttacatcgatttttattttattgatttttattttatttacattgatttgaatttgggatactgctattttaccgatattaaaagatgtttcagcaaagctagcagatttttccatgactttttttagtcattgttgaaagatcaaagcttcattcatctacagtttaacctttgcttctaaactaaaattttattcttaatagtttttttcttactctagtgatgagttgtttatccatgctaatcaagtatgctagtcacctg

SEQ ID NO: 110978 - DNA, 402 bp, Homo sapiens
caatacccaaaggatatgtatctacaaacctagtggataagcaatctttaatgaagtcatctttttaaaccttcaagtaaatagtgaatctgactgcaaactatcaaatctggcctcaccacaataaacatcaaaggcagcgaacatataatgaatcaacatgaaatataattcagcagccagccctgtaagtttttgcctgtaatcttgaattcactgaaacatagattccaaataatttcccaaaatccaagcttcagcatttcagtctgggctctgttaaagaatttatcctagatgcctggaataaaatggattagttcaaccaggttctgttgcctagctatggaatgatggagcacctccctggaagtggatagaatccaatgttcttcagtagac

SEQ ID NO: 110979 - DNA, 356 bp, Homo sapiens
aatatctgccacatatccacatttctgacccatttctgctggatttgaaggtaaaagaaaagagcaaaaggtgagtctaaggactggcttgactccagataaatatcttcctcagttatgcggtcagatctgtaggagaatgctgcgtcttagcagtatgggaaactaacttggcctagtctggtgatggcagtaaaacttttaacaattcatcagcccttttaatgccagttttttatataatacccttcacttatattcagccactcagcacttgccatgtgccaggttctatactaggtgctaaggacacaaccttcacaacaagtacagcccctgctcttgaaaagtaaagg

SEQ ID NO: 110980 - DNA, 225 bp, Homo sapiens
agggcaacatgtgaacccctgtagccagtcatatccttggactttgcaggtaaatgaggcagtaagttcccttttgtgcttaaaccagtttacatttctgtcacgtgcaaccaagggtccaagcctacatttcatccatcttcacctgcttctttgaatcctctcttcctgtacactgtgatgagagggccccctcccggacctgaggccagaccagctcatgtg

SEQ ID NO: 110981 - DNA, 410 bp, Homo sapiens
gagtgaaacattacgtacacatgaacacaaagatggcagcaatagacaccggggactactagaggaaggagagagggaggagggaggcaagagttgaaaaagttaactattgggtactatgctcagtacctaggtgacaggatcatccataacccaaaccttagcatcacacaatatactcatgtaacaaatcttgtggcacatgtaacccctgaatctaaaataaaagttgaaatgatttttaaaaatacaaagatgtacgtactaaatgcatcactctttactattagcaatactgtaaaaaaaatagaatctacaaaagtaatctggcagtctcattcattcattcaacaaaccattattgaaaacccactgcctaaaattacccagcactttggaggccaaggtgg

SEQ ID NO: 110982 - DNA, 251 bp, Homo sapiens
actttgtaaatcaagtgctgggcccggccctaggcctgctcaggcggaagctccagaggtgagtgacccatatgcgagaacccaggcagtgacagtggatgaagccatcctggaagcatagggtcctggagacattaaactctctctcccctaacatacacatacatatgtatgcgcacacatgcagggatgttcacacacacagacacacatcagccacatttaccaagagcttttttattttttatttt

SEQ ID NO: 110983 - DNA, 322 bp, Homo sapiens
tttaaataactaaaaatgcatataaaaattaaatgtttcatgatcaaggtaaaggaagaaaagataacatttattgaatgtaactagtgtgcttggcatgttacagaaatgatgttatttaagttttataaaaagttcatgaggaaagattttataaatgaaagaaactcaagattcaagggtgtttagagcctttctcctgaagttacctgatttattatacgggtgtgtttataaaggtttgataagtgcctattctttctgctctttcactgctgaagaatattttagacatgttacctcttcgtctgaattatgtttt

SEQ ID NO: 110984 - DNA, 326 bp, Homo sapiens
gagaaatggagctttgttagataaaaattttttcaacgcaaacagtcattttccagtgaaaggagagcgtatccgccgtaggatggacttagatcgtgtaaaagctgaggccaccgaggatataacctccggggtcctttgcctccttttccttagactccctccaaactcgtgtatctttccttcagcagtactgggctccacgcgaacctagtcctttgtctttaccctattacctttcataacatcctagttgaaaagtagttattcaaccgcgtttgaaaatgagaacaggttcacagaggctaggttacttgcgaaggtcg

SEQ ID NO: 110985 - DNA, 294 bp, Homo sapiens
aggagccccagcggctctggcacttcctcctgatgtttgcaaggggaaggtaatgattctaattgcacaggacttggtcctggccttggtgatggcaggagggcagagtcctcatggtatggccaaaaaatgtttacaacttgaccttgtcctcctctgatggtgttgaccttggacaaactatgcccctctgagcctagtgcctcagtttccccctcttgcaaatgcagcaggtagtagtgcttaatctcagagttgtggggattcaatgaaacagtactgaacggggcttaa

SEQ ID NO: 110986 - DNA, 587 bp, Homo sapiens
gggggccgggcacccagactccttccatcttgtgctccctccatccctgcgccgtggcctttgtccacctggtccaccatacccacatcccctccagtcagagggaaagcaaagaagggggaaatgaaagggagggaattcccttttctctttctttttatggcaccatctggaagtttcactatcgctgtcacacatggctgcgagggagcctggggaggtgtggccttcaactgaatcatggatcctgctggcagactcagccggacaggccctacaggcagggcaggacctggcccctgcagcctgtcctctccccgcattttctgacctgcagctgtcagagggtgtcctccttgctcttccttggatgccctgagctgaattccctggacagttctctggcttgttcattctcccacttaaggtgtccactcgcgaagaggtgagtgatccagctttctcctttcgcattcgaggctatgtacttggccggggcgcagggcgcagggccctctcttactatactattcagccgggcatcctgggaaccacagagtatatagggtatctacccaggctagaac

SEQ ID NO: 110987 - DNA, 2492 bp, Homo sapiens
agcgcccaggcccgcgccccccgcgcccccgcagcaggaatggcaggaacggatccgggccgagcccgacccgggacgaggaggggctgagccgcgggggatcctggaatcggcagggaggtggggattctgggaggaaaactccatttcctccttccctgccggtttctcccctctaccctggcaccccaaatttcgatgtgccgcctgccgggcgctaagcgccggtgttgagagaggcggcggccgccgcgcccgggaaaatgctgggcatgtacgtgccggacaggttctccctgaagtcctcccgggttcaggacggcatggggctctacacggcccgcagagtgcgaaagggtgaaaagttcggaccctttgctggagagaagagaatgcctgaagacttggatgaaaatatggattacaggttgatgtgggaggttcgtgggagtaagggagaagttttgtacattttggatgctaccaacccacggcactccaactggcttcgcttcgttcatgaggcaccatctcaggagcagaagaacttggctgccattcaagaaggagaaaacattttctatttggcagttgaagatatagaaacagacacggagcttctgattggctacctggatagtgacatggaggctgaggaggaagaacagcaaattatgacagtcatcaaagaaggggaagttgaaaattctagaagacaatcaacagcgggcagaaaagatcgccttggctgtaaagaggactatgcttgtcctcaatgtgaatcgagttttaccagtgaggatattcttgctgagcatctccagacattgcaccagaaacccacagaggagaaagaatttaagtgcaagaactgtgggaagaaattcccagttaagcaggctttgcaaagacatgttcttcagtgcacagcgaaaagcagtctgaaggagtcttcgcgaagttttcagtgctctgtttgcaattcttccttcagttcagcatcgagttttgagcagcaccaggagacttgccggggggatgccaagtttgtgtgcaaggctgacagctgtggaaagaggctgaagagcaaggatgccctgaaaagacaccaggaaaatgtccacactggagatcctaagaaaaagcttatatgttcagtgtgcaataaaaagtgttcttcagcatcaagcctacaggaacatagaaagattcatgagatatttgattgtcaagaatgtatgaagaaatttatttcagctaatcagctaaaacgtcatatgatcacccactcagaaaaacgaccctataattgcgagatttgtaataagtctttcaagaggcttgatcaagtgggtgctcacaaagtaatacacagcgaagacaaaccttacaaatgcaaactttgtggaaagggatttgcccacagaaatgtttacaagaatcataagaagacccactctgaggagagaccgttccaatgtgaagaatgtaaagctttgttccggaccccattttctttacagagacacctgctaatacataacagtgagaggactttcaagtgccatcactgcgatgctacctttaagaggaaggatacattaaatgttcatgtccaggtggttcatgaaagacacaagaagtataggtgtgagctatgtaataaggcctttgttacaccttcagtgcttagaagtcataagaaaacacatacaggagaaaaggagaaaatctgtccatattgtggccagaaatttgccagcagtggtacactcagagttcatatccggagccacacaggtgagcgtccctatcaatgtccttactgtgaaaaaggattcagtaaaaatgatggactgaagatgcacattcgtactcacaccagggagaagccgtacaagtgctcagagtgcagcaaggccttcagccagaagcgaggcctggatgagcacaagaggacgcacactggagaaaagccttttcagtgtgatgtttgtgatttggcttttagcctgaagaaaatgctgattcgacacaagatgactcataatcccaatcgtcccctggcagaatgccagttttgccataagaagtttacaaggaatgactacctcaaagtgcacatggacaatatccatggtgtagctgacagctaataggggctgtaaaggaattaaactattcagaagggctcctaatatgaatcccagatttttatcacctgatcagcataacagaagtagccaaaagtgacttactggtctcatagttcttatttgcctacatttagagtctgtagatgcatatgcaaccaaaaaaaagtcttacttttaacaagaaatggtataaatggaaaaaaaatacaactccatagccttgcaaaatgcaacttgtgctctgtcttataaaaatggagaaaggagtcatggctctctttcttggccatccctctgtaatgaagtttataatatacttccctaataggccttttt

SEQ ID NO: 110988 - DNA, 931 bp, Homo sapiens
agcgcccaggcccgcgccccccgcgcccccgcagcaggaatggcaggaacggatccgggccgagcccgacccgggacgaggaggggctgagccgcgggggatcctggaatcggcagggaggtggggattctgggaggaaaactccatttcctccttccctgccggtttctcccctctaccctggcaccccaaatttcgatgtgccgcctgccgggcgctaagcgccggtgttgagagaggcggcggccgccgcgcccgggaaaatgctgggcatgtacgtgccggacaggttctccctgaagtcctcccgggttcaggacggcatggggctctacacggcccgcagagtgcgaaaggtgggtgacccggcggcggcctgcgcgcccctgcacctcgcgcgccctgtgcctcccggagtcgccctgccgcagggcccggggcgcggcgggcttcaccccggtcgcccctcgcccgggccgggccaggcgtccgtgggaaggccggggaccgcggggcacggcgggggtggcctttactcgctgcgccacccgagcaggcagcgccacgtaggtggcggcggggtgcgctccgctgccggccggtccaggggcggaactgccaccggcctccctgccgcaagatgtctttcctctctcccgcaggaagtgagcgcggcgggagcctccctcttcctcggttacgggtgtgagctgcgtctttgcgttggcgaaggcacgcgtgggcgggtgttttcccccgcgcgcacgctgctccgctgtcgcctcttttcctttaggatgaattaatgtggctagaaacgcctaactttccatgcggggatgggaggagcagcccagagcgccgctccacgcaggccgtagaatctcattcatacgcccaggatttccttccctccttctggaatgtatta

SEQ ID NO: 110989 - DNA, 668 bp, Homo sapiens
agcgcccaggcccgcgccccccgcgcccccgcagcaggaatggcaggaacggatccgggccgagcccgacccgggacgaggaggggctgagccgcgggggatcctggaatcggcagggaggtggggattctgggaggaaaactccatttcctccttccctgccggtttctcccctctaccctggcaccccaaatttcgatgtgccgcctgccgggcgctaagcgccggtgttgagagaggcggcggccgccgcgcccgggaaaatgctgggcatgtacgtgccggacaggttctccctgaagtcctcccgggttcaggacggcatggggctctacacggcccgcagagtgcgaaagggtgaaaagttcggaccctttgctggagagaagagaatgcctgaagacttggatgaaaatatggattacaggttgatgtgggaggttcgtgggagtaagggagaagttttgtacattttggatgctaccaacccacggcactccaactggcttcgcttcgttcatgaggcaccatctcaggagcagaagaacttggctgccattcaagacaagaatttgggacccgccgaatggcgaggctaaaagagctgtaacacagacaagactgagacctgctccttgcttgccacattgcgagtgaagagaaggaga

SEQ ID NO: 110990 - DNA, 2681 bp, Homo sapiens
agcgcccaggcccgcgccccccgcgcccccgcagcaggaatggcaggaacggatccgggccgagcccgacccgggacgaggaggggctgagccgcgggggatcctggaatcggcagggaggtggggattctgggaggaaaactccatttcctccttccctgccggtttctcccctctaccctggcaccccaaatttcgatgtgccgcctgccgggcgctaagcgccggtgttgagagaggcggcggccgccgcgcccgggaaaatgctgggcatgtacgtgccggacaggttctccctgaagtcctcccgggttcaggacggcatggggctctacacggcccgcagagtgcgaaagggtgaaaagttcggaccctttgctggagagaagagaatgcctgaagacttggatgaaaatatggattacaggttgatgtgggaggttcgtgggagtaagggagaagttttgtacattttggatgctaccaacccacggcactccaactggcttcgcttcgttcatgaggcaccatctcaggagcagaagaacttggctgccattcaagaaggagaaaacattttctatttggcagttgaagatatagaaacagacacggagcttctgattggctacctggatagtgacatggaggctgaggaggaagaacagcaaattatgacagtcatcaaagaaggggaagttgaaaattctagaagacaatcaacagcgggcagaaaagatcgccttggctgtaaagaggactatgcttgtcctcaatgtgaatcgagttttaccagtgaggatattcttgctgagcatctccagacattgcaccagaaacccacagaggagaaagaatttaagtgcaagaactgtgggaagaaattcccagttaagcaggctttgcaaagacatgttcttcagtgcacagcgaaaagcagtctgaaggagtcttcgcgaagttttcagtgctctgtttgcaattcttccttcagttcagcatcgagttttgagcagcaccaggagacttgccggggggatgccaagtttgtgtgcaaggctgacagctgtggaaagaggctgaagagcaaggatgccctgaaaagacaccaggaaaatgtccacactggagatcctaagaaaaagcttatatgttcagtgtgcaataaaaagtgttcttcagcatcaagcctacaggaacatagaaagattcatgagatatttgattgtcaagaatgtatgaagaaatttatttcagctaatcagctaaaacgtcatatgatcacccactcagaaaaacgaccctataattgcgagatttgtaataagtctttcaagaggcttgatcaagtgggtgctcacaaagtaatacacagcgaagacaaaccttacaaatgcaaactttgtggaaagggatttgcccacagaaatgtttacaagaatcataagaagacccactctgaggagagaccgttccaatgtgaagaatgtaaagctttgttccggaccccattttctttacagagacacctgctaatacataacagtgagaggactttcaagtgccatcactgcgatgctacctttaagaggaaggatacattaaatgttcatgtccaggtggttcatgaaagacacaagaagtataggtgtgagctatgtaataaggcctttgttacaccttcagtgcttagaagtcataagaaaacacatacaggagaaaaggagaaaatctgtccatattgtggccagaaatttgccagcagtggtacactcagagttcatatccggagccacacaggtgagcgtccctatcaatgtccttactgtgaaaaaggattcagtaaaaatgatggactgaagatgcacattcgtactcacaccagggagaagccgtacaagtgctcagagtgcagcaaggccttcagccagaagcgaggcctggatgagcacaagaggacgcacactggagaaaagccttttcagtgtgatgtttgtgatttggcttttagcctgaagaaaatgctgattcgacacaagatgactcataatcccaatcgtcccctggcagaatgccagttttgccataagaagtttacaaggaatgactacctcaaagtgcacatggacaatatccatggtgtagctgacagctaataggggctgtaaaggaattaaactattcagaagggctcctaatatgaatcccagatttttatcacctgatcagcataacagaagtagccaaaagtgacttactggtctcatagttcttatttgcctacatttagagtctgtagatgcatatgcaaccaaaaaaaagtcttacttttaacaagaaatggtataaatggaaaaaaaatacaactccatagccttgcaaaatgcaacttgtgctctgtcttataaaaatggagaaaggagtcatggctctctttcttggccatccctctgtaatgaagtttataatatacttccctaataggcctttttattttattgttattctttgtgtgtctgtgtgtctgtgtgtctgtatgtgtctgtgtgtgtgcactcacttgcaaatgccagttgttgcagctggttttaccaatttaaatagaaataaatcaagatatccaactatttctttgcagatgaggataagaataagttatcaaagtctcaagtttgatagga

SEQ ID NO: 110991 - DNA, 1273 bp, Homo sapiens
aggtcggtggggtttcatggctctttttgctgcggggaaaaaaagtatttcaattacagaaagatgccaagaatgaacttgagctactcctatttgtcagtgtagcatttcacttctctctatggtgtacttctaatttattagaaactccataaattgaagggattggaagggtgagattggaaaagtaattgggtggtgctttcacaattacatttttggtttaattttcacctagaatgattcagtttgctgttttgtaaccatttcctagtctacaaaagcaaaataagccagtcccctgatattcatggaaaaaaatgtaaagttcttctaaagaattcccatataatacatatattttaaagttcaaccatgtggaacgatatcaggtgagcgtccctatcaatgtccttactgtgaaaaaggattcagtaaaaatgatggactgaagatgcacattcgtactcacaccagggagaagccgtacaagtgctcagagtgcagcaaggccttcagccagaagcgaggcctggatgagcacaagaggacgcacactggagaaaagccttttcagtgtgatgtttgtgatttggcttttagcctgaagaaaatgctgattcgacacaagatgactcataatcccaatcgtcccctggcagaatgccagttttgccataagaagtttacaaggaatgactacctcaaagtgcacatggacaatatccatggtgtagctgacagctaataggggctgtaaaggaattaaactattcagaagggctcctaatatgaatcccagatttttatcacctgatcagcataacagaagtagccaaaagtgacttactggtctcatagttcttatttgcctacatttagagtctgtagatgcatatgcaaccaaaaaaaagtcttacttttaacaagaaatggtataaatggaaaaaaaatacaactccatagccttgcaaaatgcaacttgtgctctgtcttataaaaatggagaaaggagtcatggctctctttcttggccatccctctgtaatgaagtttataatatacttccctaataggcctttttattttattgttattctttgtgtgtctgtgtgtctgtgtgtctgtatgtgtctgtgtgtgtgcactcacttgcaaatgccagttgttgcagctggttttaccaatttaaatagaaataaatcaagatatccaactatttctttgcagatgaggataagaataagttatcaaagtctcaagtttgatagga

SEQ ID NO: 110992 - DNA, 253 bp, Homo sapiens
agggagtgcctcacatgaattggctgatgttccttgtgaatagattcaggtcctcacggttagcaatcaagggggtcaaaataaatttagaaataaattcagtcaaaaactcttttttctttttcttttttttaagagacaaattttcctgggattgggttttaatggaactgggttcagcaagtccaaattctaccctctactggctcattcagaaaaaccattttctgtttcagttttggcagttctgtaa

SEQ ID NO: 110993 - DNA, 462 bp, Homo sapiens
catactgcttccttagggaagcattttcttttctgtatgttccttatctccttttctactgttctcttgtcctcagctcaagacatctctggtcttaaagatacaagaaataaccttcctttagccccaccatatacctctctagctactgtcctgttttggacaatttgtctcccacactcctatactgtggcttctgtgcttggcttccacactcttacacttgctgcattttgccttctgctcttaccattgtactcaaattatcagtcaacaatgaactcaaaatgccatatccatagctcactacagtttcaaactcctgcgctctagtgatcctcctgactcagcctcatgaggagctaggactacagaaatgtgccaacatgcccatcttatttttaaaattatttttttagagacgagggtcttatatgttgcccaggctggaattgagcaccg

SEQ ID NO: 110994 - DNA, 259 bp, Homo sapiens
gcatctgttttcattctcatgacttctctgtgaggtagcaagtattgtacccagttttctgatagaggaaattgtggcccagagagattgttgtaccccaaagtaatgaagatgaatacagttgcagaaccaagttagaagccagatttttggagatccaaggtccagtgaacacagctgtacccccacagacacttccgaaagtgaccacagcctcttcagccagtcctgaagagtatgttcaccttcatctgtctta

SEQ ID NO: 110995 - DNA, 551 bp, Homo sapiens
actttgtgcccattaaactcagcctcggcctctggcattgcatgaatctgtactttagttagagagaggtttccttgtctcctccacagtgagcagcctcttttaggctcctcactttatgccacagcagtaatgatagaagttaatggaacaattttcatggttcattgggaagtattattgcctttattctgccaagcccagagacttcattctcattgacctctgagcctaagtgaaggctgctagcctcccctcctttaagtcccccacttgtttctggggcatgctttctgctccttgctcatcccagcccgcatcgtcattacatgcctatctgcctcctgctgcactccaagtgggggatgatctcaaagtccactcctcagccctgtgcgcttctccctcagtgtcccctcccctgctggctcagggagtcatgtcagtgcctaccactctcatgatgacacagtctctgtggtgaaaaatggctgccctctgagctctggcccttagcccccatcattccctgcactttgggcatctcccct

SEQ ID NO: 110996 - DNA, 385 bp, Homo sapiens
acaaataatagagattgcaactttgccgctaataaaacatgattcagttatttttgagactaatgaaatcttaagtagtaaataagagacaaaagtaatgatcatttaattttagtattgaaaacactgctgattctgccagtaagaaaataagctggtgtgagtaccaagaataggaaaacatttgccctggaattgtctttttgttcctttctaggaaattgtcttttattttatgaaaggaaagcagataggtcaatataattatgtctttcatggatctgggaatagatctcaatcttctttgactctttttatacttacttttcctgtttcctgaaattatttacatatgactcatttttctctttattttgaagaagat

SEQ ID NO: 110997 - DNA, 369 bp, Homo sapiens
cagttttgtcctttttgttgatttcactgtttataatgtctcccaagtgtagtgctgaagtgctgtctagctttcctaagtgcaagaaagctatgatgtgccttactgagaaaatatgtgttagataagcttaattaaggcatgagttatagtactgttggctgtgaatttaatgttaatgactcaacaatatatattaaataactgtctttaaacagaaacataaaaaacaaggttatgtaataagtggttgatgaaaatactgtcacagactctcagggactccctgtatttcccctagaagcagtggttcagtatttgataattcagtcttcataatcactttatagaacataactatgaataatg

SEQ ID NO: 110998 - DNA, 306 bp, Homo sapiens
aggccctcttccccacccactgagcatccaagtgcgggaggcctaatccatgcacctggcacttaggaagcccacagtcactgctgttactgtggttgctaccctcatctcactgggaaagaagccggctcagagagatgggatgagtcacccaaggccacatgatactgggggcagggctggcacaggaacactgggctctagggctcattctcctccctgtaccccaggatgcggccactgccctgccctcccccaacaccttttttcctccctcttacagaaaacaggcaggctctaccagtc

SEQ ID NO: 110999 - DNA, 694 bp, Homo sapiens
atgggagtctgggaggtcgaggctacagtgagccatgatcaagccactgcactccagcctgagtgacagagacactgtctcaaaaaataaaaataaaatttggtatttaaaggtaaagaattactttaccttatcttatagaaggataacagctaataaatttagaaagaatgaaggaattttaaaaatcaacactttgtgaatgccagtgacttcttcaggggagaatgatcagatggtgtaaacaccactaggtgaaaggctgatgagcaagagaccatctatggctacctaagcactccacagatcactgctaaatgcaaagggaaaaatgtacctttacagaaaagatcaaatttagcatcacaactagtgatgtttcccatgtgtgctgaggatgaagtactcacactaaaatgtttaaacggaatctattcagacacttaaaagattaaacatccggttcagaaaatcaaggcagggaacaagttaaacaataccatgagaaaacagtaagacagatgtggagtattctataactagcctgctctctttgaagaaatcagagttattaagaaaaaaacagcgtaaggactcttctagactgagattacagacataacaactgcgatgagtgaggctcaatggaactgtggttttaaaaaagagcaacactttggagacaactgggtag

SEQ ID NO: 111000 - DNA, 741 bp, Homo sapiens
gcatactcagccctcgattaggaagcctcctcactctacttccttcagaatgtctgtggagaatggggcactcttgagaacagggaggtctgcccctgcttccaaggacacaacagacccggaagcggccctcactgcccgtgatctctccactatcatggctaatggcacagctcccagggagctgaggaatcagatgggatgaaggagggtttctatttattctgcgaagagtactctagctgcagtgatccttacaggccattagaagatttttctgtaaactactgtgtctgtgcctgctggaagccaaaggagcctggcttggcttcagcctctccagccctttaaaggacagttgagacagaggccttggggacaggctgatcttctgagcattctctcactgttttgtccctctggagagacagcatctttatcagtgttgtttagataaaatcatagtaacaacacccagcagagtcctctaaagagctttatcatctgataagacttttctgtgaatgcaaaaggggttttgaatctaacggtaaataccatccacagcttagttttgtggttgttcttgttgccatttgtttcatccttatttcagaatgtattgtcttctatttatttcaaaatggaaagtctaattaatatatagtaaggtgcaaaattttatcaaacttaccagtctcttccttcatgtgttgtgaaaaagagaaggtataaatgtgg

SEQ ID NO: 111001 - DNA, 594 bp, Homo sapiens
caacaaaaaatcattttctgttgcatatcctgtgtggaggatgttgtcaacgaaagctgggtcttcatgggctcacacagaaaaaataacagactcctgtataaatatttttttcagtatcaacatagatataaacgtttagttttttccagtgattttggaaatgtaaacatcgcgtgtggagaacgcgttagcttttggaatgtgtggcaatctgtgatgcgcacagtgaagtgagtaccatgtggtcagggaactgcacgcctcccgctgggtggcagcgagtgttttcaggttttaggttgtgcctccagtggagggagagcttctgaccatgactatcaatctgaggtgtttcatcttgtcctcctccccagcccctcccccagtcccgtctatcagaatcttttacagcaggaggatgataggattcaccctacgccttcacctaaggacacagtgtgtgaaaggtgttctgcaaggcagaagctgtcggtacattgcagatagaaggaattacagctcaccgggcctctaaagttttctgcagaggcatagagctggactttattgattttccgattgtataggaaa

SEQ ID NO: 111002 - DNA, 334 bp, Homo sapiens
cctggatcgtctccagaactgctgtggctgccaagctcggtagagacgtggcgccccacccagtgtcatccgggggacttcaagctggaatgcagagcttagaaagggaggggataattatggggtgtgaggtgcattgccctctaaatctttaaacaagcaattggcagtaccccgtgaaacctttccttctcctactcggccacctcccaccaacctggcatcgttcctcccgggagctagccagcttcagaaagcacatacagcatccttgctgccaaaccacctatgtgcacacaggatttccttaatggcttaataaactgttataaag

SEQ ID NO: 111003 - DNA, 223 bp, Homo sapiens
cttagggattcaaaaaacagaacacaagtaagggagaacagaagacttagggactcatctgattttaactactggctccaccatttacttacctgtgtgatcctaggcaagtcacttactgtcggtgaaccacaatttcctcacctgtaaaatgggtgtatgatgccacgtgtgtgggcacgtgcctgtaatcccaagctactcaggaggctgagtcgggagg

SEQ ID NO: 111004 - DNA, 329 bp, Homo sapiens
cccaaatccaaaatgcttcaatgagcatttcctttgaatgtcatgttggctcagaaaattgggatttttggagcattttggctttgggatgctgaactcatctatattttatagatcttttactttagagttgagatcacctgtcagtattttagttttatattacagaggtgagtgggtaaaggattgagtgtgaagactattggtttctcttggtctccacatattgacacgtgcaagtaaagttcatggttgactttgaccgagaaatacagtccaacagatttttacaaaactaacagacaagagaaaacctatacacagatttt

SEQ ID NO: 111005 - DNA, 807 bp, Homo sapiens
cgaaacaaaaagcaagttcataccgctgcattctgttctcttgttctgacggttaattcactggacatcaaattttctttgccctagttttccccaaaagaaaacaaaagcaaaaatagttatattaatgttgaaagtgctttgaagtcacttgataaaaggtgctatgaatagcaacttactgtgttactacattgcctttttggcattggttgatttataattttggtaaaggatcctaaaaccctgtattctttttctgtgccccataatgaccaaaaaagataaagaaaatgagagtaagatcaaaagatcaaactaaaacataaacagtctccttcctgtctgctttcttacctatctgttcacactttatctctttccctttctctctctctctcacatgcgcgcgcgcgcgcgcgcacacacacacacacacacacttgccccaacactgagaaataatcttgccagaattctggtttttatagttgttgtagtccgtttctctaaaaatagtcctgttttcatatgaatctaagagaacattaccggagaaaataaagttactcatttatagttactaataataagttagtgattaacttaccacaattggataaaatataaaactattcttcagcacatttatacctaaattagtgaagtccatttgtgaagttcatttggcatctgcagttaagagttaaccatgtataaaatccctcccaaagaacataatcatcgttagaaccaaatcctcttataaagaacaaatataaaaaagttttctgtggtgaagctatt

SEQ ID NO: 111006 - DNA, 360 bp, Homo sapiens
actgcactccagcctgggagacagagtgagactccatctcaaaaacaaaaaacaataggatcattgtacccttaccagggctcctgcaagggtccccacatgccttgtccagtgaggtcctgaggtcagtagtcacagctgagcagggcacaggcacttctgagtaggaaggcacgatagtatgagagaagtttccagcattggaaactttctgcagtttacgtgacacttcagatgaactaggtgtagtttcccagaggaagtccaaattcagttctgatagcttcatcttgctctatcattacttttcaggactccttcaactcttaaactccaagaagctaaggaggagaaaatgac

SEQ ID NO: 111007 - DNA, 831 bp, Homo sapiens
tacgaggggcggaggggaccgcgtcgcggaggagatggcgcggcacgtgcggtgacggcacccgagccctgagggtcccagccccgcgctccgcgtccccgggacagcatggagcgcccggagcccgagctgatccggcagagctggcgggcagtgagccgcagcccgctggagcacggcaccgtcctgtttgccaggctgtttgccctggagcctgacctgctgcccctcttccagtacaactgccgccagttctccagcccagaggactgtctctcctcgcctgagttcctggaccacatcaggaaggtgatgctcgtgattgatgctgcagtgaccaatgtggaagacctgtcctcactggaggagtaccttgccagcctgggcaggaagcaccgggcagtgggtgtgaagctcagctccttctcgacagtgggtgagtctctgctctacatgctggagaagtgtctgggccctgccttcacaccagccacacgggctgcctggagccaactctacggggccgtagtgcaggccatgagtcgaggctgggatggcgagtaagaggcgaccccgcccggcagcccccatccatctgtgtctgtctgttggcctgtatctgttgtagcccaggctccccaagcttccctgcatcttggtccttgtccccttggccacactggagaggtgatggggcagggctgggtctcagtatcctagagtccagctgcagaaggaggtggcttttcctccaggaaggggcttctgggtgtcccctcatccccagtagcctctttcttgcgtttctttttaccttttttggcactccct

SEQ ID NO: 111008 - DNA, 506 bp, Homo sapiens
gcactttcagtaccggtaattagagacaatgtggttttggctttcggctcacagtattgcaccaggtactgtgaatactgtgatcagtaagactagtgaaccccttgactccatgaagctcaagttttagtgggaaaaacattggtttgggtgtcggaagagctgagtttaatctccagctctgtgacttacagtgactaattgcgtgaccttggacaagtcacttatataaagactctaggccagaatctcttcatacatacagcaaggctagtttttttgagtgtttttgtgagactgaaatgagcgaactgaaatgggctcatttcagtttcctcataaaatgacctgaatttttatttacatctatctcatcaactagaatgtaaatttcgtgagagtctcggtgtggtctgttttttccacttctctaaccccactcagtacctagaactcagtagacctccacaaatacttatggttcttttgctttacattcttactca

SEQ ID NO: 111009 - DNA, 301 bp, Homo sapiens
gggtagaagtgacagcatcaaagggaagcccagaatctttgtttgatggctggaggagagacttctctcttctggataagaagcagaaagcatgtgatacaggatactccagcagccatttcactaccacaagctggatcaacgtaagggtgaaattaacaagatttcaaagaaggcaaaagacagagaaataacttgggcctatggttacatcactgagctgctgcaccaagccttgcctgaagctcgtcctacttctttcacttataaaaaccaataaattcccttgattatttaatcc

SEQ ID NO: 111010 - DNA, 458 bp, Homo sapiens
cagggctgccctcactcctccctccagtctgccaatgtgatacctgcagtttaagactatgagagaaaggcatagagaatcacagacaaactgaccctgagcagtgatattatttgagtcactaaactaatacccataatgaccttatatccagaaatattgtagtgtgtgtgggaggaaaaatccctatttgtaatcactttatttcttacactgttagtcagttttctgttatttgcaggcaaaaaaaaaaaaaattcctaattgattcagcagaggaggcagatcaaatgagtagccatcaactcttaaaaaggttgtttttttgttttgtttcgttttttgggggacagcgtagctttgaaaaacctgagtgaaactaaatattcttctgaaggtaaaaccaatatagcatatcatggagcctcataatttatttcaaattttatgcctgaaac

SEQ ID NO: 111011 - DNA, 153 bp, Homo sapiens
ccaaggtccaggggcccatatctggcaatgggcttcctgctgagtcactccatggtggaaggcagaagggcaaaggagcacaagagacagtgaaagagaggaataggctgaactcatccttcttatcaggatcccactcctaagataacccac

SEQ ID NO: 111012 - DNA, 744 bp, Homo sapiens
ccagtatatcaatttttctccttaaaggcttatgcttttttagttcttctgtatggagaaagatatggatcgaggttcttaattttgatgaatggatgccccatttttttctgcaccatttgttgaaagactctcttctccattgagttgattggcatatttgtaaaaatcctgattactattaatatatatgtgtgagtttatttctggactgtgttccattgactcttaagtgtctgactttttgccaataccacgctgtcttaaaaattgtaaataggtaaatcatgaaatcaggtagcatcagctcttcaatttggtactttttttccaaaattgttttgacttctaggtgttctctttttccatgtaaattttagagtcagcttgtcagtttctatgaaacttgctggaattttgacagcattgcattgaatgtgtagatcagtactcttcaataggattatctgtaatgatggaaatgttgtgtatttacactgtccagtgtgtggtagtcactagctgtctatggctattgactacataaaatgttgcttgtgtaattggagaaatgaattttaaagtttatttcattttaatttatttaaattcaaatgtagacacatgtcactagtggctattgtattggacaacataacatagattattttgggcacaattatatattattttgacttcttaaagtcagtattgagttttaaagcccacacatgtggtatatct

SEQ ID NO: 111013 - DNA, 288 bp, Homo sapiens
cttggggtactctttcctctcagttttaaactttttagtcaactctaagaatctaggaatctcagtattgaaagcgaccttaggtgccacccatgcccatctcaaaggcgagggggtagactaatcttatctacctttactgtggtattcccagcatgtaactgagtggagtgtggtaggaggtgcaaaaaatacttgcggaatgagtgagtccctgtaaatagcagcagcttcacaagaccactgtcattgcctcatttgttcatttttttgacgaatattagtaag

SEQ ID NO: 111014 - DNA, 732 bp, Homo sapiens
caagcttccagaggcagctaccacaaggcccccttcactgtggcttcacttctagctatagcaaaggtctgcctctgaagcttgaaacacaggctcccaggtgagcacttcctgctggcttccagcatctgcttttcatctgcctataagtaggtttcacgttgctgtttatagttcttgctacaaggacagttcctgggcaaggaagcagaagcctgcggtgcttgggagaaggcagaagtgtgatgatggaagaggaagaacaatagtaacagctcacactagtgcagcccttcctagtctgcatctcaagtctggtgatttgagtaatagcctggccataggatccacattttgttaaggaagtggaagtgaagaatgttcatgcggtttccttaatgttgcacagcagttagcaatagaggaagaattataatacacaaggtgtatgtgtgtgttatgtgtgtgtgtgacacagagagatacttttaagacctcttcaaaaatgttagtccaggccaggtgcaatggctcacgcctgtaatcccagcactctgggagactgatgcgggaggatcacctgaggtcaggagttcgagaccagcctggccaaaatggcgaaacccctgcctctacaaaaaatacaaaagttagttgggcgtgctggtgcatgcctataatcccagctacttgggaggccaaggcaggagaatctcttgaactgaggaggct

SEQ ID NO: 111015 - DNA, 170 bp, Homo sapiens
tccttgggaattcaaatttgaactgtccctggggacagcttatagggctgatgttgagggagcactggatgtccccaaggacatcacacctggggatggccatggcaccctgagtctgtggttagggaggagggctccttagaggcggaccaagatgcctgggggaatac

SEQ ID NO: 111016 - DNA, 353 bp, Homo sapiens
taggggcaggatctcactctgtcacccaggctggagtgcagtaatcgtagctcactgcagccttgacctcctgggctcaagtcatcctcctgcctcagcctcctgagtagctgggactatgggcatgtaccaccatgcctggctaattttctttaatttttttttttttttttttggtagaggtggggtcttgctatgtcacccaggctggtctcaaactcctggcctcaagtgatcctcgtgctttggcctgcctaaatgctgggttaaaggtgtgagtcatcatgcctggccctcaatgactttcctagacctaaagttactttattattaattgtaactttgtaatggat

SEQ ID NO: 111017 - DNA, 488 bp, Homo sapiens
ctgagccctccagagcgagagaggagaatcaaggcccacctgggaaagggagcccccctgtgtgactggaatgtatggacagccctggaaacatatctacaggtactgagcagaaattctgggagaaggggatgaccagacccctcagtcatgtagcgacctggatcccagtagctctccacctccttcgccactccaccagcctggacctccacctcccctggaaatgagagagactgggccgcagggtggtgcttcttgggttacacccctctaaggcagagagaatggcacctgtctcactcaccttctgattttgcaatgtaagaggaaatgaaaaatattatgaaaaaaatagaaatatagcatattattcaagggcagaaactctgttagacattcctgcagctgaatcacagctcttgccctcattggttttgttcttggtctcctaataagtgttccataaatggtcattgctttgttta

SEQ ID NO: 111018 - DNA, 1324 bp, Homo sapiens
  misc_feature (1250)..(1250): n is a, c, g, or t
  misc_feature (1270)..(1270): n is a, c, g, or t
gtccaagatggctattaaaaaataaggattattatgatgtctggaaagtatagtattggaggttcgcagcttttagaatctcaataggccagatatgtaggaagtgagggtttctcatctcagtcaggcccaaacctgtcctgatgctgaggaaaacacttgagatctgggaagacaattgtttaaagatactaatagtggacatttattgagtatttacctctattcagacattaggtttcccctgagcacccccactagattcagggggtgttgttttgtggccaagaggaggaatgagccaacaagattgcattattgtgcaggggcagagtggggagataggggcacatacccaggatgaaggtaacgattgaggggaggtgatcatgtgaatgaaatatatttaagaacgcacatgtcacgtcacttttgcaaacttgacacctcattctgttccttctttcccttttcagctccaagaggccttcgggtgggagccattcacccagctctttgctgagtaccagaccctctctcacctccccaaagacaacactggcaggatgaatctatgggtgaagaagttctctgaaaaagtgaagaagaatctggttcccttctttgaggcctggggctggcctatccagaaggaggtggctgacagcctggcctccctaccagagtggcaggaaaaccccatgcaagtgtacctccgtgccaggaagtaaaggatgccccacaaggcgggagagaaaaggcagggtcacgccatcaactccaccatggggctttggccgtgtgctcagtatctggagcctgaatcccgcttccaagcctgaccactagatggtggccacggtcataagaaaaaatggaacccctttctgtaaaaggtgccttgtgcttctttttattgtttttctgcctacgctattgctttccccaagagactcacttcacctcttagtcttccagagaggatctttcatcctgccatcctgaggcttctatttttgaccaatagctctaaagaccacgggttcccataacaacctgatatccctttctcatccctgccatccctgaataaggcttctaatttattatgctttaacaagttttcaaatagcaagcgagacacgctggaatagtggagagagccccaaaccagctttggttctatggaaaatcactccacctctctgtgtttctgtcttcacatccatgacatgaggatacaaatcttntcctcacaaagctgttgttngatttctcctggtcccatagtggactgttaacggtgtccagtctgcgtgcgatg

SEQ ID NO: 111019 - DNA, 1306 bp, Homo sapiens
gtccaagatggctattaaaaaataaggattattatgatgtctggaaagtatagtattggaggttcgcagcttttagaatctcaataggccagatatgtaggaagtgagggtttctcatctcagtcaggcccaaacctgtcctgatgctgaggaaaacacttgagatctgggaagacaattgtttaaagatactaatagtggacatttattgagtatttacctctattcagacattaggtttcccctgagcacccccactagattcagggggtgttgttttgtggccaagaggaggaatgagccaacaagattgcattattgtgcaggggcagagtggggagataggggcacatacccaggatgaaggtaacgattgaggggaggtgatcatgtgaatgaaatatatttaagaacgcacatgtcacgtcacttttgcaaacttgacacctcattctgttccttctttcccttttcagctccaagaggccttcgggtgggagccattcacccagctctttgctgagtaccagaccctctctcacctccccaaagacaacactggcaggatgaatctatgggtgaagaagttctctgaaaaagtgaagaagaatctggttcccttctttgaggcctggggctggcctatccagaaggaggtggctgacagcctggcctccctaccagagtggcaggaaaaccccatgcaagtgtacctccgtgccaggaagtaaaggatgccccacaaggcgggagagaaaaggcagggtcacgccatcaactccaccatggggctttggccgtgtgctcagtatctggagcctgaatcccgcttccaagcctgaccactagatggtggccacggtcataagaaaaaatggaacccctttctgtaaaaggtgccttgtgcttctttttattgtttttctgcctacgctattgctttccccaagagactcacttcacctcttagtcttccagagaggatctttcatcctgccatcctgaggcttctatttttgaccaatagctctaaagaccacgggttcccataacaacctgatatccctttctcatccctgccatccctgaataaggcttctaatttattatgctttaacaagttttcaaatagcaagcgagacacgctggaatagtggagagagccccaaaccagctttggttctatggaaaatcactccacctctctgtgtttctgtcttcacatccatgacatgaggatacaaatcttaaaatcaaacctcccgtatctgcatttaattgtatgtaaaagcttccctccacctac

SEQ ID NO: 111020 - DNA, 950 bp, Homo sapiens
  misc_feature (876)..(876): n is a, c, g, or t
  misc_feature (896)..(896): n is a, c, g, or t
ctgagccctccagagcgagagaggagaatcaaggcccacctgggaaagggagcccccctgtgtgactggaatgtatggacagccctggaaacatatctacagctccaagaggccttcgggtgggagccattcacccagctctttgctgagtaccagaccctctctcacctccccaaagacaacactggcaggatgaatctatgggtgaagaagttctctgaaaaagtgaagaagaatctggttcccttctttgaggcctggggctggcctatccagaaggaggtggctgacagcctggcctccctaccagagtggcaggaaaaccccatgcaagtgtacctccgtgccaggaagtaaaggatgccccacaaggcgggagagaaaaggcagggtcacgccatcaactccaccatggggctttggccgtgtgctcagtatctggagcctgaatcccgcttccaagcctgaccactagatggtggccacggtcataagaaaaaatggaacccctttctgtaaaaggtgccttgtgcttctttttattgtttttctgcctacgctattgctttccccaagagactcacttcacctcttagtcttccagagaggatctttcatcctgccatcctgaggcttctatttttgaccaatagctctaaagaccacgggttcccataacaacctgatatccctttctcatccctgccatccctgaataaggcttctaatttattatgctttaacaagttttcaaatagcaagcgagacacgctggaatagtggagagagccccaaaccagctttggttctatggaaaatcactccacctctctgtgtttctgtcttcacatccatgacatgaggatacaaatcttntcctcacaaagctgttgttngatttctcctggtcccatagtggactgttaacggtgtccagtctgcgtgcgatg

SEQ ID NO: 111021 - DNA, 455 bp, Homo sapiens
tgctccctaaatttatgacctcacatgcaaaatacatgcttaccatcctaacatcaccaaaagtcttgacttgtttcagcatactctgaagcttaatatcaaagtcgcttccaggtcaccagagataacatggccaaaaccattgcaagatgtgtttgatgattcaaagagaaagaaaaaacagcttttcctatgacaacgtttccaactaaagcatctgcaattatgaagactgaaacttcagcagggtgcggtggctcacgcctataatcccagcactttgggaggccaaggtgggcagatcatcagagatcaggagttcaagaccagcctggccaacatgatgaaaccctgtctctgctacaaatacaaaatttagctggggatggtggtgtgcgcctgtaatcccagctatttgggaggctgaggcaggagaatcgcttgaacctgggagg

SEQ ID NO: 111022 - DNA, 454 bp, Homo sapiens
cccagccatggcctcagggctgagtctgatgggtatcagggaaggctgctgcttgaacaagtgactgtgacctgagtgtgcaggaggcagacaggagcctgggtggggtgggaagccacctgctcttattcgtgcaggctcctctcacatctctctaaggatgcttatgagagcatttgagaaattctctcctgtttcctgcactggctctgtttccctgggtgccatttgtcgtggtgcccctctttcaggctgctgattttctttatccactgtgatcttcactgatctgcttatgagcaaagattcctatcagtggtttccaaacccagccaaatatcagaagcatgtggggagcctgttaaaaatacacagattcctagaatcttcttctggagactctagtttaataggtctggggtggagcctgagaatatgaacacttaagaagcca

SEQ ID NO: 111023 - DNA, 950 bp, Homo sapiens
tatgatgttttgtttttttaaatgttttaaaagcttaataggttggcatcagttgtagcccacaaacatggctagggctttggggatttggcatttttctggtggtttacaagacttactccgaatacaagaggaaaagctttaaaaacaagattgcatcataacccccaggagcaaagcaacctggaggctgcatatccatgggcgggcagcataagagaatgtgaagcccttcagtgagacgagacgagcaatgggaaaccttttctgttcttaagaagtgactttaattttattgacatatgtactgtatgttactgagattgaatgttaggggaagccttaaggtagaggtatttgggaaagtagccagtgggcacttgtgatatctaaaatctgttatcccaggactgtgtacagaggggcaacctacccattcaggaaggtcagggctttggaaccctaaaaagttggcccgatgacttaaagggaaaaataattcattcccagagatgagtcagaacagtctcctcaatcctgaaattcaacaaggcatcagaagggctggctgtggtcaagcccagctgctgtcatgtgaggagatgctcactgtggtcttgttgagctgatggccttggttgagctgatggacaagtgaaggaggccatggggctgtgctgtccttcctgccgtacgtgccattccactctcttcagctctcccctcaacagcatgcgagcccataccttctgcatttttccaggcctgtgagggatataggcctccccttggagcactgagtccggaggtcatccctgagctcatccacggctcatgctgtggctccgagtagtggtttgagtgggcaggaagggccatttgcaaacactgctgtgttctagacaaacaacccaagtcctatggcaggatttcttccttccttccttttt

SEQ ID NO: 111024 - DNA, 334 bp, Homo sapiens
agtgcagtggcgtgatctcagttcactgtaacttccgactccttggttcaagtaattctcctccctcagcctcctgagtagctgggattataggcatgcaccaccatgcgcagctaatttttatatttttggtagagacagggtttcaccatgttggccaggatggtcttgatctcctgacctcatgatccgcccacctcggcctcccaaagtgctgggattacaggcatgagccactatgcctggcctgatggtcatactttttaaaggcttcatgaggaatttccctaatttcttagaatactgctttggtcatctccacaattatggtagg

SEQ ID NO: 111025 - DNA, 207 bp, Homo sapiens
gggattacaggcttgagccaccatgcctggccatcataatgctttatttattctgtcctgtgcatcatggcatggttccctcagattccactcaaaaatcagggtaattcagcaaactcgtattagcatcttctttggcagtggttctcacacttgagtgtgtatcaaaagcatctggagagcgtgttaaaacacagattgctgccg

SEQ ID NO: 111026 - DNA, 410 bp, Homo sapiens
atcatgagtttcttaataacaaacattgagaagaaagttagaaaaataccatcgaaatgtttgatgggattctaaatatttgcaggccctgtttttatcaaagttcacatttttcaataaatcttttttttaattcagttttttttttctttcaactattgcttttgggacttaatagatttacctaattcttgcaaagcttgatcatgatatttcacttctttctatttaagacttcataaaaaattgagatgttgtagtggacaataattatcgtagataataaaacagagaccgtgttggctgttcaccaaactgggttcctcttcttcctggacacctacatggtttccaaggaacggttccaattagaagtggccatgagactgagtcctggtgcatggaatgtg

SEQ ID NO: 111027 - DNA, 502 bp, Homo sapiens
taacagagtgagactcatctcaaaaaaaaagattaatatatgaaagtagtacttgagataagaaaaaattttttaaataaaaaagacaaatatgattgctatatttcaaacagttcttagtatatagttcttgatatataattcttagtatatactaagtatagctcttagcagaatgcctggcacatggcaggtgtgcaagaaatgtcagatattgcaacaagtattatcagttgtagcaataaatatgactaacttcaatgtattttagaattttgagttatatatatattttttaatatgggttcttactctgttgtccaggccgtagtacagtggtgtgatcatggctcactacagcctcaacctccctgggctcaggtgatcttttcacctcagcttctccagaggctgaggcaagaggatgacttgagcccaacaaggttgaggctgcagtgagctctgatcacaccactgcactccagcctaggtgacagagtga

SEQ ID NO: 111028 - DNA, 759 bp, Homo sapiens
caacgagagacacctccacgggcctaggagcccagcccatgtgctcagtcaccccctttagctggcctttcgcccagcagagccttctcttcctgctactgaccaaccttggggattgggccatttgcttcgcagacagttcgcgccttcctattttgtctagttgctttcctattgtgtcgtgtagcttgttctctattttataggtcatttaaaataaaactcacctttgactttgtttagtctctgttacatgtttgctttttgtttcgtttatgtttgtacatttctcatgtttttcttctattcttttggttgtattctaacttttagagtctctttattgggatgtcttctagcgataaatataaatacatttccctctaacaaccactttacctggatctcccaccttgctgtatagcatctctgtcatttccaattttgaatattcgaaattcctactctggtttccctcctccctcatccttagaaatgcatttcttaattcccagattgaaggctgtgttttctggtcaccatcctcccatctgaactgcactgtcacttcagaaggtgactctcacagtttttaggcgtgtggtgtagttgtctgtgtgatcaagtttggatgactgttgttccctgggagcttgaaaaatggattgcgtgattattgtgttattttctatgtgattattggatgattttatatgtttagctccagcttggtcttgctttcagatcttctgtcttgta

SEQ ID NO: 111029 - DNA, 388 bp, Homo sapiens
acggactcaactttgccgttgtggagtgggagtagccatagacaaaacataagtgcatgggcctggctgtgttccagtaaaaattttatttacaaaaacaggacatttatgaaaacaggacatgggcttggatttgttttatcaggccatagtgtaccgacccctggtctgcacagaaggactctaatgtcagcaaccatagggacttgtacttcgtactgctgtgacacccatagggatacctcttgccttgtttctgaggaagttaataaaaaggtcaggctcgttcaccttaatttcagtctacccccacagttctaataaaaaatgttctgatcaaaatggctctttggacaacaaaacagcaaaacagtctccagcctctcct

SEQ ID NO: 111030 - DNA, 210 bp, Homo sapiens
atccagccacctcggcctcccaaagtgctgggattacaggtgtgagccaccgtgcccggccttccaagttctttatcaggtatatgatagcacatgtagctttttatcttccttacaccagtgcaagtttatagaaaggaaaagggatagttaatagtaatcataataatgtttaatatttgaatgttttttaggagctggtatactgct

SEQ ID NO: 111031 - DNA, 784 bp, Homo sapiens
atcccaaagcttccaaaaatagtgttagaactaataaattaattcagtaaagttgcaggatataaaaccaacatacaaaaatcagtagcatttttatacacaaataataacctagctgaaaaagaaatcaagaaaacaatatcatttatgatagcatcaaaaaatactctggaataaatttaaccaaagaggtgaaaaatttgtatactgaaaactataaaatcttgctgaaggaaattgaaaaagacacaaataaatggaacatataaataaatggaaagatatcctgtggatggaattaatattgttaaaatggccatactacccaaagcaatatacaaattcaacataattcctatcaaaattctaacggcattcttcacagaaatagaaaaaacaatcagtattgaaaagaaaaataaagttgaaggcatcacactttctgatttcaaatgatattacaaagctgcagtaatcaaaacggtatgatactggcataaaaacacaaatatagaccgatggaacataaaagagagccaagaaataaatccaaacatatagggtcaactaattttctacaagatcaccaagaggacacaatggggaaaggatagtcttcaataatgatgctgggaaaaatggattctcaaatgcaaaagagtgaaattggaccctgatcttacaccatacacaaaaatcaattccaaatggataagatacctaaatgtaaggcccaaaactgtaaaattcctagaagagaacatagaataaaagctccttgaca

SEQ ID NO: 111032 - DNA, 203 bp, Homo sapiens
gtaactgttcactaatggtcagggattgaaaagcatctttcatattttactgacaggtcaaaaaagagaaaattagctctgacttaatgcagaccaggtcaatttggtcaaagagaattttatagacgagctttggttccaccattgcaaaacaatattccgttaccagcagtattagtaggattcaggattacactgaaagc

SEQ ID NO: 111033 - DNA, 266 bp, Homo sapiens
agccagtaattaaatataaaagtggtacaagagtgacgatgccttaaaatgcctaagaatgcctaaaaagcagcaaatacaaagcttcttgggagaacccatcttgatcttaggatttagaaaattcctaaacataaagctgtaagaaatatgaactcacattcacaaaatgcagaaagaaataagatgcaatgaatgagaggaagcagaaacaataaagagcagaatcagaacctgcaaagagttcacatattggagttagcaga

SEQ ID NO: 111034 - DNA, 487 bp, Homo sapiens
aagagtgtacaataaaagtgtccctccttccccagaagcaaacacagttgccagttttttcgatccttcaagaaaatattctagacatatacagacaatcttcacctctcccctcactttacaccttgcttttccactttgtgatagaccttagagattaagaaaacatgcctgttgcatggcaagagtgatgccatcttgatgcaaaaccactatgaccaccaatatctgactcccgcatcccaaagtgttgggtagcataaataattccacacaaagatgtctaccaagcctccccaccagctagtgctcataagtttcacaagaaagtataatgtgtgaccagctgcatgtttaaccaaaaaagcctctatagaaagcatactttctggagggtaagtgcagggatccaccatcttgcagccacccaagacatcatttctgttcctaagtccctattaaatgtttacttctgagaaactgaatt

SEQ ID NO: 111035 - DNA, 748 bp, Homo sapiens
atttgggggccacagctaaggctgggtttactgtgagccgaggaaaagaagtgaatggcctgagatgtgtaaagggcttgaataggcaccgctgatccattcccaccttcagggacaaagaggctctggagggtttgtgagtcccataggttttggacatttgtagttcctcttccccttttgtgaaatgtagaatagtgctgtccttttgccccttctgctcatctgctcctagctgtactgtcaccctgtctttaggggagaagtctcatgtttatagtgcctgtgaggtcagggaaggcactgtcaatgctgttttgaaactttgtttccccactgttcagctcacaaaagtattttatcaccctcacgcccctgccctcacccagaagcacaaagtgaaatctgcccccggcagcttcccaagctgtgacccacagcaggttcctagttgttgttttggaccaggctgctggtcatggcccttgtccaactttctgagatctcaaaaagcagcagcccaagccagggcgagtggccgtgggagggttttttggtgtttccccttccctcaacttttagttttgaaaaagtgaaatctgcagtaaagttgctagaataatgcaacaaatacctgtacacctcacctggatcccacagttgttagttcttcagcacatttgcattctccctttctgtgtgggcatcacagatacaacaaagttagtatagcgggtgagtaggaaaa

SEQ ID NO: 111036 - DNA, 340 bp, Homo sapiens
acccagacaaaaatataatactaaagtccctttcaggctctgatattctgattctattaagcatagtagtaactggacactgagaattacaaaaacattagaaatgtagaacataaataggcactctgacttatgaatttctagctaaagtacaccaaacagggaaacaaaataccaaaaacacaatcaagaaagagtggacattcacctaagctacctgcattaatagcatggaccaggaaccaagagcttgcaacagaagatggatacctcaaaggaatactggtttctctcctgggttcctcagcggccaaacttactctgtgaccttggctggcaa

SEQ ID NO: 111037 - DNA, 306 bp, Homo sapiens
gtctcaacaggatcccgtgcaggctgggaacgcagtgtagagcaggtctcctgtttcttagtaccttgtgtacctctctgttagaccatcctgcctcttccccacctttcactttattctaacagttctgcttattctgttctcacccaagacatttgagtaaaatatggaacttgacccatattcactactgtaatcacagcactttagaaggccaaggagggtggatcacttgacatcgggagttcgagaccagcctggcgaatgtggtgaaaccccatctctactaaaaatacaagattagcc

SEQ ID NO: 111038 - DNA, 506 bp, Homo sapiens
gaatgaggaagttgaacactctgagtgatacaaaaaatagtaacatgtggtccctgccctttactaaacatagaaagttagaagtgcctatctttggaaatacccggttattataatatcagatctagagaaccatgaaaaagcttcctccagagaaagtctcttaaaattgaacaaaatctaaaaggtgaaatagcagttaattattcccaacattataccaaagcagagagtgattactgagtctgttccagaaatccccaggatgacttgagtttgggtaagctgggcctagcctaaggctagagagaaataacagaaagatggtaaattcattcttccagcacaatacagttgctcagtaagtaagtgatactgttgtttgatgaatggtagagttttctttttcctgtttctggaatgttttatagaatacatttcaaaacatagatgattccaattgctagctggataaagatagtaaatattgacccttgcaatcaagt

SEQ ID NO: 111039 - DNA, 386 bp, Homo sapiens
ttaagaattccaaaggatgggcaattacatgaggcctatagttatgaaatgattgactagaaaactaaatacagcctgccaaatgccgcttgtttaagaaatcattttccgtatgctgacatttcacaagcatcacatgaaaatgattttactaggcaaatatatacacacgtatgtatctgactccagagtagaaaaagaaaatctaaaccaccaaactctttttaaaagtctatttcattttgacatcactttccattttgagcagaaaaacaggacatgttgtcccttgataaatcaaaacctcaataggcaaagtcaggaagagagacttaaaaagcagctttagaaaaaatgtcactgtttatatttctatcaaaacaaca

SEQ ID NO: 111040 - DNA, 462 bp, Homo sapiens
gtattctttcctctgtcttcaatttttctgtttatacttctgtggaaatcctatccatccttaaaccttaaaatgtggagagtgtgtccttaagactgcatataatgactatagcagttcaagtctctttgatgttgactaactgatattgaggaaatatgtcaattctgtgggattcaggtactcctctgtaattgggagtaaagggagaagaggataatactttccctgcctctgtcatatctatcatagaataattaaaatgagcaaaaactttaaatgagatgaatatgtaaaagcaagagtaaaagctaacatgctatgcacagtagaaagccttactatgatcatcctctttactgttacatattcaccacatgcagatgaggcttcctcctgggattccacttattttcatcactattatggtcaatactatgacttatctttcagaattagtta

SEQ ID NO: 111041 - DNA, 365 bp, Homo sapiens
ccagtcctcaattctagaagtaactagtgcttttattgagtattctttgtaatttattaaatattgacttctattctctttttaatctaaattttattatctagacatataaagagtcaattcagtttcacaaagcttgttttgaaaaaacagtcgtcccctggtgctgtccctgtgccctgctgccaacaccatttgctgctcctcagaggagcggatttcaactcttaggtgttttggtttttatttccatgttgataacagttttatatttctacttcctgttttccattttaaacattatcttctgattttctacttcagagaacaaagaattagttttttaaaatccccttccctgcccc

SEQ ID NO: 111042 - DNA, 112 bp, Homo sapiens
catggaagtttctgcttgaaaatttttatttcctgggttgtatggtgagtccgttttcagtttcagaaggaactacaaaatgatcttccccattttatattcctactaacaa

SEQ ID NO: 111043 - DNA, 464 bp, Homo sapiens
gtatgtgatttctggctagtaagctacaccgaatcttggctagcacagttgaattccatgtcagatttgtaaacgcaaatttgctctctgcatttaaatatattagatatatttaggtaactacatttaaatgtattgagacatttaaataaatttgccgtctgtatctaaatatctgaagtggaccaggtgcggtggctcacacctataatcccatcactttgggaggccaaggcaagtggatcatgaggtcaggagttcacgaccagcctggccaacatggtgaaatcccatttctactaaaaatacaaaaattagctgggcgtggtggcaggcgcctgtaatcctagctacttgggaggctgaggcaggagaatcgctggaacccaggagacagaggttgcagtgagctgagattgcaccactgcagtctagcctgggtgacacagcaagactccatctca

SEQ ID NO: 111044 - DNA, 151 bp, Homo sapiens
ggtgtgggcttctaccaggggaagtgttttacagatcagagcatgctgttacacagaattagagcacttcttcacactgatgagatgggcatgacacaatggccatgattaactcaacttcatttacttttcatgatgttaattttcaata

SEQ ID NO: 111045 - DNA, 671 bp, Homo sapiens
gaaaaaaacaaacaaccccatcaaaaagtgggcgaaggacatgaacagacacttctcaaaagaagacatttatgcagccaaaagacacatgaaaaaatgctcatcatcactggccatcagagaaatgcaaatcaaaaccacaatgagataccatctcacaccagttagaatggcaatcattaaaaagtcaggaaacaacaggtgctggagaggatgtggagaaataggaacacttttacactgttggtgggactgtaaactagttcaaccattgtggaagtcagtgtggcgattcctcagggatctagaactggaaataccatttgacccagccatcccattactgggtatatacccaaaggactataaatcatgctgctataaaggaatttagtatcttctaatcccttctctgattacctaatttaaattttcaatatccctgaaactctccttcttctcattcttctttttctccgcaactctgatcatcatccaaaacactacagttggccctccaaatccatgtgttctgcatccgtggattcaatcaactacagctggaaaatatacaaaaccaaaatgtgtctgtaccccacatgcccagacttttatttcttggcattaatctctaaacagtacaacagctatttatagagcatttacattgt

SEQ ID NO: 111046 - DNA, 552 bp, Homo sapiens
ttctctgttgcttgaactagggtacatgaatctcaatgtaatatagggatgtagaaaagtataagagaagccccagaataatcaatagacctctagtaagatagtcacattgctcaatatgcaaaggtgacaaatactctaagatactcactacatgttaaaaataaatacagatatattgttcagagatgtattcatcaactacttaactatgtatctacccatgcatttaataactgtgagcatcataccaggcctccattctcatggagtttgtattctactggtagaggcagataataaagagatgagaaattcaaagtaatttaaaaaataacacaggaaaggtcatagacattttggtctggggaggagatggcactatgtaggctgattacctgtgagggtgcactcactcacctcttgtacttgtgaagaacatactgaaatgtacagggtgtttgggaggaaaataatgagatgcacagggcagtacttaatgtgaagacctcaccatagagacaggaattaagtcacctggagccaagagaa

SEQ ID NO: 111047 - DNA, 251 bp, Homo sapiens
attgcactccagcctgggcaacaagagcaaaaccccgtctcaggaaaaaaaaaaaaaaaaaaaaaaaaaaaagctggcacagtggcacacgcctgtattcccagctgctagggaggctgaggcaggaggatcacttcagcataggtgttccaggacacagtgcactacgatagtgtctgtgaacagccattgctctccagactgggaaacatagcaagatccccatctcaaaaaacaaacaaatatattgt

SEQ ID NO: 111048 - DNA, 321 bp, Homo sapiens
aaagctcggtaccctgtgctctgaacttagccctggctgaacttaggcctggctctaaagatgtttgctgttatttctacaactcgaatgccgtggtttgcaacaaggggcagatgttttattttgcaatgtctggaaactttatttttttgatggagtttcactctcgttccccaggctggagtgcaatggagcgatcttggctcactgcaacctctgcctcctgggttcaagcgattctcccgcctcagcctcccaaatagctgggattacaggcgtgcaccaccacgcccggctaatgttgtacttttagtagagaca

SEQ ID NO: 111049 - DNA, 641 bp, Homo sapiens
gtttgctatttctgtttccttcaaagatttatgtaaatatgttaagaaacaaagtagacagaggagcttataaatgaaaagcaggagtctcccatgcaatttttcacccttcattgaactgtttctgttttctgttctttaggtggttgctgaacatttgacttaaagaaattgctctttattttattatctcgttcctagcagttataagtggaacttcttatcctatagttgccatgagttttcgtttctacacatgattcatgtttgttgggcagtttttttggtgtgtgtttgataatgtttaagccttaaatgatttatatgtattagaagattagtacttttaaaagcaaaccttgaatgacttgaaaggccaccattgcattagttatttattgctgtgtaacaaattatcccaaattggccaggcatggtggctcatgcctgtaatcccagtactttgggaggccaacgtgggcggatcacctgaggtcgggagttcaagaccagtctgatcaacatggagaaaccttgtctccactaaaactacaaaattaaccatgcgtggtggcacgtgcctgtaatcccagctactcaggaggctgaggcaggagaattgcttgaacctgggagacaga

SEQ ID NO: 111050 - DNA, 300 bp, Homo sapiens
tccacattcaaagcaatgtgggtctgataatcagtgtatttaaacatttcaatagttttctttcacctgaaatttaatattgtagcaattactgaatttaggaaaattggtaggtagttgctatcagcaccgttactacgggaatacattagaatgattagcttttaggtgaaattgaattttttctttagtttccatagtgactgaaaacgatttaggtcagcttcacctgttgtgcccctcccccttttcaaaataagaggaacatttaatttagcacaatgatgttaattttttcct

SEQ ID NO: 111051 - DNA, 378 bp, Homo sapiens
tcttaaagttatatatgaaaactctttgaatttttctctgggacgcttattaaagaaactgcatcatattgctgttgtgtattgcggtgaagataggaaaatgcgggggataaacaggaagcatctttcaagatcatcaattactagaactttttgtggaaggaaggaccattattgatatatgaaaataaataaattatagaacatgagtaaaaatttgcattaaggtgaggtaataaatatgtgattgtgttcatttttgaatcttttgctcttgacttatacgtgtcttgaatactatgcagttctttttttttatactttaagttctagggtacatgtgcacagcatgcaggtttgttgcataggtatatatgt

SEQ ID NO: 111052 - DNA, 601 bp, Homo sapiens
ttttgccacatttaaagacaaatccagacaatttgtgtttcaggttatcaacagtaaaaaatccaagaggcctagcaaaaatcaagattcacttcacaaatagggcattcaacagatgaggtgccaggcacagtggctcatgcctgtaatcccagcactttgggaggctgaggcaggtggactgtttgagcccaagagtttgagaccagcctgggcaacatggcgaaactctgtgtctacaaaaaatacaaaaattagccaggtgtggtggcgggcatctgtagtcccaattactcgggaggctgcagcaggagaatggcatgaacccgggaggcggatcttgcattgagccaagatcacgccactgcactccagcctgggcgacagaatgagactccatctcaaaaaaaaagaagaaaccaaggatatagaataaaacaagagtgtagatttgggcattgaggccttcaaattggattgttctcaatgtccagaagaaaaaaaaaaatttagaagagacccaaatcagaaaacaaaagttgggctgaattcaatgcgaattaatttctagctcaatattaatactgcttatgtcagctga

SEQ ID NO: 111053 - DNA, 482 bp, Homo sapiens
gctatccctgctttgaatgttgatttattttataccacttaaaattattatataagcttcaagattgcaaagggcagtcttagttatttcagtaggagtttgaaacctgattgcagctgcaggtcccacacaactgaattcggtttcttgtgcacagcagtgttctctggaggtgcctggaggtctgaaggtgtgcccttttatagacaggaattccaccatgatgggtagagcttgttttttaaaaaggcttgggactagatacgattgcccaagaagacagtgtagacagcgaggagggctgagcatgaatgggatgagcctccagcacagaaagggcaggcaggaaggcagtaaagaaacaagcagggcacaaaccaggagagtatggcatgccatgatggagactgaacagaagcaaaaactacaggcaactgtagttttgttccctgttgaaggagagacactctattagagaagac

SEQ ID NO: 111054 - DNA, 299 bp, Homo sapiens
attcatccttccctgggaacctctttcctttcagaggttcagctatcgctctccccgtgacatctgtgatgacgtcttctgcccattccatcttctttaccaccaggaatcctaaggtaaacctcttgctttttttctcaccccagtaaaattcctttgcaaataaccttcatacctttctcgcttataaaaataattttcttagcaaaacttgccttcgtcaagaacacaaagttttgttatgaagttcggtctgtgccctgtttgtcagacactaaaaaaagggaggcccgtcggca

SEQ ID NO: 111055 - DNA, 287 bp, Homo sapiens
ttacaggtatgagccaccacgcccagccttctctctccatttttggcaaatcaaattcatctgtctcagactcctcatatacacccagattagagggaaatttaatctccctcctgtcttggtgggggctcaccccagctctcggtttgttgaagagtcttcagggggttcctgcaatccaatagaggaagagcctctggtctctagcctgacacacctccttggcactctttgtcatccaggtttacacagtgaatttgaagacaggcagccctactgctcacagg

SEQ ID NO: 111056 - DNA, 131 bp, Homo sapiens
gtctgctccctgggattacacatgagagacatcttggtgcctgcccaatttctgtgtctgtaaaatgagtttcctctcagaggccgactacaaacataagttttaaagaggaaccacagtgcactttgaag

SEQ ID NO: 111057 - DNA, 337 bp, Homo sapiens
gactgtaacttaaatagtgcatggtaatgtgcagcattgaatttgaaagaaacaaggggaataaaacttaatgactatgagataaatggaatgcaggagttttaaaaaattcttgttaaaaaatttgacgagaggattttctcttgtgaaacgtttagataaccctctagaaaaaaaccaggagaaaatctttgtgaccttgagctaggcagagttttaaaaaatagaacacaaaaaccacaaactatgaagaaaaaatttatgttggctttcatcaaagttagaaacttgtactctttaaaaagtgtattttctgttaagaaaatgaagaggcaag

SEQ ID NO: 111058 - DNA, 349 bp, Homo sapiens
taaaatgggaatttaaaaggggactacatcacaggattgttttgaggattaaataacagaataaacataaggagcttaaaacaatgcttaatgcatagaagccactcaaacaagtttgttctgattttttttcccctaagaaaatagtaactccaattcccacagaaagattccaaaacaaaagtaccaataagtctgaaaataaatgcaagacctgaggaggaatcattgctgttttctaaaaccagtgatagacaggctatcttagagaccggagttcttgctttacattcattttctgaggtcaggaagtaaaaaggacacatgggtgaacaggcactggtgagat

SEQ ID NO: 111059 - DNA, 340 bp, Homo sapiens
attcaaagaaaatagttagtcctttcctatattgaaatgaaatttttcttagaacaagaaaggcccatattaaggattaaaaaccatttgtattaacttccgaatataggaagtgtggcttaggagtatcacatgtgaacacttcagaaagctgacacagcattacaaaggaatatcattcctattaacaggatggcaagatttctgtcataatcaccaaggtagacaatatatgaaaaagtgtttatcttggaagtcacacttaaaagaaggcctctggccgagcacggtggctcatgcctataatcccagcactttcggaggtggaggagggtggatc

SEQ ID NO: 111060 - DNA, 414 bp, Homo sapiens
gcttcatgcacataatcacaaacactaaacttcttacaagatattagtaaattgaatccaacaaaatgtaaaatggataatgcatcatccccacaatactagtgtaggctaacattttaaaaattgatccatgttggccaggcgtggtggttcacgcctgtaatcccaaaactttgggaggtcaaggcaggcagatcacgaggtcaggatttcgagaccagtctgaccaacatggtgaaaccgtgtgtctactaaaaatacaaaaattagctgggcatgatggcacgtgcctgtaattccagctacacaagaggcggaggcaggagaattgcttgaacccgggaggcaaaggttgcagtgagccaagattgcaccactgcagtccagcctggacaacagagcgagactccatct

SEQ ID NO: 111061 - DNA, 571 bp, Homo sapiens
tgcgccgttatagaggatccctgttgctacgctggagtataatgtacaatcagctcactgcaactccacctcccgggtcaagcaattctcctgcctcagcctgccgagtagctgggattacaggcacctaccaccatgcctggctaatttttgtatttttagtagcagatggggtttcaccacgttggccaggctggtcttgaactcctgacctcaggtgatccacccacctcggcctcccagtgcttggattacaagcgtgagccactgtgcccagcctgtactgtatttttcttttgcctctaggactcttcaagattatctcctgtcagcagatttaataagctctatcttcttagcggtaatcaaaatatatttcaagtgtcctagtctctgatcaataaaatgctataattttatcaggttcaacatcacatacattcagatgaattagtcactttggccacacacaaccatcagcaaaacataaaacaaagatacaaaaaaaactctgaggatgacacatcccctcaaatggctcctaggggtctcctttgcctatattgcaaca

SEQ ID NO: 111062 - DNA, 273 bp, Homo sapiens
ccattcggaggagctgcatcagccagccattgccacaaacgtgctgcttaacaaaccacccgaaaacctaggggctgaaaaccatgctcatttcttcccacagaccggcaggtcggctgagtttagctgctagaggctcagctaggctttgtcactcctccgaggactggatagggatcaggctgtcgtggctgggtggctcggctctgtgccacagcctgccatgttccttctgggaccagcagctggcccgggcacgctttcctcctggca

SEQ ID NO: 111063 - DNA, 306 bp, Homo sapiens
ttactataatgttgctcaagctggtcttgaactcctggactcaaggtgatcctctcacctccgcctcccaaagtgctgggattacaggtgtgagccaccgtgcccagccttaaatcagcttatgactcgggcattctccttcaccctttgtgggtgaattcagcttgagacgctttaccatcccatcatcattaccatatttctgattcatcaggtcccctaacttcccaattcctcgttcttgactcataagctccttgtcctttgttaactcgtaaattaaggggttagaccggatgacctcaa

SEQ ID NO: 111064 - DNA, 706 bp, Homo sapiens
tatctatatctacatttatatatctatatctatatctacatatctatatctatatctacatatatatatataaatatgtataccatctgtgcttttttatttaattttttggctctttctagtttgactttgttgagctgtaatccagtattctcgtcatcagtttacaacttttaagtctatttagcaaagtcattctacctgtagcatggcagtgttatagagactaggaggcaaactggagacaatgtgtatgtttttcccattctcacagaatcaaagcactatttaattttggccagttggtgaaatgtctggcctaggctgtcttctcctttgccattagagctctcagaatctttccctagtttctcagtgtgagtcatctgctactgctttcttattagtgtttttggcttaaattttgtcttttgaatttgaatgcttgaccttaggaaagagagcagtagtgccagactcctagtctttacagtttacgaaaggctctgggccagtttgggaccataatagccaaattcttcctctctctgtcttttttcccaaagttttgtgttattcaggtttctggagacagtttcagataataatttaatttgtaaacattgtgcaaattttaatagcttaaattatatatatggcctgaaaaaaatttgcatgatcaattgatgaggctggtgtgatagga

SEQ ID NO: 111065 - DNA, 310 bp, Homo sapiens
  misc_feature (224)..(224): n is a, c, g, or t
cgagtttgggagtccccgtgaccacctttagggtaagagttctctagaagtactacaggactcagaaaaggctttctacagcagtacccccgagccaaaggccatgtgttccaaaacccccgggaggtgcctgaaaccggggacagtaccaaacccttcacttgctgtgttttttcctgtacatacatgcctgtgataatgtttataaatccagttgttagatntcttattgttgaatttcaaaagctctttgtgtattttggataacagtcctttatcagatgtgtcttttgcaaatattctcccgcag

SEQ ID NO: 111066 - DNA, 443 bp, Homo sapiens
tgagatggagtctcgatctgtcacccaggctggagtgcagtggcgtggtctcagctcactgcaacctccgcctcctgggttcaagcaattcccctgcctcagcctcccgagtagctgggattacaggtgcctgccaccacgccaggctaattttttgtgtttttagtagagatgggtttcaccatgttggctaggctggtcttgaacttctgaccttgtgatctgcccgcctcggcctcccaaagtgttgggattgcaggcgtgagccaccgcgctggcaaatacgtactacattttaacaccagttttattattacacacaccgataaaaaggcctgggtatacaatcacataatcatgggtgtggaacatattttcttgcttctaagaaaaagaatagaaaaggttaaaacctggggggaaaaaaatccaggtcacttatt

SEQ ID NO: 111067 - DNA, 441 bp, Homo sapiens
tcacaccgctggataaaaggagagcgggggctggagtctgaggttgctgtgttctgttaacacactcactgcctctctattcctcccagctaaaaaagtgtctacctcatcaaacttaagaacaacataaaatccaactaatttaaagggttttgaaaaaacgcatcaaaaacataaaagcaatatacatgcaaaagccaactgaacaatataatgaaagtctcaaattctagtcaataggccacttttcttaaaaatcaagagacatgataaagttccagtaccaccaaaaagtgcttaacacttatctttatccatctcttcattctcttcacctgttgtgaagtgcccacttggtacttctctccaaattttgctcacgcacctccagatgcaacctcttggggcctctgtttacacctcagtgggatagaaaaaaca

SEQ ID NO: 111068 - DNA, 257 bp, Homo sapiens
aacctcatgtcctggccctgaaagaaccatctggcaccaccccatctacagggcaaatacagcttccagcaaaccctctagagtccacctggcctttctggggggtccttcctgggttttcagcctcccctccttcagatgtcagaccctggggccgagaatagcgaggtgccgatgaatagcgaggtgccgatgaatagcgaggtgccgatgaatagcgaagtgccgatgaatagcgaggtgccgatgaatagcga

SEQ ID NO: 111069 - DNA, 1002 bp, Homo sapiens
tctgcctccgcatcctcgtgggccctgaccttctctctgagagccgggcagaggctccggagccatgcaggccgaaggccggggcacagggggttcgacgggcgatgctgatggcccaggaggccctggcattcctgatggcccagggggcaatgctggcggcccaggagaggcgggtgccacgggcggcagaggtccccggggcgcaggggcagcaagggcctcggggccgagaggaggcgccccgcggggtccgcatggcggtgccgcttctgcgcaggatggaaggtgcccctgcggggccaggaggccggacagccgcctgcttgagttgcacatcacgatgcctttctcgtcgcccatggaagcggagctggtccgcaggatcctgtcccgggatgccgcacctctcccccgaccaggggcggttctgaaggacttcaccgtgtccggcaacctactgtttatgtcagttcgggaccaggacagggaaggcgctgggcggatgagggtggtgggttgggggctgggatccgcctccccggaggggcagaaagctagagatctcagaacacccaaacacaaggtctcagaacagagacctggtacaccaggcccgccgccacccgagggagcccagggagatgggtgcagaggtgtcgcctttaatgtgatgttctctgcccctcacatttagccgactgactgctgcagaccaccgccaactgcagctctccatcagctcctgtctccagcagctttccctgttgatgtggatcacgcagtgctttctgcccgtgtttttggctcaggctccctcagggcagaggcgctaagcccagcctggcgccccttcctaggtcatgcctcctcccctagggaatggtcccagcacgagtggccagttcattgtgggggcctgattgtttgtcgctggaggaggacggcttacatgtttgtttctgtagaaaataaagctgagctacgattccgaaaaaaaaa

SEQ ID NO: 111070 - DNA, 773 bp, Homo sapiens
tctgcctccgcatcctcgtgggccctgaccttctctctgagagccgggcagaggctccggagccatgcaggccgaaggccggggcacagggggttcgacgggcgatgctgatggcccaggaggccctggcattcctgatggcccagggggcaatgctggcggcccaggagaggcgggtgccacgggcggcagaggtccccggggcgcaggggcagcaagggcctcggggccgagaggaggcgccccgcggggtccgcatggcggtgccgcttctgcgcaggatggaaggtgcccctgcggggccaggaggccggacagccgcctgcttgagttgcacatcacgatgcctttctcgtcgcccatggaagcggagctggtccgcaggatcctgtcccgggatgccgcacctctcccccgaccaggggcggttctgaaggacttcaccgtgtccggcaacctactgtttatccgactgactgctgcagaccaccgccaactgcagctctccatcagctcctgtctccagcagctttccctgttgatgtggatcacgcagtgctttctgcccgtgtttttggctcaggctccctcagggcagaggcgctaagcccagcctggcgccccttcctaggtcatgcctcctcccctagggaatggtcccagcacgagtggccagttcattgtgggggcctgattgtttgtcgctggaggaggacggcttacatgtttgtttctgtagaaaataaagctgagctacgattccgaaaaaaaaa

SEQ ID NO: 111071 - DNA, 112 bp, Homo sapiens
ggccattttgtgcttggtctcatatatgggaaacactgccctttaggatttatttaaaacagggtgcaactttcttctctgtgaggactcaagcagtttgagagtttagatg

SEQ ID NO: 111072 - DNA, 363 bp, Homo sapiens
ggtcgacatgacactgatgacacctaatgtgtcatgtgtaacaacagctcagagtatcacacacaggtcaatttttgtgtatgatgtgaggtaagggttgagacttattattattcttttttcataaggatatcccattcattctggctggatttcctattttccagtctagacaaggctatctttttttccccatcatcgaattgtcttggcacctttgaagaacatcagttgacatgggtctatatttggactttctattctgtctattgatgtttatgattgatttataaatatctgagtgtacagctcactgaattctcacaaactgaacacacgtatataattagcacccaggtcagg

SEQ ID NO: 111073 - DNA, 103 bp, Homo sapiens
cctttggaggcccatctgctggtcgcaagtctccatccagccttcagcactctaaattgaggcaggagggggctgatttgagggtgtcacgccttcatgggag

SEQ ID NO: 111074 - DNA, 235 bp, Homo sapiens
cccatgaacagacctatagccttgatctatttattactattgtgaaaaaaggaacaaaagaaagggaaataaattcataacaatccctgcacaccaaacttatgtatcatctacccatctacctctttctctcccacctgtctttatcttttccccctcccctctgcaattcacttccctctccccacgttgcactttcttctctcctccgaaattggaccaaagtcctccttct

SEQ ID NO: 111075 - DNA, 537 bp, Homo sapiens
tctcttgcttttctgtgtctgtgttagtagcactggtttgcatatagaagggaatttaattttatcagatgcatttacattcattttctctctgtattggtaccactgatagcagaaattggatttctttagagcgagcatatgttttcttttaaaaacaagcattaaaaatcttgaaatagtaagataaaaagaaaactggccattttcctactattctactatttatatataaccctgttaacattatggtgtatgtttttttaaatatttaatatattgatatgagaggccgaggttggtggatcacctgaggtcagtagttcaagaccagtctggccaatgtggtaaaaccctgtctttactaaaaatagaaaaattagccaggtgtaatggcatgcacctgtaatcccagctacttgggaggctgaggcacaagaattgcttgaacctgggaggcagaggttgcagtgagcttcgatcgcgccactgcactccagcctgggtgacagagcgagactccgtctttaataataa

SEQ ID NO: 111076 - DNA, 303 bp, Homo sapiens
gtattaattagaataggccaaactctgatataacagacccccaaaatatggtagcttaaagagtaccaagtttccttcatttttgtgcaacagtccagaataggtgttcaggttagtggctaggccgtcttccaggtcctgatctcctaccatcttgtggttccaccttgccctagggcctacttgtctactgtgtccagcaggcagaaggacttgggaggtattatcttgtgtgccaggctagcagtgacacaagctttcattcacattccattgacagcttagacatatggccatcagtaa

SEQ ID NO: 111077 - DNA, 436 bp, Homo sapiens
ccttccagtcctggtcttgcttttctccccgacctggtgtttcctccaccctgggaaagtgataaggcctagggtcctgtgtagtgcttctgtgaccgaattaaatttttctcctgccgagtcgcgggttagagattacaaagcacagcgtaagggcagaattaggagcagccgacatgatgcagcagtgatattcgcctttgtcttaaattcccggagtgggaagcagctatttccctcttcggagtaatccccacgacagggatccctgcttccggaagtacaaaggcactttggagtaagacaggtttggatggaaagttctaacaggttgaagcggtgacaacctggtcatgaagctccagcatgacacacatatttggaagtcctgtatactaggagttctctttgtgcaccagagtcacttgaaggggct

SEQ ID NO: 111078 - DNA, 798 bp, Homo sapiens
cattgtgaaccctgtctctactaaaaatacaaaacaattagctgggcatggtggtgcacacctgtaactccacctactcggtaggctgaggtaggagaatcacttgaacccagaaggcggaggaggtgatatcatgccactgcactccagcctgggtgacagagcaagattctgtcaaacaaacaagcaccatcaagtaaccaaccaggttgctggtggtttagtaggctttatgcctgatagccttcatctccagggctcaagatggttgcataagcctttttgctttccaccactaggcaaagagagagaagaaatggtgaggtctttattgagatcagtttgacttacggcaaatagaaaaaacatgtctgactttgccattaaataccttccaacttagcaatcctgagacaaacctgtttgcaaaatgtaactaggtacccaggttaggctggtggaatgttcattattccgttgctaaggatctaagcctattcatggtgtcctatttttagagtatacaagaatgaatcagagacctatgattaattattaatgattgtgaaataacactgttggatgacagaaagttgaaagttttaataacagctgctttgagacttttaacaaacacataaaaggaattttaaagttatgttttttctttttggaatgttgcttgttttgaaatatgtttttccctaaatgtctatggtttagtcctatcttgaaaagaaaagaacctggcaataagaatctttgaaaagattaattatatctcttcattggtgtgca

SEQ ID NO: 111079 - DNA, 884 bp, Homo sapiens
catttttattgcgggggagtgatctctttacatagcttcaaatggcataacattcagcagtatccaagcttagatatatctgatgagaggaaagtaattgtgaggcctttgttctagttacaactttgtcactatctgactccatgactccagcaaattgcttcaactgtctggcctgcagtttttttcttgcgttaaataacagacttagtctagatcggtggttcttatcatgtggtttctggactagcagcatcaatattacctgggaaacttgttagaaatgcaaattcttgggctctgccctaggacctactgaaacatactctgtgggcggggcccagcaatctgtgtttgaaacgcgattctgattatttgacaaaagtttgcaaaccactggtctagataagtagctcttagccttggctgcacattaaaatcatctgggcaacttttataacctaccaatcctggcctcttcctccaaagattctgacttaaatggtttcagatggggaccattgttatgcggttatagccgacgtctaggtgctacctgaggtcttcaaagctaaaggtcagtgtttcccagccgtaaatgcatacctctagacctggccttctcaagccactaggtgttgctataatagagaagaaaaggcattttcagaaccgtctttggatatggatgaggaggaggaaaatgtatttcttagcttctgataagagattattttgttattttaatctgagtgcaatttgctaaatattcatttgcaacttgttaaatttattcaaagaaattaaatgcccataaatgacagaaagaataaagaattgtgatatatatttacaataaaatactctttagcaataaaaagaaa

SEQ ID NO: 111080 - DNA, 609 bp, Homo sapiens
caaacttctgcccagactaaggagaattgcctatggacatttaaccaatcctcctgattttaactgccccttcacctccagaagtatctggtgctgccaattgctgagctttggaggttctgcaagtagaaactgagtcggttctcagattctaccctctgctgccttagacttcagttttctaggatctgctattcttttagtattcatctatctgcattataacatcccacgttttttcatatgtgactcttttatggtttcccagtccttctgtgtttatggctttttaaaaaaggatttttgtggtttattttggatcactcaaaatcaccctcaaataaatgtataatgcagtgatttttagtaactaccaagtgtgtgcaaccatcatcataaataagtgttagaacattttcatcccctccttaagatctctcaacccatttccagttcatccccattgatgccctaggcaacgattagtctactctcttagtgaatttggcttttctggacatatataagtgatctgactcttttcgtttagcatgtttttgaggtcctgcaatggcatcatttattatttccttcttctgcttatctttg

SEQ ID NO: 111081 - DNA, 350 bp, Homo sapiens
gtattaaaaagttcacaccaaacccagaacctctagtatatgcagaagccatataggtttttgcttgttttttgagaggctgcttctatcaccttacgcattttcagtgagttaaaataccatcagataactgtcactgccaaaagaagcctgtgaagacatagcaactaaattattagctgggcccggtggtgcatgcctgtagtcccagctactcaggaggctgacgcaggagaatcacttgaacccaggaggtggagtttgcagtgagccgagattgcaccactgtactccaggcggggtgacagagcaagactctgtctctaaaaaataaaataaaagggctgggc

SEQ ID NO: 111082 - DNA, 3838 bp, Homo sapiens
cctacggaaatcctaacgggaatgtaacccaaaccggaagtggcctagagcgaccatttagcttctggttgttaagtggatctaagcctatgtcgcttactggacgctgaagtgattgggaatattagcagtgggggttctgtagggtcaggaaggggcggctggctttgggggagtgatgaggggcttgttgggggtgggggtgcgtgataaagggatttctcggctgaagacgaggctgtgaggcttctgcagaacccccaggtcaggccacatcattgaggctgcaggatctctcttcatagcccagtacgactctccgccgtgtccctggttggaaaatccaaacacctatccagcttctggctcctgggaaaagtggagttgtcagcaagagagaccgagagtagaagcccagagtggagatgcctgctgatgtgaatttatcccagaagcctcaggtcctgggtccagagaagcaggatggatcttgcgaggcatcagtgtcatttgaggacgtgaccgtggacttcagcagggaggagtggcagcaactggaccctgcccagagatgcctgtaccgggatgtgatgctggagctctatagccatctcttcgcagtggggtatcacattcccaacccagaggtcatcttcagaatgctaaaagaaaaggagccgcgtgtggaggaggctgaagtctcacatcagaggtgtcaagaaagggagtttgggcttgaaatcccacaaaaggagatttctaagaaagcttcatttcaaaaggatatggtaggtgagttcacaagagatggttcatggtgttccattttagaagaactgaggctggatgctgaccgcacaaagaaagatgagcaaaatcaaattcaacccatgagtcacagtgctttcttcaacaagaaaacattgaacacagaaagcaattgtgaatataaggaccctgggaaaatgattcgcacgaggccccaccttgcttcttcacagaaacaacctcagaaatgttgcttatttacagaaagtttgaagctgaacctagaagtgaacggtcagaatgaaagcaatgacacagaacagcttgatgacgttgttgggtctggtcagctattcagccatagctcttctgatgcctgcagcaagaatattcatacaggagagacattttgcaaaggtaaccagtgtagaaaagtctgtggccataaacagtcactcaagcaacatcaaattcatactcagaagaaaccagatggatgttctgaatgtggggggagcttcacccagaagtcacacctctttgcccaacagagaattcatagtgtaggaaacctccatgaatgtggcaaatgtggaaaagccttcatgccacaactaaaactcagtgtatatctgacagatcatacaggtgatataccctgtatatgcaaggaatgtgggaaggtctttattcagagatcagaattgcttacgcaccagaaaacacacactagaaagaagccctataaatgccatgactgtggaaaagcctttttccagatgttatctctcttcagacatcagagaactcacagtagagaaaaactctatgaatgcagtgaatgtggcaaaggcttctcccaaaactcaaccctcattatacatcagaaaattcatactggtgagagacagtatgcatgcagtgaatgtgggaaagcctttacccagaagtcaacactcagcttgcaccagagaatccactcagggcagaagtcctatgtgtgtatcgaatgcgggcaggccttcatccagaaggcacacctgattgtccatcaaagaagccacacaggagaaaaaccttatcagtgccacaactgtgggaaatccttcatttccaagtcacagcttgatatacatcatcgaattcatacaggggagaaaccttatgaatgcagtgactgtggaaaaaccttcacccaaaagtcacacctgaatatacaccagaaaattcatactggagaaagacaccatgtatgcagtgaatgcgggaaagccttcaaccagaagtcaatactcagcatgcatcagagaattcacaccggagagaagccttacaaatgcagtgaatgtgggaaagccttcacttctaagtctcaattcaaagagcatcagcgaattcacacgggtgagaaaccctatgtgtgcactgaatgtgggaaggccttcaacggcaggtcaaatttccataaacatcaaataactcacactagagagaggccttttgtctgttacaaatgtgggaaggcttttgtccagaaatcagagttgattacccatcaaagaactcacatgggagagaaaccctatgaatgccttgactgtgggaaatcgttcagtaagaaaccacaactcaaggtgcatcagcgaattcacacgggagaaagaccttatgtgtgttctgaatgtggaaaggccttcaacaacaggtcaaacttcaataaacaccaaacaactcataccagagacaaatcttacaaatgcagttattctgtgaaaggctttaccaagcaatgaattcctagtgcatcagcatattcataaatgaaatatactccgagtttcttgaagaagagaaaatcttctcagaatcaggtctaattatatgttattgaattcatgcttcagaaaaactctagggatgcactgcatgtgtgaacacatgataaaaaagtcatgctttattttagtgagggcaattacagagaaaagagtaagcagaaatgtccttctgagtactggcctcattaaggattataaattttctccccgggaagaaaccctgactaacgcattgagaaaagcctttctgtaaagaatggtacaagacaggttgttactcgattatttatagtaaaatatgtgggaaattatatcaatgataaccctgtttattgtgggatatcaatatttttaaagtgccaacacagtcatgataggacaatattttatgtgtgtgtgtgcgccttatgtatataagcatatatataatatataagcatattattatatacaggttgagtatcccttctccaaaatgcctgggatcagaagcattttggatttcagatacttacagattttggaatatttgcattatatttattggttgagcatccctaatctgaaaatccaagattaaatgctccaattagcatttcctttgagcgtcatgttagagttcaaaaagtttcagattttgggttttcagattaggaatacccaacctgtatgtacgtatatttctgtatctatgtatgtatatatatgcatatgcagacatatgtatatggtctggtcagcatatgtgtatgtatgcgtatgtatgtatgtatgtatgccctcagtgcagtggggtttgctgcagaattcactgcatagcaggagatgtaagcagatgagttattttttaagagaatctaatctaattgtttttataaaaattattccctattgaatatttatataatgaggttgtatcaacaatgattaactcctttattatacatacacatgaatgtgcatttttggtaaatgcataaatgagattctataatgtttactgatctttatattacagattttctcttcttttaggattagctcagcttgccccccctttccatctccaccatctatagtgagcctctccataattagtgccaaccattagtctcgttcatatttttacaccaggagtcaacaaactgtggccattggccaaatatggcctcccaactgtttttttaaaataaagttttattggaacacagccatgttcatttggaaaagta

SEQ ID NO: 111083 - DNA, 3784 bp, Homo sapiens
cctacggaaatcctaacgggaatgtaacccaaaccggaagtggcctagagcgaccatttagcttctggttgttaagtggatctaagcctatgtcgcttactggacgctgaagtgattgggaatattagcagtgggggttctgtagggtcaggaaggggcggctggctttgggggagtgatgaggggcttgttgggggtgggggtgcgtgataaagggatttctcggctgaagacgaggctgtgaggcttctgcagaacccccaggtcaggccacatcattgaggctgcaggatctctcttcatagcccagtacgactctccgccgtgtccctggttggaaaatccaaacacctatccagcttctggctcctgggaaaagtggagttgtcagcaagagagaccgagagtagaagcccagagtggagatgcctgctgatgtgaatttatcccagaagcctcaggtcctgggtccagagaagcaggatggatcttgcgaggcatcagtgtcatttgaggacgtgaccgtggacttcagcagggaggagtggcagcaactggaccctgcccagagatgcctgtaccgggatgtgatgctggagctctatagccatctcttcgcagtggggtatcacattcccaacccagaggtcatcttcagaatgctaaaagaaaaggagccgcgtgtggaggaggctgaagtctcacatcagaggtgtcaagaaagggagtttgggcttgaaatcccacaaaaggagatttctaagaaagcttcatttcaaaaggatatggtaggtgagttcacaagagatggttcatggtgttccattttagaagaactgaggctggatgctgaccgcacaaagaaagatgagcaaaatcaaattcaacccatgagtcacagtgctttcttcaacaagaaaacattgaacacagaaagcaattgtgaatataaggaccctgggaaaatgattcgcacgaggccccaccttgcttcttcacagaaacaacctcagaaatgttgcttatttacagaaagtttgaagctgaacctagaagtgaacggtcagaatgaaagcaatgacacagaacagcttgatgacgttgttgggtctggtcagctattcagccatagctcttctgatgcctgcagcaagaatattcatacaggagagacattttgcaaaggtaaccagtgtagaaaagtctgtggccataaacagtcactcaagcaacatcaaattcatactcagaagaaaccagatggatgttctgaatgtggggggagcttcacccagaagtcacacctctttgcccaacagagaattcatagtgtaggaaacctccatgaatgtggcaaatgtggaaaagccttcatgccacaactaaaactcagtgtatatctgacagatcatacaggtgatataccctgtatatgcaaggaatgtgggaaggtctttattcagagatcagaattgcttacgcaccagaaaacacacactagaaagaagccctataaatgccatgactgtggaaaagcctttttccagatgttatctctcttcagacatcagagaactcacagtagagaaaaactctatgaatgcagtgaatgtggcaaaggcttctcccaaaactcaaccctcattatacatcagaaccagaagtcaacactcagcttgcaccagagaatccactcagggcagaagtcctatgtgtgtatcgaatgcgggcaggccttcatccagaaggcacacctgattgtccatcaaagaagccacacaggagaaaaaccttatcagtgccacaactgtgggaaatccttcatttccaagtcacagcttgatatacatcatcgaattcatacaggggagaaaccttatgaatgcagtgactgtggaaaaaccttcacccaaaagtcacacctgaatatacaccagaaaattcatactggagaaagacaccatgtatgcagtgaatgcgggaaagccttcaaccagaagtcaatactcagcatgcatcagagaattcacaccggagagaagccttacaaatgcagtgaatgtgggaaagccttcacttctaagtctcaattcaaagagcatcagcgaattcacacgggtgagaaaccctatgtgtgcactgaatgtgggaaggccttcaacggcaggtcaaatttccataaacatcaaataactcacactagagagaggccttttgtctgttacaaatgtgggaaggcttttgtccagaaatcagagttgattacccatcaaagaactcacatgggagagaaaccctatgaatgccttgactgtgggaaatcgttcagtaagaaaccacaactcaaggtgcatcagcgaattcacacgggagaaagaccttatgtgtgttctgaatgtggaaaggccttcaacaacaggtcaaacttcaataaacaccaaacaactcataccagagacaaatcttacaaatgcagttattctgtgaaaggctttaccaagcaatgaattcctagtgcatcagcatattcataaatgaaatatactccgagtttcttgaagaagagaaaatcttctcagaatcaggtctaattatatgttattgaattcatgcttcagaaaaactctagggatgcactgcatgtgtgaacacatgataaaaaagtcatgctttattttagtgagggcaattacagagaaaagagtaagcagaaatgtccttctgagtactggcctcattaaggattataaattttctccccgggaagaaaccctgactaacgcattgagaaaagcctttctgtaaagaatggtacaagacaggttgttactcgattatttatagtaaaatatgtgggaaattatatcaatgataaccctgtttattgtgggatatcaatatttttaaagtgccaacacagtcatgataggacaatattttatgtgtgtgtgtgcgccttatgtatataagcatatatataatatataagcatattattatatacaggttgagtatcccttctccaaaatgcctgggatcagaagcattttggatttcagatacttacagattttggaatatttgcattatatttattggttgagcatccctaatctgaaaatccaagattaaatgctccaattagcatttcctttgagcgtcatgttagagttcaaaaagtttcagattttgggttttcagattaggaatacccaacctgtatgtacgtatatttctgtatctatgtatgtatatatatgcatatgcagacatatgtatatggtctggtcagcatatgtgtatgtatgcgtatgtatgtatgtatgtatgccctcagtgcagtggggtttgctgcagaattcactgcatagcaggagatgtaagcagatgagttattttttaagagaatctaatctaattgtttttataaaaattattccctattgaatatttatataatgaggttgtatcaacaatgattaactcctttattatacatacacatgaatgtgcatttttggtaaatgcataaatgagattctataatgtttactgatctttatattacagattttctcttcttttaggattagctcagcttgccccccctttccatctccaccatctatagtgagcctctccataattagtgccaaccattagtctcgttcatatttttacaccaggagtcaacaaactgtggccattggccaaatatggcctcccaactgtttttttaaaataaagttttattggaacacagccatgttcatttggaaaagta

SEQ ID NO: 111084 - DNA, 1066 bp, Homo sapiens
gaaattatatcaatgataacccacatattttactataaataatcgagtaacaacctgtcttgtaccattctttacagaaaggcttttctcaatgcgttagtcaggttgttactcgattatttatagtaaaatatgtgggaaattatatcaatgataaccctgtttattgtgggatatcaatatttttaaagtgccaacacagtcatgataggacaatattttatgtgtgtgtgtgcgccttatgtatataagcatatatataatatataagcatattattatatacaggttgagtatcccttctccaaaatgcctgggatcagaagcattttggatttcagatacttacagattttggaatatttgcattatatttattggttgagcatccctaatctgaaaatccaagattaaatgctccaattagcatttcctttgagcgtcatgttagagttcaaaaagtttcagattttgggttttcagattaggaatacccaacctgtatgtacgtatatttctgtatctatgtatgtatatatatgcatatgcagacatatgtatatggtctggtcagcatatgtgtatgtatgcgtatgtatgtatgtatgtatgccctcagtgcagtggggtttgctgcagaattcactgcatagcaggagatgtaagcagatgagttattttttaagagaatctaatctaattgtttttataaaaattattccctattgaatatttatataatgaggttgtatcaacaatgattaactcctttattatacatacacatgaatgtgcatttttggtaaatgcataaatgagattctataatgtttactgatctttatattacagattttctcttcttttaggattagctcagcttgccccccctttccatctccaccatctatagtgagcctctccataattagtgccaaccattagtctcgttcatatttttacaccaggagtcaacaaactgtggccattggccaaatatggcctcccaactgtttttttaaaataaagttttattggaacacagccatgttcatttggaaaagta

SEQ ID NO: 111085 - DNA, 917 bp, Homo sapiens
cctacggaaatcctaacgggaatgtaacccaaaccggaagtggcctagagcgaccatttagcttctggttgttaagtggatctaagcctatgtcgcttactggacgctgaagtgattgggaatattagcagtgggggttctgtagggtcaggaaggggcggctggctttgggggagtgatgaggggcttgttgggggtgggggtgcgtgataaagggatttctcggctgaagacgaggctgtgaggcttctgcagaacccccaggtcaggccacatcattgaggctgcaggatctctcttcatagcccagtacgactctccgccgtgtccctggttggaaaatccaaacacctatccagcttctggctcctgggaaaagtggagttgtcagcaagagagaccgagagtagaagcccagagtggagatgcctgctgatgtgaatttatcccagaagcctcaggtcctgggtccagagaagcaggatggatcttgcgaggcatcagtgtcatttgaggacgtgaccgtggacttcagcagggaggagtggcagcaactggaccctgcccagagatgcctgtaccgggatgtgatgctggagctctatagccatctcttcgcagtggggtatcacattcccaacccagaggtcatcttcagaatgctaaaagaaaaggagccgcgtgtggaggaggctgaagtctcacatcagaggtgtcaaggattagctcagcttgccccccctttccatctccaccatctatagtgagcctctccataattagtgccaaccattagtctcgttcatatttttacaccaggagtcaacaaactgtggccattggccaaatatggcctcccaactgtttttttaaaataaagttttattggaacacagccatgttcatttggaaaagta

SEQ ID NO: 111086 - DNA, 434 bp, Homo sapiens
tgggtatgataatgcccatgatatttagctgacaattaaattgacaactttctttttttaattcatatttatcacgtgccaggcaggcactgaggacttgacaagcttcatcttggttaagtttcccaacatctgtgataaatacctgcattttcattttggaaactacaactaaagtaatattttcatattctcacagtgaaaatgtggcaaagctgcaatgaattcaccatttagtccagactcagtctttatttttaaccctgactaataactagagttgggctttctgaactttgtctactccaatgtctgacacagtgacttcacctcagtgccctcaggaaatatttgtggagtgaatgttgaatgagtgaccatgtactcattgcttttccaaggcttctgcagaacccccaggtcaggccacatca

SEQ ID NO: 111087 - DNA, 651 bp, Homo sapiens
ccatcatcgctacctcctgaggttattatgcagattaaatgagtatgtgtgcaccatgtaggccactgcctggcacatgctaagtgctatgtagataaatgctcatcatgtaataagggctctgtgtttctgctcattgtcagcatcattagcagcattattacatgactcagcaatttccttgtgttctgtgtcaatcagcttcatgcagtttctcctctttcttgttcattgtgtctatttcatcttctctttctccttttagaaagggagtttgggcttgaaatcccacaaaaggagatttctaagaaagcttcatttcaaaaggatatggtaggtgagttcacaagagatggttcatggtgttccattttagaagaactgaggctggatgctgaccgcacaaagaaagatgagcaaaatcaaattcaacccatgagtcacagtgctttcttcaacaagaaaacattgaacacagaaagcaattgtgaatataaggaccctgggaaaatgattcgcacgaggccccaccttgcttcttcacagaaacaacctcagaaatgttgcttatttacagaaagtttgaagctgaacctagaagtgaacggtcagaatgaaagcaatgacacagaacagcttgatgacgttgtt

SEQ ID NO: 111088 - DNA, 1304 bp, Homo sapiens
cctacggaaatcctaacgggaatgtaacccaaaccggaagtggcctagagcgaccatttagcttctggttgttaagtggatctaagcctatgtcgcttactggacgctgaagtgattgggaatattagcagtgggggttctgtagggtcaggaaggggcggctggctttgggggagtgatgaggggcttgttgggggtgggggtgcgtgataaagggatttctcggctgaagacgaggctgtgaggcttctgcagaacccccaggtcaggccacatcattgaggctgcaggatctctcttcatagcccagtacgactctccgccgtgtccctggttggaaaatccaaacacctatccagcttctggctcctgggaaaagtggagttgtcagcaagagagaccgagagtagaagcccagagtggagatgcctgctgatgtgaatttatcccagaagcctcaggtcctgggtccagagaagcaggatggatcttgcgaggtaaacaggggcagccctggggatagttctccagaacgtgagggcagacacaggatgcagcaggtctgggctccctgctcctgagtcagtcttgagcctcctgtcaagcgaggaccacagaggctgatgtttccacattcataggctatctgtgttctagaggaaaccatgaactggctgataaaagaggatagtagagggttggccttgggtcaagaaagaagaaactgtagtccctggtctgatcagaagccccagtcataggatggaaaagctgactctttcctgctaagcactggttctgctccttcatccaccactgggtctttgaaaaatttcaagtggtcccccccaccaaattccttgcttggtccatggggtttggcccgtttttcctctgttctcataaggtgcggcaaaatctccttcctttgtaatttaaatagtcacagggaggtagagtgagaagaggcttttaaggaccatgtgaagaggcttttaaacactttttcctgtttaaaaaggtgaacaaaaaatgctggaaaacagtgtttccagattgcccacagatagaaatagtcaggatttggtaacaagaaatcagaattcttggtatagtcaagatttcctgaaatcctaaattattctgtgtatctcttgatgctttatttacaagtctttaaatagtatgtgactataatagtaaacagtgtaccattgttctgtgatgggtttataaccaaatttacagagatgttctgttttttaaaaaaagtataataaatatgtgtgttattatcctgaacc

SEQ ID NO: 111089 - DNA, 3530 bp, Homo sapiens
aaaggcccggccgtattgtgaaactcactataacccagcctatttggtgatgtttgcttcccactgcaatcgtgttatagaaggtgatgtggtctctgctcttaataaggccctggtgcgtgaacctgctttgcctgttctacctgcaacactaaattaacactcaagaataagtttgtggagtttgacatgaagccagtctgtaagaagtgctatgagaaatttccattggagctgaagaaaagacttaagaaactagctgagaccttaggaaggaaataagttcctttattttttcttttctatgcaagataagagattaccaacattacttgtcttgatctacccatatttaaagctatatctcaaagcagttgagagaagaggacctatatgaatggttttatgtcatttttttaattaaaaaagaaaaattcatataatcgtgtttaaaacacaaatgaagtcagtatttgcctttgttaacccttatccatttgttgacatgtagactgtttacaaaaaaaaaacacatggttaaatgttaaattttaattaaggcccccaaaaattaaatataactttttaaaatgaaaggagtcaccttttacatgactcaggtgaaaaaacagtataaacattaatttactttgtgttcaaaagaaaattccaactgctgttggggaaggacacagaaaagaaaaataaccacccaagaaaaacaaaaacaagaaaaacaaatcttatacaatcttagtatatttatcaaactagtagctagaaagtgaatatgcacattactaagacaaaaaacaagtgtaattcagaactacttgattttttttagttaaatgcaataattattatgcttagttttataacctgctctccttgtgaattcttccttcaaatgattacttaacgcagtagtaatagctagctagtaggatgtcctttaaatttttgtgcaaaaaaaaatttataccaggtatttggaaatatactttacaatattggaaaatgaagtatttttaatgtattacagcaattatgtttctaagcttaatgttaagcatgtagtcttagaataggacatgaaattaaattgtatgtagcttggaatatattgcttcagaaaactgaatgtgtatgtcggtcatattgcctttataaccatgctaatatctatgctttatacatactcaaacttgccttgccttaaaaaaatacatactacatacttaaatcaggaattctagccatctcacagaataccaactaaaactaagtgcattgagatctgagattggtaaacccagattcatttaccacagctgtaattaagtttttagaaactattctctttttggggaaatccattgaagttaatttctgttatcttattagaagaaaatgatgttgatatgtgtttcagattttccatttgaaatcttataattaatttgatttatttactgtaagtaggaggtataaatgacactcttaaattggaaggaggggtgttttagtgtctgttttaggtcaaaattagtgattctatttttatcaaaagttttatcctgaagtttcaggaccactcttccttaataaacttgttaatggaaagcgagctttatgaacatttaaaaatgttgctgctgctttgttgcttaaaaagaaagttgccaagagagacttcttagggaaaatatttgggttttttttccaaaaattgctgaaatattgttttgccatttttaaaaagtctcaggttattaccactctgccattaaatatttgtatgcctgcatttttaaaaattctgtgcatgtactttatggagtacattctatttttgttttcagataccctacaaccaatttttttagtaatcttttagaattgaaattatcataaatgatcgagaataatcatcacatagtttaagattgtatatgttgagtagtttaaaacaatctttgcattttacagtaagaatcaaagtcccttcagtgtgcctttgtcagctaatatgtgaccagcaatgacaaccttgggagtatttattaaatattatgctatgaatataggcaacacagaacagggtttgcagtatagcgtcttgatgctaaattctcatatacctctacacgagaaatatggaggagaaaaacaagcatttacatatattcttcgtcactttgaagatgcatggcctgaactcgactgcttgtgtttgtttacatatcaggcatacccaggcatctcctgcagccagaggttccattgctgtctttgctcagtcctcttttaaaatatgaattagtggacaggcacggtgcctcacacctgtaatcccagcactttgggaggtcgaggcaggtggatcacgaggtcaggagatcaagaccatcctggctaccactgaaaccccatctctactacaaaaaaattagccgggcgtggtggcgggcacctgcagtcccagctactcgggaggctgaggcaggagaatggtgggaacccgggaggcagagcttgcagtgagccaagatcacgccactgcactccagcctgggcaacagagcaagactctgtctcaaaaaaaataaataaataaattatgaatgagtattttctagaaattcaacttgctaagcctgtaatacttaagggtagtttatctagatacagtactttcttccctgataagtagtatcattggagcccttaggtataggagaagaggaagaagtttaaaaagtgtaagtgggccgggcgtggtggctcatgcctgtaatcccagcactttgggaggccgaggggggcggatcacgaggtcaggagatccagactatcctggctaacaaggtgaaaccccgtctctactaaaaatacaaaaaaaaacattagccaggcgtggtggcgggcgcttgtagtcccagctactcgggaggctgaggtaggagaatggcttgaacccaggaggcggagcttgcagtgagccgagattgcaccactgcactccagcctgggcgacagagcaagactccgtctcaaaaaaaaaaaaaaaagtgtaagtggattaaaagagaaacttggtctagttcataatatttttaatagggctttccctggctgctggaaaacttaggccagtaagcatctctttgtttaaagtcctacaagacaatttgaaataattcattgttcatgccaaaattctaagtactgtttttcttagcaagtgtaacataatcaggaacaatgggtacaagtaaaacattctttggatgatattcaaagccttattagcactgcacctgaataataggtcattttgcctcactcatttgccaaagtagccatttctaagttaaggaagtttttagataggctcatagccttgtatttcgttttagattgtaagctcaatggcagggatactatattggtaattatgttttcatatagcaaccaccacagtatattcttggtgcttaataaatgtttataattgttaacaataa

SEQ ID NO: 111090 - DNA, 3773 bp, Homo sapiens
aaaggcccggccgtattgtgaaactcactataacccagcctatttggtgatgtttgcttcccactgcaatcgtgttatagaaggtgatgtggtctctgctcttaataaggccctggtgcgtgaacctgctttgcctgttctacctgcaacactaaattaacactcaagaataagtttgtggagtttgacatgaagccagtctgtaagaagtgctatgagaaatttccattggagctgaagaaaagacttaagaaactagctgagaccttaggaaggaaataagttcctttattttttcttttctatgcaagataagagattaccaacattacttgtcttgatctacccatatttaaagctatatctcaaagcagttgagagaagaggacctatatgaatggttttatgtcatttttttaattaaaaaagaaaaattcatataatcgtgtttaaaacacaaatgaagtcagtatttgcctttgttaacccttatccatttgttgacatgtagactgtttacaaaaaaaaaacacatggttaaatgttaaattttaattaaggcccccaaaaattaaatataactttttaaaatgaaaggagtcaccttttacatgactcaggtgaaaaaacagtataaacattaatttactttgtgttcaaaagaaaattccaactgctgttggggaaggacacagaaaagaaaaataaccacccaagaaaaacaaaaacaagaaaaacaaatcttatacaatcttagtatatttatcaaactagtagctagaaagtgaatatgcacattactaagacaaaaaacaagtgtaattcagaactacttgattttttttagttaaatgcaataattattatgcttagttttataacctgctctccttgtgaattcttccttcaaatgattacttaacgcagtagtaatagctagctagtaggatgtcctttaaatttttgtgcaaaaaaaaatttataccaggtatttggaaatatactttacaatattggaaaatgaagtatttttaatgtattacagcaattatgtttctaagcttaatgttaagcatgtagtcttagaataggacatgaaattaaattgtatgtagcttggaatatattgcttcagaaaactgaatgtgtatgtcggtcatattgcctttataaccatgctaatatctatgctttatacatactcaaacttgccttgccttaaaaaaatacatactacatacttaaatcaggaattctagccatctcacagaataccaactaaaactaagtgcattgagatctgagattggtaaacccagattcatttaccacagctgtaattaagtttttagaaactattctctttttggggaaatccattgaagttaatttctgttatcttattagaagaaaatgatgttgatatgtgtttcagattttccatttgaaatcttataattaatttgatttatttactgtaagtaggaggtataaatgacactcttaaattggaaggaggggtgttttagtgtctgttttaggtcaaaattagtgattctatttttatcaaaagttttatcctgaagtttcaggaccactcttccttaataaacttgttaatggaaagcgagctttatgaacatttaaaaatgttgctgctgctttgttgcttaaaaagaaagttgccaagagagacttcttagggaaaatatttgggttttttttccaaaaattgctgaaatattgttttgccatttttaaaaagtctcaggttattaccactctgccattaaatatttgtatgcctgcatttttaaaaattctgtgcatgtactttatggagtacattctatttttgttttcagataccctacaaccaatttttttagtaatcttttagaattgaaattatcataaatgatcgagaataatcatcacatagtttaagattgtatatgttgagtagtttaaaacaatctttgcattttacagtaagaatcaaagtcccttcagtgtgcctttgtcagctaatatgtgaccagcaatgacaaccttgggagtatttattaaatattatgctatgaatataggcaacacagaacagggtttgcagtatagcgtcttgatgctaaattctcatatacctctacacgagaaatatggaggagaaaaacaagcatttacatatattcttcgtcactttgaagatgcatggcctgaactcgactgcttgtgtttgtttacatatcaggcatacccaggcatctcctgcagccagaggttccattgctgtctttgctcagtcctcttttaaaatatgaattagtggacaggcacggtgcctcacacctgtaatcccagcactttgggaggtcgaggcaggtggatcacgaggtcaggagatcaagaccatcctggctaccactgaaaccccatctctactacaaaaaaattagccgggcgtggtggcgggcacctgcagtcccagctactcgggaggctgaggcaggagaatggtgggaacccgggaggcagagcttgcagtgagccaagatcacgccactgcactccagcctgggcaacagagcaagactctgtctcaaaaaaaataaataaataaattatgaatgagtattttctagaaattcaacttgctaagcctgtaatacttaagggtagtttatctagatacagtactttcttccctgataagtagtatcattggagcccttaggtataggagaagaggaagaagtttaaaaagtgtaagtgggccgggcgtggtggctcatgcctgtaatcccagcactttgggaggccgaggggggcggatcacgaggtcaggagatccagactatcctggctaacaaggtgaaaccccgtctctactaaaaatacaaaaaaaaacattagccaggcgtggtggcgggcgcttgtagtcccagctactcgggaggctgaggtaggagaatggcttgaacccaggaggcggagcttgcagtgagccgagattgcaccactgcactccagcctgggcgacagagcaagactccgtctcaaaaaaaaaaaaaaaagtgtaagtggattaaaagagaaacttggtctagttcataatatttttaatagggctttccctggctgctggaaaacttaggccagtaagcatctctttgtttaaagtcctacaagacaatttgaaataattcattgttcatgccaaaattctaagtactgtttttcttagcaagtgtaacataatcaggaacaatgggtacaagtaaaacattctttggatgatattcaaagccttattagcactgcacctgaataataggtcattttgcctcactcatttgccaaagtagccatttctaagttaaggaagtttttagataggctcatagccttgtatttcgttttagattgtaagctcaatggcagggatactatattggtaattatgttttcatatagcaaccaccacagtatattcttggtgcttaataaatgtttataattgttaacaataaaaaaaaaaaaaaaaaaaaaaaaaaaaaaaacaaaaacaaaaaaaacaaaaaaaaaaaaaacgaaaaaaaaacaaaaaacacaaaaaaacaaaaaacaaaaaaaaaaaaaacaaagatggtggtggcgggcgcgcacgccgcaggaatagacatcgacacagcaaccgactgttggtgggggggccggccgacgaaagaagctaaaaagaacaacggagaagagagtgtagaaggaaaaagagc

SEQ ID NO: 111091 - DNA, 3470 bp, Homo sapiens
aaaggcccggccgtattgtgaaactcactataacccagcctatttggtgatgtttgcttcccactgcaatcgtgttatagaaggtgatgtggtctctgctcttaataaggccctggtgcgtgaacctgctttgcctgttctacctgcaacactaaattaacactcaagaataagtttgtggagtttgacatgaagccagtctgtaagaagtgctatgagaaatttccattggagctgaagaaaagacttaagaaactagctgagaccttaggaaggaaataagttcctttattttttcttttctatgcaagataagagattaccaacattacttgtcttgatctacccatatttaaagctatatctcaaagcagttgagagaagaggacctatatgaatggttttatgtcatttttttaattaaaaaagaaaaattcatataatcgtgtttaaaacacaaatgaagtcagtatttgcctttgttaacccttatccatttgttgacatgtagactgtttacaaaaaaaaaacacatggttaaatgttaaattttaattaaggcccccaaaaattaaatataactttttaaaatgaaaggagtcaccttttacatgactcaggtgaaaaaacagtataaacattaatttactttgtgttcaaaagaaaattccaactgctgttggggaaggacacagaaaagaaaaataaccacccaagaaaaacaaaaacaagaaaaacaaatcttatacaatcttagtatatttatcaaactagtagctagaaagtgaatatgcacattactaagacaaaaaacaagtgtaattcagaactacttgattttttttagttaaatgcaataattattatgcttagttttataacctgctctccttgtgaattcttccttcaaatgattacttaacgcagtagtaatagctagctagtaggatgtcctttaaatttttgtgcaaaaaaaaatttataccaggtatttggaaatatactttacaatattggaaaatgaagtatttttaatgtattacagcaattatgtttctaagcttaatgttaagcatgtagtcttagaataggacatgaaattaaattgtatgtagcttggaatatattgcttcagaaaactgaatgtgtatgtcggtcatattgcctttataaccatgctaatatctatgctttatacatactcaaacttgccttgccttaaaaaaatacatactacatacttaaatcaggaattctagccatctcacagaataccaactaaaactaagtgcattgagatctgagattggtaaacccagattcatttaccacagctgtaattaagtttttagaaactattctctttttggggaaatccattgaagttaatttctgttatcttattagaagaaaatgatgttgatatgtgtttcagattttccatttgaaatcttataattaatttgatttatttactgtaagtaggaggtataaatgacactcttaaattggaaggaggggtgttttagtgtctgttttaggtcaaaattagtgattctatttttatcaaaagttttatcctgaagtttcaggaccactcttccttaataaacttgttaatggaaagcgagctttatgaacatttaaaaatgttgctgctgctttgttgcttaaaaagaaagttgccaagagagacttcttagggaaaatatttgggttttttttccaaaaattgctgaaatattgttttgccatttttaaaaagtctcaggttattaccactctgccattaaatatttgtatgcctgcatttttaaaaattctgtgcatgtactttatggagtacattctatttttgttttcagataccctacaaccaatttttttagtaatcttttagaattgaaattatcataaatgatcgagaataatcatcacatagtttaagattgtatatgttgagtagtttaaaacaatctttgcattttacagtaagaatcaaagtcccttcagtgtgcctttgtcagctaatatgtgaccagcaatgacaaccttgggagtatttattaaatattatgctatgaatataggcaacacagaacagggtttgcagtatagcgtcttgatgctaaattctcatatacctctacacgagaaatatggaggagaaaaacaagcatttacatatattcttcgtcactttgaagatgcatggcctgaactcgactgcttgtgtttgtttacatatcaggcatacccaggcatctcctgcagccagaggttccattgctgtctttgctcagtcctcttttaaaatatgaattagtggacaggcacggtgcctcacacctgtaatcccagcactttgggaggtcgaggcaggtggatcacgaggtcaggagatcaagaccatcctggctaccactgaaaccccatctctactacaaaaaaattagccgggcgtggtggcgggcacctgcagtcccagctactcgggaggctgaggcaggagaatggtgggaacccgggaggcagagcttgcagtgagccaagatcacgccactgcactccagcctgggcaacagagcaagactctgtctcaaaaaaaataaataaataaattatgaatgagtattttctagaaattcaacttgctaagcctgtaatacttaagggtagtttatctagatacagtactttcttccctgataagtagtatcattggagcccttaggtataggagaagaggaagaagtttaaaaagtgtaagtgggccgggcgtggtggctcatgcctgtaatcccagcactttgggaggccgaggggggcggatcacgaggtcaggagatccagactatcctggctaacaaggtgaaaccccgtctctactaaaaatacaaaaaaaaacattagccaggcgtggtggcgggcgcttgtagtcccagctactcgggaggctgaggtaggagaatggcttgaacccaggaggcggagcttgcagtgagccgagattgcaccactgcactccagcctgggcgacagagcaagactccgtctcaaaaaaaaggctttccctggctgctggaaaacttaggccagtaagcatctctttgtttaaagtcctacaagacaatttgaaataattcattgttcatgccaaaattctaagtactgtttttcttagcaagtgtaacataatcaggaacaatgggtacaagtaaaacattctttggatgatattcaaagccttattagcactgcacctgaataataggtcattttgcctcactcatttgccaaagtagccatttctaagttaaggaagtttttagataggctcatagccttgtatttcgttttagattgtaagctcaatggcagggatactatattggtaattatgttttcatatagcaaccaccacagtatattcttggtgcttaataaatgtttataattgttaacaataa

SEQ ID NO: 111092 - DNA, 2636 bp, Homo sapiens
cgacccacgcgtcgcggacgcgtgggtgacccacgcgtccggctagctagtaggatgtcctttaaatttttgtgcaaaaaaaaatttataccaggtatttggaaatatactttacaatattggaaaatgaagtatttttaatgtattacagcaattatgtttctaagcttaatgttaagcatgtagtcttagaataggacatgaaattaaattgtatgtagcttggaatatattgcttcagaaaactgaatgtgtatgtcggtcatattgcctttataaccatgctaatatctatgctttatacatactcaaacttgccttgccttaaaaaaatacatactacatacttaaatcaggaattctagccatctcacagaataccaactaaaactaagtgcattgagatctgagattggtaaacccagattcatttaccacagctgtaattaagtttttagaaactattctctttttggggaaatccattgaagttaatttctgttatcttattagaagaaaatgatgttgatatgtgtttcagattttccatttgaaatcttataattaatttgatttatttactgtaagtaggaggtataaatgacactcttaaattggaaggaggggtgttttagtgtctgttttaggtcaaaattagtgattctatttttatcaaaagttttatcctgaagtttcaggaccactcttccttaataaacttgttaatggaaagcgagctttatgaacatttaaaaatgttgctgctgctttgttgcttaaaaagaaagttgccaagagagacttcttagggaaaatatttgggttttttttccaaaaattgctgaaatattgttttgccatttttaaaaagtctcaggttattaccactctgccattaaatatttgtatgcctgcatttttaaaaattctgtgcatgtactttatggagtacattctatttttgttttcagataccctacaaccaatttttttagtaatcttttagaattgaaattatcataaatgatcgagaataatcatcacatagtttaagattgtatatgttgagtagtttaaaacaatctttgcattttacagtaagaatcaaagtcccttcagtgtgcctttgtcagctaatatgtgaccagcaatgacaaccttgggagtatttattaaatattatgctatgaatataggcaacacagaacagggtttgcagtatagcgtcttgatgctaaattctcatatacctctacacgagaaatatggaggagaaaaacaagcatttacatatattcttcgtcactttgaagatgcatggcctgaactcgactgcttgtgtttgtttacatatcaggcatacccaggcatctcctgcagccagaggttccattgctgtctttgctcagtcctcttttaaaatatgaattagtggacaggcacggtgcctcacacctgtaatcccagcactttgggaggtcgaggcaggtggatcacgaggtcaggagatcaagaccatcctggctaccactgaaaccccatctctactacaaaaaaattagccgggcgtggtggcgggcacctgcagtcccagctactcgggaggctgaggcaggagaatggtgggaacccgggaggcagagcttgcagtgagccaagatcacgccactgcactccagcctgggcaacagagcaagactctgtctcaaaaaaaataaataaataaattatgaatgagtattttctagaaattcaacttgctaagcctgtaatacttaagggtagtttatctagatacagtactttcttccctgataagtagtatcattggagcccttaggtataggagaagaggaagaagtttaaaaagtgtaagtgggccgggcgtggtggctcatgcctgtaatcccagcactttgggaggccgaggggggcggatcacgaggtcaggagatccagactatcctggctaacaaggtgaaaccccgtctctactaaaaatacaaaaaaaaacattagccaggcgtggtggcgggcgcttgtagtcccagctactcgggaggctgaggtaggagaatggcttgaacccaggaggcggagcttgcagtgagccgagattgcaccactgcactccagcctgggcgacagagcaagactccgtctcaaaaaaaaaaaaaaaagtgtaagtggattaaaagagaaacttggtctagttcataatatttttaatagggctttccctggctgctggaaaacttaggccagtaagcatctctttgtttaaagtcctacaagacaatttgaaataattcattgttcatgccaaaattctaagtactgtttttcttagcaagtgtaacataatcaggaacaatgggtacaagtaaaacattctttggatgatattcaaagccttattagcactgcacctgaataataggtcattttgcctcactcatttgccaaagtagccatttctaagttaaggaagtttttagataggctcatagccttgtatttcgttttagattgtaagctcaatggcagggatactatattggtaattatgttttcatatagcaaccaccacagtatattcttggtgcttaataaatgtttataattgttaacaataa

SEQ ID NO: 111093 - DNA, 2467 bp, Homo sapiens
  misc_feature (2)..(2): n is a, c, g, or t
  misc_feature (6)..(8): n is a, c, g, or t
cnggtnnngttcgagcaggaggaaataggacatgaaattaaattgtatgtagcttggaatatattgcttcagaaaactgaatgtgtatgtcggtcatattgcctttataaccatgctaatatctatgctttatacatactcaaacttgccttgccttaaaaaaatacatactacatacttaaatcaggaattctagccatctcacagaataccaactaaaactaagtgcattgagatctgagattggtaaacccagattcatttaccacagctgtaattaagtttttagaaactattctctttttggggaaatccattgaagttaatttctgttatcttattagaagaaaatgatgttgatatgtgtttcagattttccatttgaaatcttataattaatttgatttatttactgtaagtaggaggtataaatgacactcttaaattggaaggaggggtgttttagtgtctgttttaggtcaaaattagtgattctatttttatcaaaagttttatcctgaagtttcaggaccactcttccttaataaacttgttaatggaaagcgagctttatgaacatttaaaaatgttgctgctgctttgttgcttaaaaagaaagttgccaagagagacttcttagggaaaatatttgggttttttttccaaaaattgctgaaatattgttttgccatttttaaaaagtctcaggttattaccactctgccattaaatatttgtatgcctgcatttttaaaaattctgtgcatgtactttatggagtacattctatttttgttttcagataccctacaaccaatttttttagtaatcttttagaattgaaattatcataaatgatcgagaataatcatcacatagtttaagattgtatatgttgagtagtttaaaacaatctttgcattttacagtaagaatcaaagtcccttcagtgtgcctttgtcagctaatatgtgaccagcaatgacaaccttgggagtatttattaaatattatgctatgaatataggcaacacagaacagggtttgcagtatagcgtcttgatgctaaattctcatatacctctacacgagaaatatggaggagaaaaacaagcatttacatatattcttcgtcactttgaagatgcatggcctgaactcgactgcttgtgtttgtttacatatcaggcatacccaggcatctcctgcagccagaggttccattgctgtctttgctcagtcctcttttaaaatatgaattagtggacaggcacggtgcctcacacctgtaatcccagcactttgggaggtcgaggcaggtggatcacgaggtcaggagatcaagaccatcctggctaccactgaaaccccatctctactacaaaaaaattagccgggcgtggtggcgggcacctgcagtcccagctactcgggaggctgaggcaggagaatggtgggaacccgggaggcagagcttgcagtgagccaagatcacgccactgcactccagcctgggcaacagagcaagactctgtctcaaaaaaaataaataaataaattatgaatgagtattttctagaaattcaacttgctaagcctgtaatacttaagggtagtttatctagatacagtactttcttccctgataagtagtatcattggagcccttaggtataggagaagaggaagaagtttaaaaagtgtaagtgggccgggcgtggtggctcatgcctgtaatcccagcactttgggaggccgaggggggcggatcacgaggtcaggagatccagactatcctggctaacaaggtgaaaccccgtctctactaaaaatacaaaaaaaaacattagccaggcgtggtggcgggcgcttgtagtcccagctactcgggaggctgaggtaggagaatggcttgaacccaggaggcggagcttgcagtgagccgagattgcaccactgcactccagcctgggcgacagagcaagactccgtctcaaaaaaaaaaaaaaaagtgtaagtggattaaaagagaaacttggtctagttcataatatttttaatagggctttccctggctgctggaaaacttaggccagtaagcatctctttgtttaaagtcctacaagacaatttgaaataattcattgttcatgccaaaattctaagtactgtttttcttagcaagtgtaacataatcaggaacaatgggtacaagtaaaacattctttggatgatattcaaagccttattagcactgcacctgaataataggtcattttgcctcactcatttgccaaagtagccatttctaagttaaggaagtttttagataggctcatagccttgtatttcgttttagattgtaagctcaatggcagggatactatattggtaattatgttttcatatagcaaccaccacagtatattcttggtgcttaataaatgtttataattgttaacaataa

SEQ ID NO: 111094 - DNA, 3472 bp, Homo sapiens
aaaggcccggccgtattgtgaaactcactataacccagcctatttggtgatgtttgcttcccactgcaatcgtgttatagaaggtgatgtggtctctgctcttaataaggccctggtgcgtgaacctgctttgcctgttctacctgcaacactaaattaacactcaagaataagtttgtggagtttgacatgaagccagtctgtaagaagtgctatgagaaatttccattggagctgaagaaaagacttaagaaactagctgagaccttaggaaggaaataagttcctttattttttcttttctatgcaagataagagattaccaacattacttgtcttgatctacccatatttaaagctatatctcaaagcagttgagagaagaggacctatatgaatggttttatgtcatttttttaattaaaaaagaaaaattcatataatcgtgtttaaaacacaaatgaagtcagtatttgcctttgttaacccttatccatttgttgacatgtagactgtttacaaaaaaaaaacacatggttaaatgttaaattttaattaaggcccccaaaaattaaatataactttttaaaatgaaaggagtcaccttttacatgactcaggtgaaaaaacagtataaacattaatttactttgtgttcaaaagaaaattccaactgctgttggggaaggacacagaaaagaaaaataaccacccaagaaaaacaaaaacaagaaaaacaaatcttatacaatcttagtatatttatcaaactagtagctagaaagtgaatatgcacattactaagacaaaaaacaagtgtaattcagaactacttgattttttttagttaaatgcaataattattatgcttagttttataacctgctctccttgtgaattcttccttcaaatgattacttaacgcagtagtaatagctagctagtaggatgtcctttaaatttttgtgcaaaaaaaaatttataccaggtatttggaaatatactttacaatattggaaaatgaagtatttttaatgtattacagcaattatgtttctaagcttaatgttaagcatgtagtcttagaataggacatgaaattaaattgtatgtagcttggaatatattgcttcagaaaactgaatgtgtatgtcggtcatattgcctttataaccatgctaatatctatgctttatacatactcaaacttgccttgccttaaaaaaatacatactacatacttaaatcaggaattctagccatctcacagaataccaactaaaactaagtgcattgagatctgagattggtaaacccagattcatttaccacagctgtaattaagtttttagaaactattctctttttggggaaatccattgaagttaatttctgttatcttattagaagaaaatgatgttgatatgtgtttcagattttccatttgaaatcttataattaatttgatttatttactgtaagtaggaggtataaatgacactcttaaattggaaggaggggtgttttagtgtctgttttaggtcaaaattagtgattctatttttatcaaaagttttatcctgaagtttcaggaccactcttccttaataaacttgttaatggaaagcgagctttatgaacatttaaaaatgttgctgctgctttgttgcttaaaaagaaagttgccaagagagacttcttagggaaaatatttgggttttttttccaaaaattgctgaaatattgttttgccatttttaaaaagtctcaggttattaccactctgccattaaatatttgtatgcctgcatttttaaaaattctgtgcatgtactttatggagtacattctatttttgttttcagataccctacaaccaatttttttagtaatcttttagaattgaaattatcataaatgatcgagaataatcatcacatagtttaagattgtatatgttgagtagtttaaaacaatctttgcattttacagtaagaatcaaagtcccttcagtgtgcctttgtcagctaatatgtgaccagcaatgacaaccttgggagtatttattaaatattatgctatgaatataggcaacacagaacagggtttgcagtatagcgtcttgatgctaaattctcatatacctctacacgagaaatatggaggagaaaaacaagcatttacatatattcttcgtcactttgaagatgcatggcctgaactcgactgcttgtgtttgtttacatatcaggcatacccaggcatctcctgcagccagaggttccattgctgtctttgctcagtcctcttttaaaatatgaattagtggacaggcacggtgcctcacacctgtaatcccagcactttgggaggtcgaggcaggtggatcacgaggtcaggagatcaagaccatcctggctaccactgaaaccccatctctactacaaaaaaattagccgggcgtggtggcgggcacctgcagtcccagctactcgggaggctgaggcaggagaatggtgggaacccgggaggcagagcttgcagtgagccaagatcacgccactgcactccagcctgggcaacagagcaagactctgtctccctgtaatacttaagggtagtttatctagatacagtactttcttccctgataagtagtatcattggagcccttaggtataggagaagaggaagaagtttaaaaagtgtaagtgggccgggcgtggtggctcatgcctgtaatcccagcactttgggaggccgaggggggcggatcacgaggtcaggagatccagactatcctggctaacaaggtgaaaccccgtctctactaaaaatacaaaaaaaaacattagccaggcgtggtggcgggcgcttgtagtcccagctactcgggaggctgaggtaggagaatggcttgaacccaggaggcggagcttgcagtgagccgagattgcaccactgcactccagcctgggcgacagagcaagactccgtctcaaaaaaaaaaaaaaaagtgtaagtggattaaaagagaaacttggtctagttcataatatttttaatagggctttccctggctgctggaaaacttaggccagtaagcatctctttgtttaaagtcctacaagacaatttgaaataattcattgttcatgccaaaattctaagtactgtttttcttagcaagtgtaacataatcaggaacaatgggtacaagtaaaacattctttggatgatattcaaagccttattagcactgcacctgaataataggtcattttgcctcactcatttgccaaagtagccatttctaagttaaggaagtttttagataggctcatagccttgtatttcgttttagattgtaagctcaatggcagggatactatattggtaattatgttttcatatagcaaccaccacagtatattcttggtgcttaataaatgtttataattgttaacaataa

SEQ ID NO: 111095 - DNA, 2089 bp, Homo sapiens
  misc_feature (1)..(1): n is a, c, g, or t
  misc_feature (6)..(6): n is a, c, g, or t
  misc_feature (11)..(11): n is a, c, g, or t
  misc_feature (23)..(23): n is a, c, g, or t
nccccngggcntgcaggaattcnggcacgagttactgtaagtaggaggtataaatgacactcttaaattggaaggaggggtgttttagtgtctgttttaggtcaaaattagtgattctatttttatcaaaagttttatcctgaagtttcaggaccactcttccttaataaacttgttaatggaaagcgagctttatgaacatttaaaaatgttgctgctgctttgttgcttaaaaagaaagttgccaagagagacttcttagggaaaatatttgggttttttttccaaaaattgctgaaatattgttttgccatttttaaaaagtctcaggttattaccactctgccattaaatatttgtatgcctgcatttttaaaaattctgtgcatgtactttatggagtacattctatttttgttttcagataccctacaaccaatttttttagtaatcttttagaattgaaattatcataaatgatcgagaataatcatcacatagtttaagattgtatatgttgagtagtttaaaacaatctttgcattttacagtaagaatcaaagtcccttcagtgtgcctttgtcagctaatatgtgaccagcaatgacaaccttgggagtatttattaaatattatgctatgaatataggcaacacagaacagggtttgcagtatagcgtcttgatgctaaattctcatatacctctacacgagaaatatggaggagaaaaacaagcatttacatatattcttcgtcactttgaagatgcatggcctgaactcgactgcttgtgtttgtttacatatcaggcatacccaggcatctcctgcagccagaggttccattgctgtctttgctcagtcctcttttaaaatatgaattagtggacaggcacggtgcctcacacctgtaatcccagcactttgggaggtcgaggcaggtggatcacgaggtcaggagatcaagaccatcctggctaccactgaaaccccatctctactacaaaaaaattagccgggcgtggtggcgggcacctgcagtcccagctactcgggaggctgaggcaggagaatggtgggaacccgggaggcagagcttgcagtgagccaagatcacgccactgcactccagcctgggcaacagagcaagactctgtctcaaaaaaaataaataaataaattatgaatgagtattttctagaaattcaacttgctaagcctgtaatacttaagggtagtttatctagatacagtactttcttccctgataagtagtatcattggagcccttaggtataggagaagaggaagaagtttaaaaagtgtaagtgggccgggcgtggtggctcatgcctgtaatcccagcactttgggaggccgaggggggcggatcacgaggtcaggagatccagactatcctggctaacaaggtgaaaccccgtctctactaaaaatacaaaaaaaaacattagccaggcgtggtggcgggcgcttgtagtcccagctactcgggaggctgaggtaggagaatggcttgaacccaggaggcggagcttgcagtgagccgagattgcaccactgcactccagcctgggcgacagagcaagactccgtctcaaaaaaaaaaaaaaaagtgtaagtggattaaaagagaaacttggtctagttcataatatttttaatagggctttccctggctgctggaaaacttaggccagtaagcatctctttgtttaaagtcctacaagacaatttgaaataattcattgttcatgccaaaattctaagtactgtttttcttagcaagtgtaacataatcaggaacaatgggtacaagtaaaacattctttggatgatattcaaagccttattagcactgcacctgaataataggtcattttgcctcactcatttgccaaagtagccatttctaagttaaggaagtttttagataggctcatagccttgtatttcgttttagattgtaagctcaatggcagggatactatattggtaattatgttttcatatagcaaccaccacagtatattcttggtgcttaataaatgtttataattgttaacaataa

SEQ ID NO: 111096 - DNA, 2017 bp, Homo sapiens
tgctgcggcgactctgaggatccctttagtcaaaattagtgattctatttttatcaaaagttttatcctgaagtttcaggaccactcttccttaataaacttgttaatggaaagcgagctttatgaacatttaaaaatgttgctgctgctttgttgcttaaaaagaaagttgccaagagagacttcttagggaaaatatttgggttttttttccaaaaattgctgaaatattgttttgccatttttaaaaagtctcaggttattaccactctgccattaaatatttgtatgcctgcatttttaaaaattctgtgcatgtactttatggagtacattctatttttgttttcagataccctacaaccaatttttttagtaatcttttagaattgaaattatcataaatgatcgagaataatcatcacatagtttaagattgtatatgttgagtagtttaaaacaatctttgcattttacagtaagaatcaaagtcccttcagtgtgcctttgtcagctaatatgtgaccagcaatgacaaccttgggagtatttattaaatattatgctatgaatataggcaacacagaacagggtttgcagtatagcgtcttgatgctaaattctcatatacctctacacgagaaatatggaggagaaaaacaagcatttacatatattcttcgtcactttgaagatgcatggcctgaactcgactgcttgtgtttgtttacatatcaggcatacccaggcatctcctgcagccagaggttccattgctgtctttgctcagtcctcttttaaaatatgaattagtggacaggcacggtgcctcacacctgtaatcccagcactttgggaggtcgaggcaggtggatcacgaggtcaggagatcaagaccatcctggctaccactgaaaccccatctctactacaaaaaaattagccgggcgtggtggcgggcacctgcagtcccagctactcgggaggctgaggcaggagaatggtgggaacccgggaggcagagcttgcagtgagccaagatcacgccactgcactccagcctgggcaacagagcaagactctgtctcaaaaaaaataaataaataaattatgaatgagtattttctagaaattcaacttgctaagcctgtaatacttaagggtagtttatctagatacagtactttcttccctgataagtagtatcattggagcccttaggtataggagaagaggaagaagtttaaaaagtgtaagtgggccgggcgtggtggctcatgcctgtaatcccagcactttgggaggccgaggggggcggatcacgaggtcaggagatccagactatcctggctaacaaggtgaaaccccgtctctactaaaaatacaaaaaaaaacattagccaggcgtggtggcgggcgcttgtagtcccagctactcgggaggctgaggtaggagaatggcttgaacccaggaggcggagcttgcagtgagccgagattgcaccactgcactccagcctgggcgacagagcaagactccgtctcaaaaaaaaaaaaaaaagtgtaagtggattaaaagagaaacttggtctagttcataatatttttaatagggctttccctggctgctggaaaacttaggccagtaagcatctctttgtttaaagtcctacaagacaatttgaaataattcattgttcatgccaaaattctaagtactgtttttcttagcaagtgtaacataatcaggaacaatgggtacaagtaaaacattctttggatgatattcaaagccttattagcactgcacctgaataataggtcattttgcctcactcatttgccaaagtagccatttctaagttaaggaagtttttagataggctcatagccttgtatttcgttttagattgtaagctcaatggcagggatactatattggtaattatgttttcatatagcaaccaccacagtatattcttggtgcttaataaatgtttataattgttaacaataa

SEQ ID NO: 111097 - DNA, 1087 bp, Homo sapiens
catggtctacagactggaatgcagtggtgtgatctcagctcaccacaacctctgctgctgaggcaggagaatggtgggaacccgggaggcagagcttgcagtgagccaagatcacgccactgcactccagcctgggcaacagagcaagactctgtctcaaaaaaaataaataaataaattatgaatgagtattttctagaaattcaacttgctaagcctgtaatacttaagggtagtttatctagatacagtactttcttccctgataagtagtatcattggagcccttaggtataggagaagaggaagaagtttaaaaagtgtaagtgggccgggcgtggtggctcatgcctgtaatcccagcactttgggaggccgaggggggcggatcacgaggtcaggagatccagactatcctggctaacaaggtgaaaccccgtctctactaaaaatacaaaaaaaaacattagccaggcgtggtggcgggcgcttgtagtcccagctactcgggaggctgaggtaggagaatggcttgaacccaggaggcggagcttgcagtgagccgagattgcaccactgcactccagcctgggcgacagagcaagactccgtctcaaaaaaaaaaaaaaaagtgtaagtggattaaaagagaaacttggtctagttcataatatttttaatagggctttccctggctgctggaaaacttaggccagtaagcatctctttgtttaaagtcctacaagacaatttgaaataattcattgttcatgccaaaattctaagtactgtttttcttagcaagtgtaacataatcaggaacaatgggtacaagtaaaacattctttggatgatattcaaagccttattagcactgcacctgaataataggtcattttgcctcactcatttgccaaagtagccatttctaagttaaggaagtttttagataggctcatagccttgtatttcgttttagattgtaagctcaatggcagggatactatattggtaattatgttttcatatagcaaccaccacagtatattcttggtgcttaataaatgtttataattgttaacaataa

SEQ ID NO: 111098 - DNA, 1511 bp, Homo sapiens
aaaggcccggccgtattgtgaaactcactataacccagcctatttggtgatgtttgcttcccactgcaatcgtgttatagaaggtgatgtggtctctgctcttaataaggccctggtgcgtgaacctgctttgcctgttctacctgcaacactaaattaacactcaagaataagtttgtggagtttgacatgaagccagtctgtaagaagtgctatgagaaatttccattggagctgaagaaaagacttaagaaactagctgagaccttaggaaggaaataagttcctttattttttcttttctatgcaagataagagattaccaacattacttgtcttgatctacccatatttaaagctatatctcaaagcagttgagagaagaggacctatatgaatggttttatgtcatttttttaattaaaaaagaaaaattcatataatcgtgtttaaaacacaaatgaagtcagtatttgcctttgttaacccttatccatttgttgacatgtagactgtttacaaaaaaaaaacacatggttaaatgttaaattttaattaaggcccccaaaaattaaatataactttttaaaatgaaaggagtcaccttttacatgactcaggtgaaaaaacagtataaacattaatttactttgtgttcaaaagaaaattccaactgctgttggggaaggacacagaaaagaaaaataaccacccaagaaaaacaaaaacaagaaaaacaaatcttatacaatcttagtatatttatcaaactagtagctagaaagtgaatatgcacattactaagacaaaaaacaagtgtaattcagaactacttgattttttttagttaaatgcaataattattatgcttagttttataacctgctctccttgtgaattcttccttcaaatgattacttaacgcagtagtaatagctagctagtaggatgtcctttaaatttttgtgcaaaaaaaaatttataccaggtatttggaaatatactttacaatattggaaaatgaagtatttttaatgtattacagcaattatgtttctaagcttaatgttaagcatgtagtcttagaataggacatgaaattaaattgtatgtagcttggaatatattgcttcagaaaactgaatgtgtatgtcggtcatattgcctttataaccatgctaatatctatgctttatacatactcaaacttgccttgccttaaaaaaatacatactacatacttaaatcaggaattctagccatctcacagaataccaactaaaactaagtgcattgagatctgagattggtaaacccagattcatttaccacagctgtaattaagtttttagaaactattctctttttggggaaatccattgaagttaatttctgttatcttattagaagaaaatgatgttgatatgtgtttcagattttccatttgaaatcttataattaatttgatttatcccctcaggtttttacgcctatccactaacactcttaaa

SEQ ID NO: 111099 - DNA, 332 bp, Homo sapiens
ctgggctcaagcagtcctcccattttggcctcccaaagtcctaggattatagatatgagccatccacccagcctatactttttttaattaccatagttttatagtaagttttgaaattggacaatgtaagtcctcctactttgttctttttcattattatttttggctattcaggggacacttgcaatttcatatgaattttaggaaccgtgtatccattgctgcaaaaaggcagttggaattttgataagaattatagattaatttggggaaatattacatacaatcttaattataaactattacctctatatacattgtttacctgtttt

SEQ ID NO: 111100 - DNA, 171 bp, Homo sapiens
ataatttgactacacaagagtaaaaatagcatgtattcgaatcatagtttaggctagatgtggtggctcacacctgtaatcccagcactttggaaggcagaggctggaggatcatgtgaacccaggaattcaagaccagcctgggaaacatagtgagaccctatccctacc

SEQ ID NO: 111101 - DNA, 365 bp, Homo sapiens
attttttctttagatacttattattaatatattctctaattataaaatcattaaaatcggaaggagcactctaaataaagcaaaattgtcttaaaaatgttttttattattacaaagcaaattggtttatataatgtatatttttacatgataaaaaaggtaaactggatcctagactagacaccatcatcaaacatgagaagctaagcaaaattttggagaatgggtatggtaaatttcccttccttttaggaaaatatgacttttttatagaagaagggaagggctagaagttctcatgaggctcctcaagaagtttgtgtctggggcggtcagtctgccttggagcaaattccagtgtcact

SEQ ID NO: 111102 - DNA, 381 bp, Homo sapiens
tcttcacccttcattttaacattgcctctcaacccaatctgagcattttctctccgaagatctgcccagattacagtggtttactctaaaatttggtctctctcagtgggagctgcacttcctggctgcatctagtcagccatcttaaccttatgtctcctttgatctttttgctattaatcagtgcagtttgataatcacttcatctcctgatatacttggcagtctcactatttcaaagaagggagaagttcaacaatgtactatgtataacccgtaaagtactcatggaatcaattttaaaatggctatttttagctcgcattttagattctgcaatgaaattttatatgcaaccatactgtctaaaatgccttacca

SEQ ID NO: 111103 - DNA, 384 bp, Homo sapiens
cactcccagtgttggtgattttctcaggaggactcacagccctcatcacgtggtgctatcctcacagcatggttcattactacgaaaggacacagagcaagccagcaggggaaagtcacgtggggcagagtccggggatctgggcgcaagttcccaagagcctgtcctggtgcagctacacaggacaaggttattttctccagtgtcaggttatgacaacacttgtgaactgtcagctacagggatactcttagggactcagcgcccagggtttttactagggcgtagcatgtacccaaattctaggctccctgagggaaagcaggtgttcagtggaaagcacacttgttaaaagtggctgaggcacagggagccacccttacc

SEQ ID NO: 111104 - DNA, 192 bp, Homo sapiens
cgctatgaatacacacattgtagtacatgtgttttggtggggatatgtgtttctgttgaatgtgtatctgggagaatttcattgtcgtaagccttatgttaacagtgttccaatatatactcccaggatatgaaagtgcaattgctggctgggcatggtggcttgtgcctgtaatcccagcactttgggaag

SEQ ID NO: 111105 - DNA, 346 bp, Homo sapiens
caacctggcatgtgaaaatacctatgaaggctggacacgtgtcatgcctgtagctggaactcttcaagttaattgccttattttcctggcaggaaacagcttataaccacacacatgacttgagccaggaagtcagcttcagcttaatcaatatttagagtgtgatgtgttgctaatcagtgttggttttgtgcataggaaaggtagccacgactcgtggtgaatcagctgcccacaggtctgctacaagccaccggatgccagcttccttcattgcatgggtgcctcaaagcaccttcttgaagggtttagaccatgttctgcacaggccatgcagggtgatttt

SEQ ID NO: 111106 - DNA, 614 bp, Homo sapiens
gttggacaatttaacctctaaaaagactcaacttccttaattgtaataacataataatagtatttgtagggctgttgtaaagcacataaaagtaagaacctaatacattatagctattatttttatttctattttaatagatattagggaaaaaatgttaagaatatagaaaattcattcataactaaagaagaggatttatttcacaggacacagcaaagaggttaatagagtgtaaaatacaaatacagagggaaagatctaggctaaatgtggggaaaggcagtggccaaagagttgatagtctgattatccaaagctagatctcagggtgggctggtcctacctatttcccagttcttacataatttcattaatgtgtatgcctggaaaaagatgactaaataaaataccaataactctatttttgggtcagtgccagtagggagaggcacaatcatttgggcataattttatcagtgggaggtctgggaatgagtttggatgcagtccttttcaggtattgtgaaatttcttagtaaggagaaaaaatttaaaacataaactaattcatgaaatcctcttattaactgttactgtgataaaaatctatg

SEQ ID NO: 111107 - DNA, 624 bp, Homo sapiens
tgatctcttctgtcctttttgatggcttttcctcttaaccttgtaagaacatgctagacttgggtcctcctctgctgttccttacatatatatattttatattttttttctttttctttttttttgagatagagcctcattctgtcacccagctggagtacagtggcgtgatcttggctcactgcaacctctgcctcccgggttcatgcgattctcccacctcagcctaccaagtagctgggattacaggagcaccaccacacctgggtaatttttgtgtttttagtagagatggggtttcactatgttggccaggctgggcttgaacccctgacctcgagtgatcctcccacctcggcctcccaaagtgctgggtttacaggcatgagccaccatgcctgtcactcatctcagtcacagctgccacagggaccccaagcccgttataacccaggctgtactttctgctttcacctgccccaaatctgctcctcctcgaagggccatctgtgggccaggcgctccagtcccctcactctgttcccacaagccagcagccagtgaccaaggctgtaaatcctgtcattgccttgatgtagtcaccaatatttatgtgacaccata

SEQ ID NO: 111108 - DNA, 384 bp, Homo sapiens
gagattacaggcatgaaccactgtgcctatcctggactttattttttaaatgaaaccagaatgccagtttattgatatatgagaaatggaactgctaagcagagtagattcctttttttttgaggacagtgtatgcttcctttcggaagaatagccaggtgaagcaaatataaaaggagaaggctacttatactggctaagtatagactcaggacccagtgaattggaaatcaaaaagacccaagagctttaatgctggagaaagattaccatgttaatgcttcctcaaaactggctatacatgaaaatggcacagggagcttttgtttaaaacatgctcacaaaagagtgtaaattgattcaaccattgtggaagacagtgtg

SEQ ID NO: 111109 - DNA, 536 bp, Homo sapiens
tggatttgacttattcagtatacaaaaatagagatcattaatgcaatcatcagtggcaggcctagtgaagtgggcctaggaaaactgtcccagattctcactcttgcattttctctcctataaagacactccagcaattcgagttcaaacaagtaaaactgttttgaacaccaaggctcttgttcacttcctaaattacccctaatagcactgttcttgctttgtttttgaaattaaaagcagttatttcagagtcttgcttgtgtctctgattatatttatgcactatttaaaatcactgctgaggccaggggtaattcgtactggtcatcttctctgggtgtgagtcaaatataagtttaacaattagctctgaaaacattccattgagctggggaatgcaacagtcttattacctcatcatggaattctctagcttagttaatttaaatattgtttcttagtttctgggtcaattaaatttaaatgatgtagtttatgcttcgtgaccaattaaattactaggttattacaaa

SEQ ID NO: 111110 - DNA, 145 bp, Homo sapiens
gagccaagtggatttctctccatccctgaaacattctctacattttatcacactctcctgcttaaaaaccttgattaatgtatacagatagtatgtgtataaatgcacctatgttggagtcaagtggatttctctctatccctga

SEQ ID NO: 111111 - DNA, 599 bp, Homo sapiens
gcacatgtatacatatgtaacaaacctgcaagttgtgcacatgtaccctaaaacttaaagtataataataataaaattaagaaaataataaataaagttacagtaatatatacattcatctgaatggtctgtcttttgcacagttatgatctgagttctagatgtattattaatggcttcaaaagtgtgaggctatgaacgcactgagatcataattactgcggtatagatgataaaatgcccactataatatggatttaagtagaaagcagggtacattggatcacagctatatgattttctaaatgaaaatgtcaaatagtactcaatatcacaatctcttgtagtgtagcgctacatcaaggtaactaagcatactgacagctgtatttcaaggcccagttgtcccacttctatctggggtctttcaaaatgttacctaccactttatgtctgtacttctctcatttggtggtgacatgaagaatattaataacacagattttagcaggcttccacagcagtggtgactcctacaaattccaaattatttcttctctcctttgatctcacatctttatatcactctagtaaaaatt

SEQ ID NO: 111112 - DNA, 350 bp, Homo sapiens
ccagcaaatgccaagtcctgaacttaatcctgtctttcagggcagccactcagagatccatttccaagttgtacttacatagcagaaaaaaataaataaataaaaaatgtttcataataatgtgatccatcacattctgccagccaaaattctttgcctgctcctcaaatgtagggtccacaagcaagagaaagaagtactgaggtcctctctgtgagtctcctcttagagcaaacagtctcctgtttgaggctctgaaccatcattggtgacacagtccaccgagattttctaccaccatatagagctgcccaaactttgccagggcagtgggcgatgctgcctggcag

SEQ ID NO: 111113 - DNA, 352 bp, Homo sapiens
tgcctgcagtcctagctactcggcaggtgaaggctgcagtgagcagagatcacgccacctgcactccagcctgggtaatagagcaagactctgtctcaaaaaaaaaaattactatatctttaggatctgtggagaagagaggctgaaaattaaaaacatcaacctgccaataagattgtctctagaagaggctggccatggtggctcgccccggtaatcccaggactttgggaggccgaggtaggcggatcacctgaggtcaggaattcgagaccagcctggctaacacagcaaaccctgtctctactaaaaatacaaaaattagccgggcatggtggtgcatggtacacac

SEQ ID NO: 111114 - DNA, 364 bp, Homo sapiens
catatctgaattggcctgataaaaagcctaaatttccctttttaattttcttattttttaaggaagattagaagccagcaagtcctgtgaatttcatttctcattgcattctcctaaacctcatgcaccttctgattaaaaggaagggtgtagtcttcatcttgaatttcattttgacaaaaaaaattagtttcaatcatttttctttataaatatttgtaaactctttcctctgtgcattggtgccagagtctggctctattacggtcatccacaattgatcttgaaaatatggcagaaatggtatgctggaagccttggagaatatgttttaaaagttcagaccaagttctgttttagtcag

SEQ ID NO: 111115 - DNA, 683 bp, Homo sapiens
tactctcaaattatatgattagaacttattgttcctgatacttaaccagttttcaattcaggtggctataaaccatgaatactttggaaacttctacgtggtaattagacagttatcaaaattttgtattcagagagtattttagatatgtactatatgggaattataatattttgactacagaataacaaataactgatatgtgttggatttttaaatattaatccttactaattttattctgaaatgtacacataaggtattctggaatcacagacagattatcatctgtcgtttcaagcaaataatgaccattttgttccccacaccctgatgcttaccgcaggggctactttctgaaacccaggtcaaatgccctatccatacaagcttcagagtctgtatcatagatgaagaacggagaaataggttttcttctgttcttgatttatatacaggaaagagacaactaaccccctccctcctgaaaggagaaaaaaaaaaaaaccttttgctccattgacctgttggagaattagagtcagccagatgtgagataattataagaaaaactaccaactttcttgctatttttaaaaaacgatttatgtcctgtttttgtttgtttgttgggtccctcagcaagggtccagcctgggcaacaagaacgaaactccatctca

SEQ ID NO: 111116 - DNA, 515 bp, Homo sapiens
gatgcttaccgcaggggctactttctgaaacccaggtcaaatgccctatccatacaagcttcagagtctgtatcatagatgaagaacggagaaataggttttcttctgttcttgatttatatacaggaaagagacaactaaccccctccctcctgaaaggagaaaaaaaaaaaaaccttttgctccattgacctgttggagaattagagtcagccagatgtgagataattataagaaaaactaccaactttcttgctatttttaaaaaacgatttatgtcctgtttttgtttgtttgttgggtccctcagcaagggtcttgcctgttgccccggctggagtgcagtggctggatcatggctcaccgcaacctccactttccaggctcaagcagccctcctgcctcagcctcctgaggagctgggactacaggtgtgcaccaccatgcccggctaccaactttcttgcttttaaagacaattcccaaatgattttttagtttagaaatgattcagg

SEQ ID NO: 111117 - DNA, 317 bp, Homo sapiens
cataagcagcttgataaaacgccacaagttttatgaaaataattgcttcaaaaaatataaaaagcaactgtagtttagatggattttactggccaaactgccaatattactcattaggatgcttgaaatagtactgtcttcatagcttctatggtgagcctgtataatttgaataacttatatttattatccttctcattttcaactagatgaaaaccccaagactacagatatttctaccacatattttaaactaaacccatatgtaaagtcccttcgctggagcgttaatatgtactcagaatttgttacatatt

SEQ ID NO: 111118 - DNA, 340 bp, Homo sapiens
aactttataataacagattttaaatttagatttttacataaaattgtgatataatagataaaacatttctcagaaaaatatttttactatagataaactatcagctattgtaaaatctttttacaaatgaagctaagacttttcaattttatttacaaacttttacaagctttgaaaatttggcaaaaccttaggataaaaatgactgttgaaattattctaaaagaaaaaaggttttgttttctgaacgatgtgtccttctcagtgacaaatacatacagaaaaatactcctttttaggaaaagtgtaaagggaaatggtagaaaacttgccagatatc

SEQ ID NO: 111119 - DNA, 317 bp, Homo sapiens
agaataccatcccaataaacataattcattttgttaacttcattcagtgtctcatcacacattctacctgggatttatcttttctaagttttattttattttaaattgacaaatagttgtatatacttttggaatacaatggaatgttttgacacctatacatgtggaatggtcaaatcaggctaattagcatactcatcacttcagatatttatgatatatctttaatctcaatcactttcatatatcatgctttggaattatcctaaaacttggatttctattgaaggctacactcaaggttgaggatatgttgt

SEQ ID NO: 111120 - DNA, 502 bp, Homo sapiens
tccggcgttcctccagcatgatgtgtctgggtcttaggatacaggcttaggataaaggaagtgaattttcatctccaacaggttacatttgaagatgcttctcatttactgcaggagtttgaaaacattgtaatattctcctttaattatcagtatctcagtgggaagcctgacattataattagcacaggctcctacatgggatgacattttgctcaacatatcatgttcctggtgtgcactgaggcagaagccggtagcacacttctaaatgacgctgttggatttgagcatgagagttggcaccaacgcccagagggcaaaatcacaactctgggaatcctccgtgatcccaaataaaagtggcagggaaacttttagacattctgtcatctcctgcacaggcgacagacgcgcagatgcctgagccctactttctggccttcagatcaaggaagctacagccagagtgaaagtctaatgctgcgctaggattggggtt

SEQ ID NO: 111121 - DNA, 720 bp, Homo sapiens
gtctattgaccaaggaatcacttcttacagatttccagcagtgtcattcacatgcattaaaatgtttaaaatgaaatgtatatgtaacttactttcaagttagccacctttccctttgcattccctcaccgttaccgtggtcctccatctacccctagcccaactcctaaatagttctggagctctgtagtttatagcactttaacaaattacttcagagaaacagaaagccctgtgctaaactttgagtaaaatcccagcagtttaaaccctgtgcatcagcgttcggaaggcattttctgcacgactttctcccacttcccttcccacctgccagcctcttcctgctcacaccactgtggccccctctccagcgggccccagtggccagtgttctgtgctcacccactgatgtcattcttagctccctgttcattccctcctgtgttcccagcttcttccgtgctatttgtgcagctcagaactcacatccttcatgaggcctccttgtctggttactaccctgtcccctccaacgagttattcctcctgctcagcaatctgcatagaggccgtgtgcttttatttctctgcaactgatctcagtttgtcagttaatgtgtattttcttcccagctaaatcacaactttgataggtcattttctcttgcatgtcttctccaattctgttctacccattcagtcaacacataggaattg

SEQ ID NO: 111122 - DNA, 484 bp, Homo sapiens
catttacctttttgaacattttctctgtaaaatggggcagtgttccccacctcatagcaatgtgaggagggttagatgatatagtgctgtaaggtgcccacaagggctggtgctgaagagattgtcaacacaagttctatgaagtcacaccatgtaggtaactttctacttatgaatccagacttaccccaaacttccatctctcacacactcaatcagaggcctatgtgggagtcccttttctcctggttcctcccttcatggccttgtctgcctgcaggaatatttggtcaacatgctggatcccaagttgttgaaccagctgctggtgaagaagggaagtggctgcaggggcttcgtgatgacgctggcctgccctgaacttgtgcctgtcctctggcctcctgtccggccatcctcaggctgagggaggaaagaggctgctgagcctggagtgagctgccagctaccaagaagtccctcc

SEQ ID NO: 111123 - DNA, 3748 bp, Homo sapiens
agcggcgctccgctcccgcgcggttgggagtgtccagcgccctccgcgatttgggctccagcgggcagggtgacttcctttttctgcccactctggtaacttattgctctgctgggctctttcccttagggtctctggccctgttcttgccccagcatgacttttatcgggacgccgttgtggaagcctcacgcaggagccctgcccccgtggagaagatcccactggtgactccaaccctaccaccatgaatggggtcctgatcccccatacgcccatcgcagtggacttctggagcctgcgccgggctggcaccgcacgtctcttcttcttgtctcacatgcactcggaccacaccgtgggcctgtctagcacctgggcccggcccctctactgctccccaattacagcccacctcttgcatcgtcacctacaggtatctaagcaatggatccaagccctggaggttggtgagagccatgtattacccctagatgaaattggacaagagaccatgaccgtaaccctcctcgatgccaatcactgtcctggttctgtcatgtttctctttgaaggatattttggaaccatcctctacacaggtgattttcgatacacaccatccatgctaaaggagccagccctgacactggggaaacagatccatactttatacctagacaacaccaattgcaatccagccctggttcttccttcccgacaagaagctgcccaccagattgtccagctcattcgaaaacacccacaacataacataaagattggactctacagcctgggaaaggaatcactgctggagcagctggccctggagtttcagacctgggtggtattgagtcctcggcgcctggagttggtacagctactgggcctggcagatgtgttcacagtggaggagaaggctggccgcatccatgcagtagaccatatggagatctgccattccaacatgctgcgttggaaccagacccaccctacgattgctatccttcccacaagccgaaaaatccacagctcccaccctgatatccacgtcatcccttactctgaccattcctcttactccgagcttcgtgcctttgtcgcagcactgaagccttgccaggtggtgcccattgtaagtcggcggccctgtggaggctttcaggacagtctgagccccaggatctccgtgcccctgattccggactctgtacagcaatacatgagttcttcctctagaaaaccaagccttctctggctgttagaaaggaggctaaagaggccgagaacccaaggtgttgtgtttgaatcccctgaggaaagtgctgatcaatctcaagctgacagagactcaaagaaggccaagaaagagaaactttctccctggcctgcggaccttgaaaagcagccttcccaccatcctttgcggatcaagaagcagttgttcccagatctctatagcaaagaatggaacaaggcagtgcctttctgtgagtctcaaaagagggtgactatgttgacggccccactgggattttcagtgcacttaaggtctacagatgaggagtttatttctcaaaaaaccagggaggaaattggtttagggtcccccttggtacccatgggagatgatgatggaggtccagaagccacagggaatcagagtgcctggatgggccatggttctcccctgtcccacagcagcaagggcacccctcttctagctactgaattcaggggtctagcactcaaatatcttctgactccagtgaactttttccaggcagggtattcttccaggagatttgaccagcaagtggaaaaataccataaaccctgctgaagacaggagagtacagaatgacaacattgagcccacactgcagttttgaagatagtaactgatggctggtgggaaagagtttgtttttggggcctacttttctatctttacaagactcttatgggcccaccgtggagcagcacttcccaaaacttgttcactggggtcctcgtgcctatggaatccttctttttataactaagtttaagaaatactttttttataaaatctttggagtatgcgtgagcaaattaaaagttctttgaagtcctacagtaacttaatctgtttaaccttgtttaacccagtatttctcaaacttttgtgaacatgcaatcatcttatgtgggtacagaaagaggtaaagagtctgaatcaaaaaggaccaggttattgctgttgctgttttgtggtgtcatgagccattctccatgtccccttctccctcttctcagatcaaaatccctagggagttctatttttaaaattatgaactatggcgctgcatgcttcaatcctgaacgtcactgacttgctgtgaccatccaaataattttcctgtctctgcctctgggagggaacaggaagcgatgaagaggtcttggaacagtagtgaaaattctacctctatgtccttcatgaggatgtgcagtatcccagtatcactgggatccatgtggaacagagccagctggggggttgggcagctctctccaaggcagtacctagagcccagctgaacaacaaggctttgggtgtgaagggactccccagcctggagaccctatttggctgaaacagttacaaaatatcaaatgtgttgtcagatattcctccaattgttcacatagctgggatatttgttgctcccctcaccccttggattatgtagggagccagtgcacacagcctgtttgttttagtatccaaggaagagaccaaggagccagctggcgggaaggggtgggggtgtgcagtctgccctgtccttctgctcataacctgacaaaatgccaaactagtaagcaggatagctgataccacggctatgagggagtaggctctgagagggcacagacttgtggagctgggcgtctggatcaaaactgctttgggatggaacctcgagccctagcagtgaagaagattccatttcttgtccaggggatttaaaagagttttctgctttgagagagaaatagagagtttagaaagcaattgctcttgggaaagctatacacagctctgttttgtcaatgacctttgttgtaagtctcccaacgtcctattaggagccacagcaggtgaggcatttggtgcagcaggaaacatggggactgcctaggctcgaatctgtggcaccctgagcaattacttaaattgtggagcctagttcctcatctgtaagatggacttgagattcctacctctcatgattactatggagattgaataattggtaaaattctcctagctcagtgactgccacaggatgggtctttcagattttggttctctttagcttctggttcttgaaagaaattaatctgtatataacataagaaactttgaaagtcaaaaaaacaaaaaattttaattcctcgtagattaattgatttgctatcttttagtttttttttctatgcatgtagatgtattaaatatgtaaatgtttttcaaagttgaggtaatattgtatagaattttatagcctacattttaatttcttgatatcttaagcatttcacttattagatattgttcaaaaatgccatttttaatatttgtataataccctatcatgtgagtataccttaactaagccattcccatattcaacattttgtgtactgtttttctaattacatatattacaatgaacaaccttatgcataaaaaaag

SEQ ID NO: 111124 - DNA, 3695 bp, Homo sapiens
ctaacgttacttgcgtctgcagtgggcatcatttcccattaagggtctcgtggccactgattcgtttgacccctagacagtagacatttattaatcgggggaaacgacacgtatggtcggtaaagacacatcgaccgtcgacggagccctgcccccgtggagaagatcccactggtgactccaaccctaccaccatgaatggggtcctgatcccccatacgcccatcgcagtggacttctggagcctgcgccgggctggcaccgcacgtctcttcttcttgtctcacatgcactcggaccacaccgtgggcctgtctagcacctgggcccggcccctctactgctccccaattacagcccacctcttgcatcgtcacctacaggtatctaagcaatggatccaagccctggaggttggtgagagccatgtattacccctagatgaaattggacaagagaccatgaccgtaaccctcctcgatgccaatcactgtcctggttctgtcatgtttctctttgaaggatattttggaaccatcctctacacaggtgattttcgatacacaccatccatgctaaaggagccagccctgacactggggaaacagatccatactttatacctagacaacaccaattgcaatccagccctggttcttccttcccgacaagaagctgcccaccagattgtccagctcattcgaaaacacccacaacataacataaagattggactctacagcctgggaaaggaatcactgctggagcagctggccctggagtttcagacctgggtggtattgagtcctcggcgcctggagttggtacagctactgggcctggcagatgtgttcacagtggaggagaaggctggccgcatccatgcagtagaccatatggagatctgccattccaacatgctgcgttggaaccagacccaccctacgattgctatccttcccacaagccgaaaaatccacagctcccaccctgatatccacgtcatcccttactctgaccattcctcttactccgagcttcgtgcctttgtcgcagcactgaagccttgccaggtggtgcccattgtaagtcggcggccctgtggaggctttcaggacagtctgagccccaggatctccgtgcccctgattccggactctgtacagcaatacatgagttcttcctctagaaaaccaagccttctctggctgttagaaaggaggctaaagaggccgagaacccaaggtgttgtgtttgaatcccctgaggaaagtgctgatcaatctcaagctgacagagactcaaagaaggccaagaaagagaaactttctccctggcctgcggaccttgaaaagcagccttcccaccatcctttgcggatcaagaagcagttgttcccagatctctatagcaaagaatggaacaaggcagtgcctttctgtgagtctcaaaagagggtgactatgttgacggccccactgggattttcagtgcacttaaggtctacagatgaggagtttatttctcaaaaaaccagggaggaaattggtttagggtcccccttggtacccatgggagatgatgatggaggtccagaagccacagggaatcagagtgcctggatgggccatggttctcccctgtcccacagcagcaagggcacccctcttctagctactgaattcaggggtctagcactcaaatatcttctgactccagtgaactttttccaggcagggtattcttccaggagatttgaccagcaagtggaaaaataccataaaccctgctgaagacaggagagtacagaatgacaacattgagcccacactgcagttttgaagatagtaactgatggctggtgggaaagagtttgtttttggggcctacttttctatctttacaagactcttatgggcccaccgtggagcagcacttcccaaaacttgttcactggggtcctcgtgcctatggaatccttctttttataactaagtttaagaaatactttttttataaaatctttggagtatgcgtgagcaaattaaaagttctttgaagtcctacagtaacttaatctgtttaaccttgtttaacccagtatttctcaaacttttgtgaacatgcaatcatcttatgtgggtacagaaagaggtaaagagtctgaatcaaaaaggaccaggttattgctgttgctgttttgtggtgtcatgagccattctccatgtccccttctccctcttctcagatcaaaatccctagggagttctatttttaaaattatgaactatggcgctgcatgcttcaatcctgaacgtcactgacttgctgtgaccatccaaataattttcctgtctctgcctctgggagggaacaggaagcgatgaagaggtcttggaacagtagtgaaaattctacctctatgtccttcatgaggatgtgcagtatcccagtatcactgggatccatgtggaacagagccagctggggggttgggcagctctctccaaggcagtacctagagcccagctgaacaacaaggctttgggtgtgaagggactccccagcctggagaccctatttggctgaaacagttacaaaatatcaaatgtgttgtcagatattcctccaattgttcacatagctgggatatttgttgctcccctcaccccttggattatgtagggagccagtgcacacagcctgtttgttttagtatccaaggaagagaccaaggagccagctggcgggaaggggtgggggtgtgcagtctgccctgtccttctgctcataacctgacaaaatgccaaactagtaagcaggatagctgataccacggctatgagggagtaggctctgagagggcacagacttgtggagctgggcgtctggatcaaaactgctttgggatggaacctcgagccctagcagtgaagaagattccatttcttgtccaggggatttaaaagagttttctgctttgagagagaaatagagagtttagaaagcaattgctcttgggaaagctatacacagctctgttttgtcaatgacctttgttgtaagtctcccaacgtcctattaggagccacagcaggtgaggcatttggtgcagcaggaaacatggggactgcctaggctcgaatctgtggcaccctgagcaattacttaaattgtggagcctagttcctcatctgtaagatggacttgagattcctacctctcatgattactatggagattgaataattggtaaaattctcctagctcagtgactgccacaggatgggtctttcagattttggttctctttagcttctggttcttgaaagaaattaatctgtatataacataagaaactttgaaagtcaaaaaaacaaaaaattttaattcctcgtagattaattgatttgctatcttttagtttttttttctatgcatgtagatgtattaaatatgtaaatgtttttcaaagttgaggtaatattgtatagaattttatagcctacattttaatttcttgatatcttaagcatttcacttattagatattgttcaaaaatgccatttttaatatttgtataataccctatcatgtgagtataccttaactaagccattcccatattcaacattttgtgtactgtttttctaattacatatattacaatgaacaaccttatgcataaaaaaag

SEQ ID NO: 111125 - DNA, 335 bp, Homo sapiens
accagcctggccaatatggtgaaaccccgtctccactaaaaatacaaagattagctgggcatggtggtgtgcgcctgtagtcccagctactcgggaggctgaggcagacgaatcgcttgaacctgggtaggcggaggttgcagtgagctgagatcgtgccactgcattccagcctgggtgacagagtgagactccatctcaaaaaaaaaaaaaaaaaaaaaaaaagtgaacaaacatcatgaatcatacaaataacaatattttaattaactaactgccttaaacattttatgactttttttccttacatccttggctacatatccttcagtctt

SEQ ID NO: 111126 - DNA, 716 bp, Homo sapiens
aggtagtaggttgcatagttttagggcagggattttgcccacaaggaggtaactatacgacctgctgcctttcttagggccttattattcaccgataacctgtttccttgctactttgctttggtgtaagcagagttctttctgtaggttttttcaaatgaaaacattgcaagaatatcaaagagagcagtgtttgcgttagtgattataaactgcagcatggtgctgacattgataactgaaagtcaactaatgagaatttgagacttctgaagtacacttagttgctagtgtctcccttttggtgtcactggaaagtttagaaagcatggttttgtttttgctcaggtttctctttctgtgatgcagagactctcagctgttcctcctctatgtctacattatgtctgaaggaaagaatttaacaaaacttgaaatactgctgtttttctacaatgtttgtaaatatttatcttgctgcttttctaggtttgtcttctggatttaaaatttggggcggctggggtggaattgcatggtttgggaatgggtaattgagctgctgctcattatggtatgtaacagtgatttgtctgtttaatatgtacaagaactggaaggtcaataaaatgaaagtggttgtcttgactgggtaatagtgttacatattttgttaaaagttatacatcttttcaataaaaacactgcatacttca

SEQ ID NO: 111127 - DNA, 822 bp, Homo sapiens
aggtagtaggttgcatagttttagggcagggattttgcccacaaggaggtaactatacgacctgctgcctttcttagggccttattattcaccgataacctgtttccttgctactttgctttggtgtaagcagagttctttctgtaggttttttcaaatgaaaacattgcaagaatatcaaagagagcagtgtttgcgttagtgattataaactgcagcatggtgctgacattgataactgaaagtcaactaatgagaatttgagacttctgaagtacacttagttgctagtgtctcccttttggtgtcactggaaagtttagaaagcatggttttgtttttgctcaggtttctctttctgtgatgcagagactctcagctgttcctcctctatgtctacattatgtctgaaggaaagaatttaacaaaacttgaaatactgctgtttttctacaatgtttgtaaatatttatcttgctgcttttctaggtttgtcttctggatttaaaatttggggcggctggggtggaattgcatggtttgggaatgggtaattgagctgctgctcattatggtatgtaacagtgatttgtctgtttaatatgtacaagaactggaaggtcaataaaatgaaagtggttgtcttgactgggtaatagtgttacatattttgttaaaagttatacatcttttcaataaaaacactgcatacttcaaaactagtgctttttaagtcatccttaacccttatccccatccttgcagtagtagatgcatttttcatttgtaattattatgatttgttcttagtttcatttttca

SEQ ID NO: 111128 - DNA, 470 bp, Homo sapiens
aataaaactacagggaaaaactcacaagatgaaaacctgccgcttctcccccatgtcccacacctccatacacttcctgtctaatcacagttgctaacattatttgtcctactttgcagaagtcaccaaatgcttaggaagccctggatctatcaaaatgtgtcatttttgcttttcagaaaatgagaaaggaatgaaacagaaaaacgcaatggattctttctttaatcaatgtcaaagacatctatctcatcacatgaatggaagcctagacgtgtcatctcatcaataacctgagagaccctaaccatcagtgcatattgacatattaccgcttttgctttttaaaatttactacaggccaaccagatgggaagtgttaaggtggcatcttctcatcagcacagtgatgaactgatcatgcaaaaccaatcctgaaggattttacttggaaacattacatgaatcat

SEQ ID NO: 111129 - DNA, 393 bp, Homo sapiens
gctttgctgttgtttgctggcctcatgacccttagtaaatcattaatctctctgagccttagggccactgagagaatgtatttaagggccacataatggcctgtgaaaacagtatttgttgttggtttttattgccaatactactttaagtttaaggtgcctgaagggcattagaagcctgctagcacctgtgacccttgcaggttacttctcgtgtcttgatttccaagcattagtgatgactaccttggaagctattggctgatagaggatgagcttgaatgctgttcccaaagtctcccgtctcccaagtttccagtgccttctcagggcaatgaaaatagtttgtggacagctgggggatggtttcagtgtcaaactttgggagtaaaa

SEQ ID NO: 111130 - DNA, 827 bp, Homo sapiens
tttcttttctttctctcagtatggaaggagacagagaactgtgactgcctgcaggtcttctaggtgacccactcactgggcagaggcacaggctctggaatgggcactctcattagcaagatctgagaagagtaccctgattgcattgtgaacatcttcagtgtagtgccttcacccaaagtgacaccaaggtcgagccctacagtgccaccctctctgtccatcagttggtagagaacactgatgagacgtattccattgacaatgaagccctgtataacatctgctcccgcactctgaagcggaccacaccaacctacagggatatgaaccccctcgtctcagcaaccatgaacagtgtcatcacctgcctctgtttccctggccagctcaatgccgacctccacaagttggcagtcaacatggtccccttcccacatctccatttctttatgcctggctcttcccctctcaccagccatggaagccagcagtatcaagctcacagtgtctgaattcacccagcatgtcttcaatgccaagaacatgatggctgcctgtgaaccccgccatggcttatacttcaccttggctgctgtcttcactggtcagatatccatgaaggacgtcaatgacaaaatgttaaatatgcaaaacaaaacacggcagctactttgtggaatggatctccaacaacgtcaagaacagtctgacatcccattctatggcctgaaatggtattcactggtattgtcaacatggtcttccaaagctcttcaagtacatcgcagatcagagaaagggatcaagtggggaaaagagaccat

SEQ ID NO: 111131 - DNA, 118 bp, Homo sapiens
cagagaggcttcaggaagcatgttgccaagatgaaagaaccagtgcccgagtggaggggaaagacacaggaggggactgggcatggagaggcccccaagggaggtgtgtggtccggca

SEQ ID NO: 111132 - DNA, 1570 bp, Homo sapiens
tacatgacaagatgtttagccttattggtatattcgtatcagggaaagcaaactaaaaccacaatgacagggtgatgtcagcgaaaatggtagagtaggacttctgtgggtcatccctctgcagaaacaccaaacaccttgacagaaaagtcagaatttagcttatcaaaactctggaaaggtaatcaaaggtttacagcagccaagcaaatacttcgccagaagaaagggcactgaaacaaggtaagagatctttgtggcattttagcttaccctagcctcacctcccttcctggtatggctgcagtcttgaagatgacagcctgtgttccccatgctggtgcctgattccagagagtggacactcttcctcctgagggattctgtgttctgttttgtcctttctccaaaggactgccaccaggggcaaaaaacaaacaaaaaaaccaaaaaaagaaaaaaaaaaaaacagggcaaacaataagatattgaaagcctgagaggaaaagctgtagagtgagtttttgtagaggaataggagctttgaaaagctattgtggatgagaaactagaaagccaagtgcacagctcagggcagtatgtgtgctcagaaaagacctgagaaagccattagctttcacctctggcttgtctttaggttcaacacaaacaggaagtgaatattaaggtagatttataaaggccctgggtaagttttgaaggagtgccccaacagctaatcagtagagacctggcgagcattttacttttctttttctttcttttttttttctttttggtttatttgttttgaaatgtggtcttgccttgctcaggctaatcttgaactcgttggttcaagcgatccttccacttcagcttcctgagtagctggaattacaggcacacaccactgtacccatctatttttgtttttattttttacacattataaatgttcagtttttttaaaaaaaattacgaagcatgtgaagaatctagaaaatatgcttcattcacaagaaaaaagaaatgaacagaaactaccccgaggaagcactaatactagaattactagacaaaaactttaaatcagctgtcttaagtatactcaaagagctaaaggacaccatggacaaagaagtaaaggaattcaagataataatgtctcaacaaatagagaatatcaataaagagaaatttttaaaagtaggcaaagagaaattttggagctgaaggttacaataattgaaatgaaaattcactaggggagctcaacaaaagatatgagcagacagaagaatcagcaaacttggagataggtccactgaaattatatagtttgaagagcacacatttaaaagactgaagaaaaatgaacagagtccaggagatgtgtgggataccaacatatatatcatggtaaggagagggagaaaggtgcagaaaacatgtttaagaagtaattgccaaaaccatttcaaatttgacaagacatgaatatacacatcaagaagctcagctaacacccaagaaggataaactcaaagacatccatacaagacacatt

SEQ ID NO: 111133 - DNA, 742 bp, Homo sapiens
ggagcaatgtttgcttctaggactggggcagtgaaaacataagatgatcctggagcatcctgatgtgccagcaggccagaaagtgctcaaaacacaaggatgtggcatgcgtcgtaatccaaagtaaaatataaagagacgtgagtccatactatgcaaatacattgttaattaaatgaatgagaaggaagagactaatctttcccatggaagaatttcaaataatttatgtagaaaacatgagggcaaagaaaatcaccattagaacactatagtgatagtggctgttggcaagatccaatgagggacccatattagtgggtgaaacttgaggaggaaacagggtatttgcaaagcctgaaagtatctttaaccgaatatttactaattaccatggttgttttaatatacactcacaaatatattgttatttctgccttaaagaggtggagtttaattttcctctccttaagtgtgggctggatttagtgactcaattttaacatatagaggatggaagggaaaaataacctcgcagaggagcaacctggcagacacaagctaaaccgagtgattgcggttcatgtcaccagtgatgccttatccccataggatgtgatgaaaaggccacctcacctctgcaacattcttccctcaaatccataatcctagtctagtcagacaaacataaaccaagggaactccacacatatccaactggttttcagcaaaagtgccaagg

SEQ ID NO: 111134 - DNA, 351 bp, Homo sapiens
ttcaatgggacctccatctcctttgttatagccagaaatcttgaggtcacccctgattggaactttccctctcctgtctcactaatcctcagtctcctcccctctaccctgaaattatttgggaatctgttcatttttctccctccctcctgccaccacatctaattcaaatcttggaaagcacttagatcagaactctatgacattggtcttggcagtaatttcttggatatgacaccaaaaagcacaggcaacaaaagcaaaaatggccaagtggaactgtgttaaactaacagctcttgcacagcagagggaaccatggaaaagagtgaaaaggcagcctgtggaatg

SEQ ID NO: 111135 - DNA, 450 bp, Homo sapiens
aaaaaaaaaggtaccactggatttaggacagaagaaattgggagttcctcaataagagagctatagtttgcttggtcctgtgaccttgtttcctaggcagaggcttaggaactaaagaaaaaaatgcaaacaggaagaagaaactttgcagatacatttgtaaatgattgttcaaggatggagtacactccttcccgtgccttggtcctccattaccccagcccctgtcaatttagacaaacctccagaaagaaggaacttggctgacattgaccaagattaaatttcagttcccaggcaaagtgaggtcttaaaatagaaactaatctatatggggcatggtggctcatgcctgtaatcccagcactttcggaggtcaaggagggaggatcacttggagaccacgagtttgagaccagtctgaggaaccttaatgagaccctgttccct

SEQ ID NO: 111136 - DNA, 1523 bp, Homo sapiens
gatgctaaataatgtagagaagacacaagcacttgttttggagacagaatatttgccctctgggcccagatgtgccatttaaaattgagtgttctttcattcatttattcattcttgcccttgtttggtaaagggtattgggaaagatctgtaattaaagataaaagtgtaaaaagaaagaaaaattgccttgaaaacaaaacaaaagtgccagcaacggggctaaaaagataacataatgttatatgcccttgctataaataggtcataatttttgtttcaagatttctagcagccaatgcaaaaaaggaaatcctggtgaaattacacaagtttaggatatcttccagaccacgaatcaaccagtcacaaagaatatgaatacttattttcttaatattaggaacagaaatctcccatgggtcctagtaaggagaacatggaaagtaagtgattacgtcaattgtagtatcttttaaaagcagtattgagttttataaggaagtcacttcttcttcagcctatacacttccataatttggagatgtttgggcttcctttaaggttcctttcagtttcaacatacgtgactctaagctggaacccgatgagatcagtgagttgttaaatgtgaacatgatcaaactgaattaaaaagctgttaagaaattagatatctcatcttcagtttttggactttatgatttttctttccattcctaatgttttttctatcacagaaaaaaagtctcatggtaactgcttttaattttgactattttctattcttccaagaaaatcatttattttaaacatacaacttatcttttttagcatattctgattgatgcaaatactcttgtataactttcaatagtcaatgaaatattggataaaatgtatttctaagaagatagccatatatgtgtactttttcaaaattgctgctttttgcctattattgtttgctcgtttgtcttttggttttgccttactataatagaagacttattagttatatttaactttcctcctttgaggaactaatcattatccaacttaattcataaacttcacagatggcatttcttcttaacttagaactatttttgtcttactattctgattctttcttctataagacagcctcatgaaacctaaacacccaacatggaaatattagatggcaaatatgttttccattttgtttggccttaattttattcaggtaaataattgggttgtgcttaacttacatggaatactgcagtttatatgatgtgtcataacatcaaagctaaattaaggaacaagggagagagttgtgcttttttccaaactagtacaacttataatgttatgctgttttttaaaattattgtcagtcttgtttctcttatagcacaaggtctctcttaattatgtaatttaaaaaatgtatccttctcttcaagaccagcctgactaacatggtggaaacgctgtctctacttaaaaatacaaaaattagcctggtgtggtgg

SEQ ID NO: 111137 - DNA, 429 bp, Homo sapiens
gtagccagggtttagatgaggtatatatgctttttagcctgaaacaagatggtaactacagtgaacaacttcattttgtcttttttgataatccattcagttttctttttttgtgtacttttgcatatagaggcacagccttcactgaatggtggtgtctccatggaagcaaagttgaaacttatgaatatctggaaatttcaaggaaaaactaccttctgcctaaatcatttgagaaatactagccaaaataattgtttcctatcaggaactaattatatcatgacttaacactgccattgatgctagttatctgtattaagtaaacatgtcatagggttagtttgtgtagacaaatgacatttgcattattttttcagtgcagacttttttttctttctttttttttttttttttttttgagacaga

SEQ ID NO: 111138 - DNA, 309 bp, Homo sapiens
cttatgtccagcaagggagaaaatattaatcccaatatggaacagggtgtacacacccatgaggtattgttcctaatatccagggagggaaaggatgatattactcccaatgttgcagtggtgtataaccccccgtgatattgttcctaatatctaggtggggaaagtacagtattactcccaatatggcaggggttgtacaccacctttgtgatattgttctacatatccatggggaaagaaaatgatagtactccataatatcacaggtggtgtacaaccccttgtgatactgtttctaatatccat

SEQ ID NO: 111139 - DNA, 243 bp, Homo sapiens
tcctacagtgtggcaccatgcaggtgtgtgtgtatctgtgcacctatgtcttcagggacccacctgaagaggagcagcacggcctggtggtagaatgaaagggaactgcttcccggggagtaggaagggagaggatgtgttgcttgctctctgcctgacaaggaggccagtgggtccattgtcatttatgataactttccacagagcaacccactatgcactgcacacctgctggaaaccaga

SEQ ID NO: 111140 - DNA, 912 bp, Homo sapiens
ttcttccggccgctctgaccccggggctgcggctccgagatagctcagggcctggaagtgcatgctgggaccaactacataatccttggtaagaaaaggaggtggccctgacaagtgcaactcgagaaatgcaatgctgtagagtccaaaggtgtctgacttgaacgaaatgatcccactgggggacaatgcaacatatactccagggtcatgttttgtcatgatgcagcaaggagatctgttcctaacttggacttggttgtctaaccctcatctcttctctttattacaaggtgaactggaacttacaccttgcttctcctgttctcaggagacttggactggaactataccaccagctgtctcggatctccggcttgcagacggcacatcatgggacttctcagtctccatcactgcatgagccaattccttataataaatctctgtctctctcattatacatatcttggagaaccctcaggaaccttgactaatacacaagataaattcagttttaattgtatgtgaggcattgtggtggagatatatactagatacccacacgcaagtgggcaaaggtctgggatcaaaatatctatttgggaatcttcagcatatgggtgatagttgaaatcataaaagtggttgaactcttctgggactctcatatattgtaataggatgaacggcagaaagaacagatacagatacatgtaggttggttaatctgatggttggaatgtggacttcgtattcgatgtacttggtgtgtgtgtctttgtttataatgaagtcaattactcagtaatgtgcatataataaattccgtagtgtgtgtggttcaaaaaaaaaaacattcctaaaaacgcacattttaattattatttaaaaaaggcctttttggcctca

SEQ ID NO: 111141 - DNA, 318 bp, Homo sapiens
gcacatacaaacctcgacagatgttaagcacggtcatttctgctttcacccttggttcctggacctgggtattctacctctcaggaatgtggcatcatatacaggtctttgaatatatatagtgaatataaagtgtcctgaagtatagcatcccttccttgtaaagtgttgttaaatacctatttcctgggtctcctgatggtagtttgccttaaaccaaataggatatgtgatgctggtcttttctctgccagcatgctcttgagtattctcttttttttaacctcctatgaaaaaaaaaaaagctgccacccaaac

SEQ ID NO: 111142 - DNA, 353 bp, Homo sapiens
cactctggtctcaccactgcactccagcctgggtgacagtgagactctgtctctaagaaaattacaaaaattacaaaaataaacacagcataacaactatttatatagcatttacattgtgttaggcattataagtaatttggtatcttttgggtgggggtagtagttcctggaaccagtccctcatggatacctagggacaacgtccctaatgacatatgacgttgagcatcttttcatgtgcttagtggccatttgcatatcttctttggagaagtatctattcacagcctttgcccctgtaaaattgtatttgtctttttatgaatgagttctaagagttatttatatat

SEQ ID NO: 111143 - DNA, 158 bp, Homo sapiens
taactcatccagataacatttttaagtgtctgggttatttttctaattacaaaggtaatacctgctcacttaaaaatattcaaagaatacaaaaatatgccaggcacagtggctcacgcctgtaatcccagcactttgggaggccgaggcaggcagat

SEQ ID NO: 111144 - DNA, 344 bp, Homo sapiens
gtcacgcctggtgccctttgatccagctggactgtgacctgatcaagctgcttgggtgcaatggctgacataggtggaatgaatgatcccgtcacccactgagatagcctttcacaaagtctagacctctttttttttctttttcttttttttgagagggagtctccctctgtcgcacaggctggagtgcagtgtcgtgatctctgctcactgcaagctccgcctcctgggttcacaccattctcctgcctcagccttccgagtagctgggactacaggcacccgccaccaggctggctaatttttttgtatttttagtagagacggggtttcactgtgttagc

SEQ ID NO: 111145 - DNA, 1762 bp, Homo sapiens
ggggcgtggctcttcggagaggcggcaaattgcaaggagacgccgccgccttcatgctgccggcgggctgctcgcgccggtgaggcctgcgcggcaggagggggtgggaggatgcgggcgggccggtagccaggcgcggggcccgaggcccgacgctggccgaggtgctgagccgccggtgcgtcccccaggctggtggccgagctgcagggcgccctggacgcctgcgcacagcgacaattgcaattggagcagagcctgcgcgtttgccgtcggctgctgcatgcctgggaaccaactgggacccgggctttgaagccacctccagggccagaaactaatggagaggacccccttccagcatgcacacccagtccacaagacctcaaagagttggagtttctgacccaggcactggagaaggctgtacgagttcgaagaggcatcactaaggccggagagagagacaaggcccccagcctgaaatctaggtccattgtcacctcttctggcacgacagcctccgccccaccgcattccccaggccaagctggtggccatgcttcagacacgagacccaccaagggcctccgccagaccacggtgcctgccaagggccaccctgagcgccggctgctgtcagtgggggatgggacccgtgttgggatgggagcccgaacccccaggcctggggcgggcctcagggaccagcaaatggccccatccgctgctcctcaggccccagaagccttcacactcaaggagaaggggcacctgctgcggctgcctgcggcattcaggaaagcagcttcccagaactcgagcctgtgggcccagctcagttccacacagaccagtgattccacggatgccgccgctgccaaaacccagttcctccagaacatgcagacagcttcaggcgggccccagcccaggctcagtgctgtggaggtggaggcggaggcggggcgcctgcggaaggcctgctcgctgctgagactgcgcatgagggaggagctctcagcagcccccatggactggatgcaggagtaccgctgcctgctcacgctggaggggctgcaggccatggtgggccagtgtctgcacaggctgcaggagctgcgtgcagcggtggcggaacagccaccaagaccatgtcctgtggggaggccccccggagcctcgccgtcctgtgggggtagagcggagcctgcatggagcccccagctgcttgtctactccagcacccaggagctgcagaccctggcggccctcaagctgcgagtggctgtgctggaccagcagatccacttggaaaaggtcctgatggctgaactcctccccctggtaagcgctgcacagccgcaggggccgccctggctggccctgtgccgggctgtgcacagcctgctctgcgagggaggagcacgtgtccttaccatcctgcgggatgaacctgcagtctgagcctttcccatgctgccctcggcctgttcagatggggattgggggtgtcttccctggcactgtgctcggggacccagagatgcctgtgcttccctgggaaacctggtgaactggaccaggtggcctcactggctcttctcaggacaactaagcctgctggtcagggctggctttcagccttcctaaggctcctggactccagaggccagcggggagcctttcctggctccctctgttttctctcactgtagaccaaagagccgcttgtgtgatattaaagccactttagaaagca

SEQ ID NO: 111146 - DNA, 1650 bp, Homo sapiens
ggggcgtggctcttcggagaggcggcaaattgcaaggagacgccgccgccttcatgctgccggcgggctgctcgcgccggctggtggccgagctgcagggcgccctggacgcctgcgcacagcgacaattgcaattggagcagagcctgcgcgtttgccgtcggctgctgcatgcctgggaaccaactgggacccgggctttgaagccacctccagggccagaaactaatggagaggacccccttccagcatgcacacccagtccacaagacctcaaagagttggagtttctgacccaggcactggagaaggctgtacgagttcgaagaggcatcactaaggccggagagagagacaaggcccccagcctgaaatctaggtccattgtcacctcttctggcacgacagcctccgccccaccgcattccccaggccaagctggtggccatgcttcagacacgagacccaccaagggcctccgccagaccacggtgcctgccaagggccaccctgagcgccggctgctgtcagtgggggatgggacccgtgttgggatgggagcccgaacccccaggcctggggcgggcctcagggaccagcaaatggccccatccgctgctcctcaggccccagaagccttcacactcaaggagaaggggcacctgctgcggctgcctgcggcattcaggaaagcagcttcccagaactcgagcctgtgggcccagctcagttccacacagaccagtgattccacggatgccgccgctgccaaaacccagttcctccagaacatgcagacagcttcaggcgggccccagcccaggctcagtgctgtggaggtggaggcggaggcggggcgcctgcggaaggcctgctcgctgctgagactgcgcatgagggaggagctctcagcagcccccatggactggatgcaggagtaccgctgcctgctcacgctggaggggctgcaggccatggtgggccagtgtctgcacaggctgcaggagctgcgtgcagcggtggcggaacagccaccaagaccatgtcctgtggggaggccccccggagcctcgccgtcctgtgggggtagagcggagcctgcatggagcccccagctgcttgtctactccagcacccaggagctgcagaccctggcggccctcaagctgcgagtggctgtgctggaccagcagatccacttggaaaaggtcctgatggctgaactcctccccctggtaagcgctgcacagccgcaggggccgccctggctggccctgtgccgggctgtgcacagcctgctctgcgagggaggagcacgtgtccttaccatcctgcgggatgaacctgcagtctgagcctttcccatgctgccctcggcctgttcagatggggattgggggtgtcttccctggcactgtgctcggggacccagagatgcctgtgcttccctgggaaacctggtgaactggaccaggtggcctcactggctcttctcaggacaactaagcctgctggtcagggctggctttcagccttcctaaggctcctggactccagaggccagcggggagcctttcctggctccctctgttttctctcactgtagaccaaagagccgcttgtgtgatattaaagccactttagaaagca

SEQ ID NO: 111147 - DNA, 1827 bp, Homo sapiens
ggggcgtggctcttcggagaggcggcaaattgcaaggagacgccgccgccttcatgctgccggcgggctgctcgcgccggctggtggccgagctgcagggcgccctggacgcctgcgcacagcgacaattgcaattggagcagagcctgcgcgtttgccgtcggctgctgcatgcctgggaaccaactgggacccgggctttgaagccacctccagggccagaaactaatggagaggacccccttccagcatgcacacccagtccacaagacctcaaagagttggagtttctgacccaggcactggagaaggctgtacgagttcgaagaggcatcactaaggccggagagagagacaaggcccccagcctgaaatctaggtccattgtcacctcttctggcacgacagcctccgccccaccgcattccccaggccaagctggtggccatgcttcagacacgagacccaccaagggcctccgccagaccacggtgcctgccaagggccaccctgagcgccggctgctgtcagtgggggatgggacccgtgttgggatgggagcccgaacccccaggcctggggcgggcctcagggaccagcaaatggccccatccgctgctcctcaggccccagaagccttcacactcaaggagaaggggcacctgctgcggctgcctgcggcattcaggaaagcagcttcccagaactcgagcctgtgggcccagctcagttccacacagaccagtgattccacggatgccgccgctgccaaaacccagttcctccagaacatgcagacagcttcaggcgggccccagcccaggctcagtgctgtggaggtggaggcggaggcggggcgcctgcggaaggcctgctcgctgctgagactgcgcatgagggaggagctctcagcagcccccatggactggatgcaggagtaccgctgcctgctcacgctggaggggctgcaggccatggtgggccagtgtctgcacaggctgcaggagctgcgtgcagcacccaggagctgcagaccctggcggccctcaagctgcgagtggctgtgctggaccagcagatccacttggaaaaggtgcttctggaagaggaggtgggggtgcaacagaggtccgcagccttgaggacccgagggtaggggcttgactgctccaccccccaggacccaggaggatgggggcaagcctggggtctgtgtgtgtgggttgggaagtgcatgggtcagacggggctgggacggcaggagggagcctggagcctcagaaggagggaggagggctgaagcatgggggcctcgaagcctgtcccaggattgccccccgcctaggtgcccctgagaccttggccctgccctgccctgcccccaggtcctgatggctgaactcctccccctggtaagcgctgcacagccgcaggggccgccctggctggccctgtgccgggctgtgcacagcctgctctgcgagggaggagcacgtgtccttaccatcctgcgggatgaacctgcagtctgagcctttcccatgctgccctcggcctgttcagatggggattgggggtgtcttccctggcactgtgctcggggacccagagatgcctgtgcttccctgggaaacctggtgaactggaccaggtggcctcactggctcttctcaggacaactaagcctgctggtcagggctggctttcagccttcctaaggctcctggactccagaggccagcggggagcctttcctggctccctctgttttctctcactgtagaccaaagagccgcttgtgtgatattaaagccactttagaaagca

SEQ ID NO: 111148 - DNA, 1942 bp, Homo sapiens
ggggcgtggctcttcggagaggcggcaaattgcaaggagacgccgccgccttcatgctgccggcgggctgctcgcgccggctggtggccgagctgcagggcgccctggacgcctgcgcacagcgacaattgcaattggagcagagcctgcgcgtttgccgtcggctgctgcatgcctgggaaccaactgggacccgggctttgaagccacctccagggccagaaactaatggagaggacccccttccagcatgcacacccagtccacaagacctcaaagagttggagtttctgacccaggcactggagaaggctgtacgagttcgaagaggcatcactaaggccggagagagagacaaggcccccagcctgaaatctaggtccattgtcacctcttctggcacgacagcctccgccccaccgcattccccaggccaagctggtggccatgcttcagacacgagacccaccaagggcctccgccagaccacggtgcctgccaagggccaccctgagcgccggctgctgtcagtgggggatgggacccgtgttgggatgggagcccgaacccccaggcctggggcgggcctcagggaccagcaaatggccccatccgctgctcctcaggccccagaagccttcacactcaaggagaaggggcacctgctgcggctgcctgcggcattcaggaaagcagcttcccagaactcgagcctgtgggcccagctcagttccacacagaccagtgattccacggatgccgccgctgccaaaacccagttcctccagaacatgcagacagcttcaggcgggccccagcccaggctcagtgctgtggaggtggaggcggaggcggggcgcctgcggaaggcctgctcgctgctgagactgcgcatgagggaggagctctcagcagcccccatggactggatgcaggagtaccgctgcctgctcacgctggaggggctgcaggccatggtgggccagtgtctgcacaggctgcaggagctgcgtgcagcggtggcggaacagccaccaagaccatgtcctgtggggaggccccccggagcctcgccgtcctgtgggggtagagcggagcctgcatggagcccccagctgcttgtctactccagcacccaggagctgcagaccctggcggccctcaagctgcgagtggctgtgctggaccagcagatccacttggaaaaggtgcttctggaagaggaggtgggggtgcaacagaggtccgcagccttgaggacccgagggtaggggcttgactgctccaccccccaggacccaggaggatgggggcaagcctggggtctgtgtgtgtgggttgggaagtgcatgggtcagacggggctgggacggcaggagggagcctggagcctcagaaggagggaggagggctgaagcatgggggcctcgaagcctgtcccaggattgccccccgcctaggtgcccctgagaccttggccctgccctgccctgcccccaggtcctgatggctgaactcctccccctggtaagcgctgcacagccgcaggggccgccctggctggccctgtgccgggctgtgcacagcctgctctgcgagggaggagcacgtgtccttaccatcctgcgggatgaacctgcagtctgagcctttcccatgctgccctcggcctgttcagatggggattgggggtgtcttccctggcactgtgctcggggacccagagatgcctgtgcttccctgggaaacctggtgaactggaccaggtggcctcactggctcttctcaggacaactaagcctgctggtcagggctggctttcagccttcctaaggctcctggactccagaggccagcggggagcctttcctggctccctctgttttctctcactgtagaccaaagagccgcttgtgtgatattaaagccactttagaaagca

SEQ ID NO: 111149 - DNA, 1891 bp, Homo sapiens
ggggcgtggctcttcggagaggcggcaaattgcaaggagacgccgccgccttcatgctgccggcgggctgctcgcgccggctggtggccgagctgcagggcgccctggacgcctgcgcacagcgacaattgcaattggagcagagcctgcgcgtttgccgtcggctgctgcatgcctggtacgcggaccccggacccactggccagacctccctcgggccctcagagtcccgccccgagcgcccagggctgggagaccgggcgcagccgcccacttcggagctgtgggttgtcagtgccaccctccttaccctgcaggctctgagctgggggcctgccgcggggcccggcggccccctcgggtctgtttgggctgggccctgcctcctggccgtgcgatggctgcccgtgtctttgcagggaaccaactgggacccgggctttgaagccacctccagggccagaaactaatggagaggacccccttccagcatgcacacccagtccacaagacctcaaagagttggagtttctgacccaggcactggagaaggctgtacgagttcgaagaggcatcactaaggccggagagagagacaaggcccccagcctgaaatctaggtccattgtcacctcttctggcacgacagcctccgccccaccgcattccccaggccaagctggtggccatgcttcagacacgagacccaccaagggcctccgccagaccacggtgcctgccaagggccaccctgagcgccggctgctgtcagtgggggatgggacccgtgttgggatgggagcccgaacccccaggcctggggcgggcctcagggaccagcaaatggccccatccgctgctcctcaggccccagaagccttcacactcaaggagaaggggcacctgctgcggctgcctgcggcattcaggaaagcagcttcccagaactcgagcctgtgggcccagctcagttccacacagaccagtgattccacggatgccgccgctgccaaaacccagttcctccagaacatgcagacagcttcaggcgggccccagcccaggctcagtgctgtggaggtggaggcggaggcggggcgcctgcggaaggcctgctcgctgctgagactgcgcatgagggaggagctctcagcagcccccatggactggatgcaggagtaccgctgcctgctcacgctggaggggctgcaggccatggtgggccagtgtctgcacaggctgcaggagctgcgtgcagcggtggcggaacagccaccaagaccatgtcctgtggggaggccccccggagcctcgccgtcctgtgggggtagagcggagcctgcatggagcccccagctgcttgtctactccagcacccaggagctgcagaccctggcggccctcaagctgcgagtggctgtgctggaccagcagatccacttggaaaaggtcctgatggctgaactcctccccctggtaagcgctgcacagccgcaggggccgccctggctggccctgtgccgggctgtgcacagcctgctctgcgagggaggagcacgtgtccttaccatcctgcgggatgaacctgcagtctgagcctttcccatgctgccctcggcctgttcagatggggattgggggtgtcttccctggcactgtgctcggggacccagagatgcctgtgcttccctgggaaacctggtgaactggaccaggtggcctcactggctcttctcaggacaactaagcctgctggtcagggctggctttcagccttcctaaggctcctggactccagaggccagcggggagcctttcctggctccctctgttttctctcactgtagaccaaagagccgcttgtgtgatattaaagccactttagaaagca

SEQ ID NO: 111150 - DNA, 1551 bp, Homo sapiens
ggggcgtggctcttcggagaggcggcaaattgcaaggagacgccgccgccttcatgctgccggcgggctgctcgcgccgggaaccaactgggacccgggctttgaagccacctccagggccagaaactaatggagaggacccccttccagcatgcacacccagtccacaagacctcaaagagttggagtttctgacccaggcactggagaaggctgtacgagttcgaagaggcatcactaaggccggagagagagacaaggcccccagcctgaaatctaggtccattgtcacctcttctggcacgacagcctccgccccaccgcattccccaggccaagctggtggccatgcttcagacacgagacccaccaagggcctccgccagaccacggtgcctgccaagggccaccctgagcgccggctgctgtcagtgggggatgggacccgtgttgggatgggagcccgaacccccaggcctggggcgggcctcagggaccagcaaatggccccatccgctgctcctcaggccccagaagccttcacactcaaggagaaggggcacctgctgcggctgcctgcggcattcaggaaagcagcttcccagaactcgagcctgtgggcccagctcagttccacacagaccagtgattccacggatgccgccgctgccaaaacccagttcctccagaacatgcagacagcttcaggcgggccccagcccaggctcagtgctgtggaggtggaggcggaggcggggcgcctgcggaaggcctgctcgctgctgagactgcgcatgagggaggagctctcagcagcccccatggactggatgcaggagtaccgctgcctgctcacgctggaggggctgcaggccatggtgggccagtgtctgcacaggctgcaggagctgcgtgcagcggtggcggaacagccaccaagaccatgtcctgtggggaggccccccggagcctcgccgtcctgtgggggtagagcggagcctgcatggagcccccagctgcttgtctactccagcacccaggagctgcagaccctggcggccctcaagctgcgagtggctgtgctggaccagcagatccacttggaaaaggtcctgatggctgaactcctccccctggtaagcgctgcacagccgcaggggccgccctggctggccctgtgccgggctgtgcacagcctgctctgcgagggaggagcacgtgtccttaccatcctgcgggatgaacctgcagtctgagcctttcccatgctgccctcggcctgttcagatggggattgggggtgtcttccctggcactgtgctcggggacccagagatgcctgtgcttccctgggaaacctggtgaactggaccaggtggcctcactggctcttctcaggacaactaagcctgctggtcagggctggctttcagccttcctaaggctcctggactccagaggccagcggggagcctttcctggctccctctgttttctctcactgtagaccaaagagccgcttgtgtgatattaaagccactttagaaagca

SEQ ID NO: 111151 - DNA, 974 bp, Homo sapiens
cagctcagttccacaggctcgagttctgggaactgacctgtgggcccagctcagttccacacagaccagtgattccacggatgccgccgctgccaaaacccagttcctccagaacatgcagacagcttcaggcgggccccagcccaggctcagtgctgtggaggtggaggcggaggcggggcgcctgcggaaggcctgctcgctgctgagactgcgcatgagggaggagctctcagcagcccccatggactggatgcaggagtaccgctgcctgctcacgctggaggggctgcaggccatggtgggccagtgtctgcacaggctgcaggagctgcgtgcagcggtggcggaacagccaccaagaccatgtcctgtggggaggccccccggagcctcgccgtcctgtgggggtagagcggagcctgcatggagcccccagctgcttgtctactccagcacccaggagctgcagaccctggcggccctcaagctgcgagtggctgtgctggaccagcagatccacttggaaaaggtcctgatggctgaactcctccccctggtaagcgctgcacagccgcaggggccgccctggctggccctgtgccgggctgtgcacagcctgctctgcgagggaggagcacgtgtccttaccatcctgcgggatgaacctgcagtctgagcctttcccatgctgccctcggcctgttcagatggggattgggggtgtcttccctggcactgtgctcggggacccagagatgcctgtgcttccctgggaaacctggtgaactggaccaggtggcctcactggctcttctcaggacaactaagcctgctggtcagggctggctttcagccttcctaaggctcctggactccagaggccagcggggagcctttcctggctccctctgttttctctcactgtagaccaaagagccgcttgtgtgatattaaagccactttagaaagca

SEQ ID NO: 111152 - DNA, 892 bp, Homo sapiens
ggggcgtggctcttcggagaggcggcaaattgcaaggagacgccgccgccttcatgctgccggcgggctgctcgcgccggtgaggcctgcgcggcaggagggggtgggaggatgcgggcgggccggtagccaggcgcggggcccgaggcccgacgctggccgaggtgctgagccgccggtgcgtcccccaggctggtggccgagctgcagggcgccctggacgcctgcgcacagcgacaattgcaattggagcagagcctgcgcgtttgccgtcggctgctgcatgcctgggaaccaactgggacccgggctttgaagccacctccagggccagaaactaatggagaggacccccttccagcatgcacacccagtccacaagacctcaaagagttggagtttctgacccaggcactggagaaggctgtacgagttcgaagaggcatcactaaggccggagagagagacaaggcccccagcctgaaatctaggtccattgtcacctcttctggcacgacagcctccgccccaccgcattccccaggccaagctggtggccatgcttcagacacgagacccaccaagggcctccgccagaccacggtgcctgccaagggccaccctgagcgccggctgctgtcagtgggggatgggacccgtgttgggatgggagcccgaacccccaggcctggggcgggcctcagggaccagcaaatggccccatccgctgctcctcaggccccagaagccttcacactcaaggagaaggggtaggtttcccggaccctcactggagggacttctgtctctgcctcctcagaccctggctagcaaggagcctgggatttggggtgacagggaaggcagggcatcgagccctgtggcatacccc

SEQ ID NO: 111153 - DNA, 2058 bp, Homo sapiens
ggggaggaaggttagggaggcggagagggaccgcgcccgcaggagagaggcgcgggccagggctctagcagggactggggccgcggcaggggtagcaaggtgagtcggtgcttgccaagaggcagagcgcaaaacctactaggagatcgcgcccggtgagcagcacccgcagctcagagcccgggacgtccggagcgcggggagcagtcccctctccatcagggagtggtctatctgggcagtctgggacccaggcaccgcgccatccctgagagagcagcagtctggagagcaggcatctcagatccctaagaaaccagccgtccgagaagccgcggatctcaggtgcccaggatcgttaggactgaacgggagggtactagaggaccactggctctggaccgtcgggagctgcccctgacgtaacccacgaggggcctccccttgacggacggcttggggagcggcaccgccgggctggagcccgcagaggcagggtaaggggagcggggggcagccgtcgggggagtgcagacccaggcccaaggcgggtcaccgctcctggcccgcggagagccccggccccggcagccattgcgcccaagagtgaggaagatttgctggccctggcagcgtcgcggctgagccgccgcaagagggtggcgggcgcggccgtcggagtggccatggtgctgctgctgctggtggccatcccgctgctggtgcacagctcccgcgggccagcgcactacgagatgctgggtcgctgccgcatggtgtgcgacccgcatgggccccgtggccctgtgtcccgacggcgcgcctgcttccgtgccccccttcccgccaggcgccaagggagaggtgggccggcgcgggaaagcaggcctgcgggggccccctggaccaccaggtccaagagggcccccaggagaacccggcaggccaggccccccgggccctcccggtccaggtccgggcggggtggcgcccgctgccggctacgtgcctcgcattgctttctacgcgggcctgcggcggccccacgagggttacgaggtgctgcgcttcgacgacgtggtgaccaacgtgggcaacgcctacgaggcagccagcggcaagtttacttgccccatgccaggcgtctacttcttcgcttaccacgtgctcatgcgcggcggcgacggcaccagcatgtgggccgacctcatgaagaacggacaggtccgggccagcgccattgctcaggacgcggaccagaactacgactacgccagcaacagcgtcattctgcacctggacgtgggcgacgaggtcttcatcaagctggacggcgggaaagtgcacggcggcaacaccaacaagtacagcaccttctccggcttcatcatctaccccgactgagccggccccgccccgtgcccccgctcgccccttctctcccgtcctcacccacctcctgcccgccccacccgaggcgccaccccaccctttgagagcctggcggtggggtggacccttccgttcccggaggcggcctaaatgggcgaactcttggtgctcaagggtataagtggccgggaagaggaggagacccggccagaggagcagagcgacttccggagggatcacccgcacccaagtgcgcgctggaccccataggggcagaggtcgtggctttctcttttgtacagagatggggagcagttttaatagcgggactcagaggcccagaaagccggagggaagcccccgcagcttgcgagggaaataacagaaacaggaggagcccatttaggcaagagaagacattaaaacagggtagtgcaggttctccgtcacaactttctctcgccaccctctcgtcccctcgtctccactttcaggctcaggctccagccttggcagccttcctgtgaactggaggaaccagtgaattctttcctggcatttaaaacgcattctgtacagtccccattcccccctatccggactaggccctggggctacagctgctgctgcctcttctaataaagtgaggttgggggattgtgtgtg

SEQ ID NO: 111154 - DNA, 742 bp, Homo sapiens
cacaggtgtatcatggaacaaaggcagaatttgtgtaaattttcaaagtaaatgtaaaacctcaaagaaatttcacatttgtggctggacaacttgggctccacctttagtccttttagtcctttctggggtatgtattcctttacttgctttcaaaagaaggcttgttttaggttaagaagctttgcgtatatataaaacttttggcatttgagtctcctgtcccttaagcagaggcattatccaaagctttgttgtcttactattctgacccttggtgactaatacatttccaggtgaaagtgcttgtatctagatagttgacttccaaagattatgatctattctgacttaatgaatttaaattacaaatatccatcttgcatgttagatatttctagctaaatgcctttgttacgtggtcctagcaggatggcagtggacaggtagtattgagattttggaggttcttaatgatatttcaacaagtaaaaggaaaaacgaactgggaactccagccttgtttaacaacttttcaaatgtcaactcttctgcaggcctcagatccaagcagttgggtgaataataaatgtaggctgtatgctgtttgtactgtgggtataactgttggcacatctgttcacaaggcatcttctacagaatctctcaagttagttcttcctagtctccaccactgtaattcagccttccctctcaaatagactaccccattagcttcctg

SEQ ID NO: 111155 - DNA, 511 bp, Homo sapiens
taccaacgcctccagattctctaactgctcagacatccacctgaacacgagcccctaagatgtcaaacacacagagcccagtccaccgccttccccacagcctgctgcatctggcgtcggtggatggccctgccaggtgcctgctgcccccataggagcaccaggagtgcctctccaggtttctcccttcctcagccctcacccagcccctcctgtttctcctcatttaccatttcaaatcctgtacagatatcccagttttagtcatttgattatttcctttagataaattccaaaaagtgggattgcaagtgaaagagtgtgcttttattttctagcactttagtacatattactaactcagcttccagacaaagttgagcagattagactctccaggcctcccgtgagcagacaggtttctctacaccctcggcaacactgagcatcgctgtgctctctcatccttaatgaaaaacttcagaagcgaaaaaatatctcatctcaatgg

SEQ ID NO: 111156 - DNA, 258 bp, Homo sapiens
gagtcaaggtctcccagaaagtactgtcaatacagaataaaactgggcagtgattctgctgagaggaagcatttacggaataataaaatacctaggcggaagatcaacaacaaaaaagacatgaacgacacaatactccttgacgaaacaaacatctgcagaaccctcagcctagcaagggcaaacacacctgcttctcaggcacacacacaatattttccaggatggacaaatggcaggccacaaagcaagcctcca

SEQ ID NO: 111157 - DNA, 680 bp, Homo sapiens
acagaaggagaggcagcacttctaaaaagatgttgtgttgatggggaaggtgatccctcttcctgacctctggccctagtgtcctcaggttaacaggagaccagtttttcttccttattagcaatatctgagtacagctttggctacctgcaaagaaaaataaagcaaaacctttcccttaatggaaattgaggaggaatctgcacttttaatgatcatccaggtggttctcatgtaggtgccccaggactaccctttgacactgctctagctgcctagaatgttgtttcttttatgtaaaaaaatacatacatatctcaagcatagtaagaataatatgaagtaactccgagtgaattgagtccattcttataaataagcttttaaattttacacatgccaaggacttttagcagcctttttgaccctcgtgctctaaaaatgatccgtcagtgaggagaagaggcagaatgaatagtccctgacttaaaatcatccttttttttttttttacattgaaactgttgattgaaacaggattcctttaaagtcagcctcactttttctcaggcctgaatcttagaacatattgtcagatattcagctgtgctctcgcctccaacccacttttattcctaaatgtgttcgtttatacatggagtgtttgctgttgtgattta

SEQ ID NO: 111158 - DNA, 318 bp, Homo sapiens
atttctcatgatgcgaatgtacagatgaggaatattgaggccaggggggtttaggtgactttcccaaggtcacagttgggtggtaaagagccctattcaaccccagttcatggtcccagcatcagtggccacatacgacatccgcacctgtgctctaataaatacggctcatgctgttttgtgggattccacctcagactggaatttagaagagggcgtccttgctttgaaaaacactgatttaaaaataaagtggagccaggcgcagtggctcatgcctgtaatcccagcactttgggaggctgaagcgggtggatc

SEQ ID NO: 111159 - DNA, 266 bp, Homo sapiens
gtgtgtatgggtagataggatggatggatggatagatggatgggtgggtggacgggtgggtgggtgagtgagtgaactgatatgtgggtggagagattagtgggatggatgtatggctatgtgtgtgtatgggtagatagataggatggatggatggatggatagataggtgagtggatagattagtgggtggatgtatgtttatgtgtgtggatgggtggatggaaggagtgtgcatggataaatggacaaatggatggatgtgt

SEQ ID NO: 111160 - DNA, 230 bp, Homo sapiens
cagccaggcttctacagagcacaggccacacactgtaaacctctccagtcccacccccaaaccacactggcatggacctccaaaggcctcccagttgccaagtccggggcacaccctcggtcctccctctgcacctctctgccccactggatactgttggccatctgctccctcttactctctgagcttctctcttcatctcacggcctctaaatgctctttctctcctt

SEQ ID NO: 111161 - DNA, 254 bp, Homo sapiens
taggcgtgagccaccacgcccagccgcaatcactttgttaaatgagttaagaacggcagagacatgtgcattcatactatcttttataatgacccggctgtctttactagtgctctttgtcattttatgttggtttaaattattatctgtggtcacttgattttagcctaaaaaagctttcgttgctattttctataaggtgggtagatcaactagcatcagattttctcagtttttgtatatctggaatgtgt

SEQ ID NO: 111162 - DNA, 696 bp, Homo sapiens
atcaactaatagatatatttcaactagtgattatttacctttaccacttttgtaaatgatccatttgaggcggggcacagtggctcacacctgtaatcctagcactttgggaggccaagggaggtggatcacctgaggtcaggagttcaagaccaacctggccaacatggcgaaaccccatctctactaaaaaataaaaaaaattaggccaggcgcggtggctcacgcctgtaatcccagcactttgggaggccaaggcgggcagattacttgagatcaggagttcaagaccagcctggccaacatggtgaaaccccatctctaaaaaatacaaaaattagccaggcgtggtggcgtgcacctgtaatcccagccgagatcacgacacttcactctagcctgggcaaaaaagtgaaactccatctcaataatgaaataaaataaaccatttgggccaggcgtggtggctcatgcctataattccagcactttgtgaggccagggcaggtggatcacctgaggtcaggagttcgagaccagcctgaccaacatggtgaaaccccgtctctactaaaaatgcaaaaatggccaggcacagtggctcatgcctataacccagcactttgggaggctgaggcaggtggatcacgaggtcaagagttcaagatcagcctggccaaggtggtgaaacccctg

SEQ ID NO: 111163 - DNA, 214 bp, Homo sapiens
tgcatcttgaagcccacatacagtgagttaaattacagcaatagcatatttctcaaccaccatatagttgcaaatcctttatcctgaagtacatagtaaaggattttctccttgaacagtgaagaaagttgaactttggggttgtttcaatttaacacatgatgtgctgctgcacacttaaagctgcgttttgactttcctactttttcttctt

SEQ ID NO: 111164 - DNA, 957 bp, Homo sapiens
gaggggaaggttccctggggcttgagctccccttttatgcattaccagggaggggaaggttccctggggcttgagctccctctgtggaggtgaggaggggagattccgttcacatccaggaggggcaaaatgactgatgtatttttatgtatctacacagagagtgcattttctctccagagatgctgtctggttaacaaaggaataacttaagaaattgattgattatcttaataaactgtgcaaacccaaaaaaaaaaaaaaaaaaaaaaacataaaaaaaacacaaaaaaaacaacaacataatcaaaatcaacaatcaaaacataagacaacaacacaaaaaacacctacacacacacaccacacaacaacacacaagaccacaacaccacacacctccgcgtaagaacctcacgctacatcacctgatctgactccagacacacatcccgcgtggagcggagcgtgggtgtggtgcagggtcggggtggagggcggcgggcgcgtttggcttcttgtcgcgccggtggtggcgctggctacgctggtgtgccgcggcgctgcgccggccggtgacgctgtcgatgtcggggcgcgcggcgggcgccggccgggggtggcgcgtgccgtctgtctgccgtggcggccgggcgggcgggcccgccgcgcggccgcgccgtcgcgggcgggacgcctgccgccggcctgctccgtcgctgctcgccgggcggcggggctcccttccgcttgggtggcggccggcccgccccgcgggcgccgcggcggcgcccgccacgcgcgccctcgccgcgcccgggcgcgcgtacgtttgcgttgttggggcggtgcggtgtggcgcggcgctccgtccttcctcggtcgggctcgggcgctgcgtcgccgtggcccctctgcttcgcgtggcggccctgggcggcgcgacgtgaccagccc

SEQ ID NO: 111165 - DNA, 2055 bp, Homo sapiens
cagccccagccccagcccgcccttctactccctggcgcccggcatcctcgacgcgcgcgcggggggcgccggcgcctcctcggagcccccgggacccagcgaggccagagcgcccccctcccaactcccaaatcccccggcgtcggagatgaggccccggatgctgccagtgttctttggggagagcatcaaggtgaacccggaacccacgcatgagatccgctgcaactctgaggtcaagtacgcctcggagaagcatttccaggacaaggtcttctatgcgcccgtacccaccgtcacggcctacagcgagaccatcgtggcagcacccaactgcacgtggcgcaactaccgcagccagctgaccctggagccacgcccgcgcgccctgcgcttccgcagcaccaccatcatcttccccaagcatgccaggagcactttccggaccaccctgcactgcagcctgggccggcccagccgctggttcaccgccagcgtgcagctgcagctttgccaggaccctgcccccagcctcctgggccctgccacgctctgacggggctggggccggcccggggtgctggaggagccgggagccctggggagaagccgggaggatggacacgatgagctcggcctggcactcgggcaggaggcgggaagggaggctgccagaccaaggacccgtgtggaaggaggcggctccccgctgcctgccctgacctacaggctaggtggtggtctccttgttttggtgtcaaggactcagtaaaagcatctatttttttagcacttaagctggcaaggcggtaggggcatgcactgttaggtggtggccacccccagggtcaggggaaaagaatgggtccatagagtgcccttgaagcagagaacagccccgagcagtgtgaggacagaggcatcccagcctcagccggtgggaacggctgccactcccccagagccctgccaccccatgtgtcctaggctggtggccaaggccatgtgtgagggaagaggggtacctctcttccctgctgctggcctggggtatttccaaaacagccttttcgcacacatgcaggttgcaccgagaggtctggagctgtggctgagccacctctggtggatgttgagccaggaggttgggcaaaggccggatgctgatgccagcgctggaggtggtgatactgggggcggggaaggcctagaaatactttgagccatggccttgccagtgtcccgtgccctccagtgtcaaagatttggggcactgcccgtcgaaatggaaaggttggtgctcagcctctggagcctcacctgcagggcgtccccagctaacacccatccacgcaccacctccaggacgagaacccttgatgtcaaaaccaagtgcccagtggaggcggtgaagctctcggaaatgctgccacctgtgtgaggccgggtctgaactcgagggagtcggagctcagctgtcggtttaaagagacactgaggggaccgggctgccgccctcagcctgcattcctgtgcgcaatcgattccgcaatgacagcaccttactccttcctgcggcaggctcacccctgcctgtgggatgttgtgagaggaacatgagccagacaaagacttggctcagggctccgtggaacaagccaggatgcacggggagctgggggagcccccagcctggggcagcccagcaggccgctgaacaaacaccccagaagccagcactgtggcagggtgctggggagatgcccctctgagccttcctcccccctcagacctgaatgcaccccacagttgggggctgcccctgccactcccctggtaatgcataaaaggggaggggaaggttccctggggcttgagctccctctgtggaggtgaggaggggagattccgttcacatccaggaggggcaaaatgactgatgtatttttatgtatctacacagagagtgcattttctctccagagatgctgtctggttaacaaaggaataacttaagaaattgattgattatcttaataaactgtgcaaacccaa

SEQ ID NO: 111166 - DNA, 1910 bp, Homo sapiens
cagccccagccccagcccgcccttctactccctggcgcccggcatcctcgacgcgcgcgcggggggcgccggcgcctcctcggagcccccgggacccagcgaggccagagcgcccccctcccaactcccaaatcccccggcgtcggagatgaggccccggatgctgccagtgttctttggggagagcatcaaggtgaacccggaacccacgcatgagatccgctgcaactctgaggtcaagtacgcctcggagaagcatttccaggacaaggtcttctatgcgcccgtacccaccgtcacggcctacagcgagaccatcgtggcagcacccaactgcacgtggcgcaactaccgcagccagctgaccctggagccacgcccgcgcgccctgcgcttccgcagcaccaccatcatcttccccaagcatgccaggagcactttccggaccaccctgcactgcagcctgggccggcccagccgctggttcaccgccagcgtgcagctgcagctttgccaggaccctgcccccagcctcctgggccctgccacgctctgacggggctggggccggcccggggtgctggaggagccgggagccctggggagaagccgggaggatggacacgatgagctcggcctggcactcgggcaggaggcgggaagggaggctgccagaccaaggacccgtgtggaaggaggcggctccccgctgcctgccctgacctacaggctaggtggtggtctccttgttttggtgtcaaggactcagtaaaagcatctatttttttagcacttaagctggcaaggcggtaggggcatgcactgttaggtggtggccacccccagggtcaggggaaaagaatgggtccatagagtgcccttgaagcagagaacagccccgagcagtgtgaggacagaggcatcccagcctcagccggtgggaacggctgccactcccccagagccctgccaccccatgtgtcctaggctggtggccaaggccatgtgtgagggaagaggggtacctctcttccctgctgctggcctggggtatttccaaaacagccttttcgcacacatgcaggttgcaccgagaggtctggagctgtggctgagccacctctggtggatgttgagccaggaggttgggcaaaggccggatgctgatgccagcgctggaggtggtgatactgggggcggggaaggcctagaaatactttgagccatggccttgccagtgtcccgtgccctccagtgtcaaagatttggggcactgcccgtcgaaatggaaaggttggtgctcagcctctggagcctcacctgcagggcgtccccagctaacacccatccacgcaccacctccaggacgagaacccttgatgtcaaaaccaagtgcccagtggaggcggtgaagctctcggaaatgctgccacctgtgtgaggccgggtctgaactcgagggagtcggagctcagctgtcggtttaaagagacactgaggggaccgggctgccgccctcagcctgcattcctgtgcgcaatcgattccgcaatgacagcaccttactccttcctgcggcaggctcacccctgcctgtgggatgttgtgagaggaacatgagccagacaaagacttggctcagggctccgtggaacaagccaggatgcacggggagctgggggagcccccagcctggggcagcccagcaggccgctgaacaaacaccccagaagccagcactgtggcagggtgctggggagattccgttcacatccaggaggggcaaaatgactgatgtatttttatgtatctacacagagagtgcattttctctccagagatgctgtctggttaacaaaggaataacttaagaaattgattgattatcttaataaactgtgcaaacccaa

SEQ ID NO: 111167 - DNA, 679 bp, Homo sapiens
  misc_feature (32)..(33): n is a, c, g, or t
gtgtcgagttcccaaaaagctccgcagggctnntagggaggttgaagcatatgaagaaaacaccagccttgaacagatacgtagcaggaaaagcgaggatcttacaagcctgctgaaaggctcctggggacatccaggggtcctgagaccacagtttgagaaagctgatttaaccatttttggattggtgggctgttaggttgtttaaaattttacactgttacaacccttgcaacagtgaaagttctttgtgatgttttctggtgtatgcgtgctagtgttttttctgtaagtagaattgctaggtcatagagttttgcttttttttaagtttgttaaacacattacttttgatgcctgtataatttgcttttgtgcactaatgttggtgtttagattgtttcaactaatgatttggtgaaatatctttgcatgtttttagttgttttgaattattttctttttgagggggctggggggagtccagtaaaaaccagacaactgccagatacattttaagagagctttaacacatggattcttttctaaaatttctaaaaagataattgttagatcaaatattaggaatctttctcaggctattggtacatattgtcacattgttttcatgggagatagtaccagtttgtttcctgtcagcagtgtctgacatgcttta

SEQ ID NO: 111168 - DNA, 509 bp, Homo sapiens
agactcatgtattaaataattttttagtgaaaagtaaccattttctaaaacaaaacttagaagaggagcgtggcattgtttcaaatttttgcgaatcactttaatgtctggcattatagaagacagctggattttcatgtttgcttctgttcagtctgttgtgctatctggtttaggttgaagcatatgaagaaaacaccagccttgaacagatacgtagcaggaaaagcgaggatcttacaagcctgctgaaaggctcctggggacatccaggggtcctgagaccacagtttgagaaagctgatttaaccatttttggattggtgggctgttaggttgtttaaaattttacactgttacaacccttgcaacagtgaaagttctttgtgatgttttctggtgtatgcgtgctagtgttttttctgtaagtagaattgctaggtcatagagttttgcttttttttaagtttgttaaacacattacttttgatgcctgtataatttgcttt

SEQ ID NO: 111169 - DNA, 195 bp, Homo sapiens
gagtgagggtcttctgtgaaaagcttatctccatctgagccccagacctggcagaaggctggaaaggcagtgactggggttatgaaggacaaaggaaggctggctccccagaaccacacacttaggggaggaaagtccttaggtgtcatgtctgtgcttggcaggctggtgcactcttggcctcagtttgtctat

SEQ ID NO: 111170 - DNA, 455 bp, Homo sapiens
cactaaacatagctatttttattaactaataatattattactattaaaactcagatcttctgtttcagcccagtacccttttcactacactaaatagcacacctctttcccacactgaagtaaaaaaacaggaacaggttatagaatcactgattttaaaatattattggtgttttaacaagactaaacgtggttttcactcactccccagacatctgatccactcagatcctcaagtttctaccaagatgacatcaaaatggccacagatgatccttttggagatggatatcccttacttaggaaggccttatagccattttatctcttctgctctgtaaaatgaagataagaatgttcatcctgtgtaactgaaagctcaaataagatgacagatatgaaggctctttaaaagtgaagtgacaccgggcgcggtggctcacgcctgtaatccc

SEQ ID NO: 111171 - DNA, 480 bp, Homo sapiens
atgaccccatctttaaaaaataataataatagtaatggcagagctggaggagtgggcaaagctcccccttggtttcctcctatctccactcccttggaagatctggaagtatctgatgccttccacagcacagtttgaaaaacgaaaatctggtccaatgccaccatttcaccaacaagggaatggcccagaaacatgcagttgtattttcagtggtatggccgcactgcagcctgaatttatattcccctacagcatcatgagaaagaataaccaagactgtagcatgtgggactatatggcagaacactacagagaagctttaaaagacctagagctttagttcatcctgtgtgaaccatttttcccctatagattgtagatgataatcttttgcatggcccatttccattttcatgtttgtttttcaactgtttctgatgtcacttaaagtatttcctgtgagattccagtactttc

SEQ ID NO: 111172 - DNA, 126 bp, Homo sapiens
atctttccagtcatcttgctgctttttgcttctcgtggtcttctctctctgcaggacctagaaaagagaaagctgaaacctaaatcaattatcgctaatccttcccgtcttccaaaatggggtcga

SEQ ID NO: 111173 - DNA, 249 bp, Homo sapiens
ggtgcagggagcagtgggctcctgacttgagctgaagagctaggggtgggcgggagcagacctgcgagcagctgagtgtgcatgagtgcgcacacgtgcgtgtgtgagcatgtgtcagtgcaagcgtgtgtgagagcatgtatgtgtgtgagtgcacacgagtatgtgaacatgtatgtgtgagcatgtgtgtgtccgttagtgcatgcatgtgtgtgtgtgtgtgtgtgtgtgtgtgtgtgtgtgtgt

SEQ ID NO: 111174 - DNA, 490 bp, Homo sapiens
agatgagcaactcttctgtggccccgacccagaagcagactcatcgcataggatggttttccacactcctacaattgcatctccaaccagtcagcagcactcatagcctcgccctgcctggcaaactatctttgaaaaaccctagcctctaaattttcaggggggctgatctgatttgagttaacagtaaaactccggtctcctgtttagctggctctatgtgtattaaactctctctattccaattcctgtcttgataaatcagctgtatgtattgggcacttacagaatgaagtgctgacaacacatgctacatggatgaaccttgaaaatattaagctaagtgaaagaagccagtcacagaaaaccacttatatgattccactgacataatatgaccagaataagtaactttatagagacagaaaatagattagcagttgtgtagagctgggaagaaatgggggaagggaagaatgatagctaaaag

SEQ ID NO: 111175 - DNA, 687 bp, Homo sapiens
gaagttctaaggcataggacttcctgatttgacttaatgtgtatctcagaaacaacggggagatttcgcatcccccccttgtagaagatctgtaacaggagttggtgtgttgcttggcagggagcgtgtcaaaaatctcagacacacaaaatcccatttcagacggccaagcaccatgacaaatgctcagcgttgtcatcagcgaaacccaaattgaaaccacagtgagatatcacttcatacctgtcaggatggctagaattaaaaaaataagaatataacatgttggcgaggatgtgaagaagttataactcttgcacgttgctggtgggaatgaaatggtgtagctgctgtggaaacagtttgggggtttctcaaaaagttcagcataaaacctaccacgtgagccagcattcccacttctaggtatatgccaagaagaattgaggacaggtgtattcaaacagatacttgtatacaaatgttcataacagcactactcacaatagccaaacggcagcaacaatccaagtgtccatccactaatgcgtagataagcaaatcatagtgtatccataccatggaatatcattcagttctaagaaggagcgaagtactgagacatgccacaacatggacgaacctagaaaacattgcgctaagaggcagacatgaaaggtcatgtgt

SEQ ID NO: 111176 - DNA, 138 bp, Homo sapiens
tagctcggcccccaaaatcaagcagattacttccctgctgaaactcagcacttgttctatcttcttagctgaaaaatgatggtttgatggtacttttctatcacttggtaaagtttatttcattttctggaagacaga

SEQ ID NO: 111177 - DNA, 391 bp, Homo sapiens
cttgctcctggtgtccatctaactgatgctctcaggctttatgcctcctttcctcttccagttgtcgctggcaatttctcattcctcgggatggctgaggccatctctgtgactgtccccccaaagctagaagccagacactgttcacacttgtggtgcccacctgtcttccttgagcctttcaggtacacagggaggcctgcggtggcaggtggaggtgagcaatagggttcagaagggaaggtggagagggatgcagctgggaaaaaaaaaaaaaagattccagagcagtgagaaaggcacagccaggcctgagtgagggaaggaaaggccagtcccttctcttgcctggctacaggagtgggacaaagtggttggctaactgctgtgg

SEQ ID NO: 111178 - DNA, 235 bp, Homo sapiens
tgggtcctaggatacctcagtggtgaactgagctctgagcagagacttaaagaaagctatggagggagccacagaacgtgaggggacctggcttctgactttgtcacgtcacttgattcccctgggccacggtatccaaaagacagttgtactgtgtgactttttaaggtctcttcctggagaaaatctatttagtttccaaaagcctgcctttccaggactcagcaagcaaata

SEQ ID NO: 111179 - DNA, 411 bp, Homo sapiens
aaaaaaataaaccatctcaaaagggatccaaagctaaaagggccaacagaattgtgtcccatgagacatggagggcctttgagaggaaaaagcccagacctggcccagctctgggactccacacgttaggaggggctgaggcgaggagcggccaccctgccaagctgagccttacaggcaggggccatgtagcctgccgtccaccggggaaatggatcattgcatccagacaaagaccaaggtgtgaccacgcagacctggatgtccagccacccacgtgcgcccagagcggcccactgtcctcccgcggtccccggggcccagcgcccatccctccagcagccgttcccagtcagcacgctgccacccccgcccccggtgagggcttcccctctgttcagacccctgtca

SEQ ID NO: 111180 - DNA, 514 bp, Homo sapiens
cgactatgttcataaagataaaagattccaatcaataccaaccatccatcttaggtaagtaaaaagagtatggctgggcatcgtggctcacgcctgtaatcccaacactttaggagtccacctgggagaacccaggaggcggaggttgcagtgagccaatatcacgccactgcactccaacctgggcaacaagagcaaaactccgtctcaaaaaaaaaaacaaaaccccaaacacaaaaaatttcgaaagaaaagctaactgttggggatggggcagtgggggagagaaaatactgtacaaatttttccagcgaagcctaagagactctccctcaatcacccacagggtaaacatcattcactaggtgtcaatcttacacttgtacttgcaatgaaaaatataaatccattacattgctcccatgatgtctactttcttttaatcccaagtttattttctaaagatgttcaggattaaagaattaaagaacaattctaaatttacttatgcaaa

SEQ ID NO: 111181 - DNA, 364 bp, Homo sapiens
gttccctgggattcttatcctccaggaagcctgggaaacaacacagcaaaggacagctgttgcagggactaccagtgtctgctgaagtccatcctctccttcctcagggccaacactggaacagagctcatggtgaaaccacatttgccccttgccacgtgactaaaggcttcctaaagaaatacaagtggaagtgacctgtgctgcttaagagccagagcttttaacagagcagatatgagtcctccatactttctttcctctccttttgaatggacacaggtgacaaaaaaagtaacaaaacacacacacacacaaaaaccaaagagatggtagagtgacaagatggagaagcctggatccc

SEQ ID NO: 111182 - DNA, 166 bp, Homo sapiens
taatactgagacaggcttataaaaccaacggggaggtactaaacctcagagtctaagcaatgggcacaatgttttctacttaatatgtaattggaccagaaagactgagtgaggatgttgagtgtaggtaacggggcagtgcatggagggcggcctctgccctgca

SEQ ID NO: 111183 - DNA, 617 bp, Homo sapiens
agaaagtcttactccctaactctgcagttccaaagagacgcgttttgagaggggtgattttgagtcggtcttttacttgtaaagaaatactctcgggaaacgttggtgtggacattttggcgtatatttacgatgtcttactatccaagcccggaatgtcccaccctagggcgtcggcaggtccaccacctctggcgttacgagaataactcgcccttattcactacgagatctctaattgagatccctagatatgatcctgccggccagagggtggggtccttgagatatacacggggagtgtgccagttccatggtgtaatgatggatttattgctggagctgagccagtattaggcctccggttactttttctccgcacatgtctgtcgctgccaacacagtgtgagagaagttcttacatactgcccaagatgtgcgtcagctaaatggtaaatatttattgagcagatatcattgcaagcctacgagctaatggcttaattctgatcctcaactgcccagcgtccggtgataaaaatagaaaggtactttttaaaaaaccgagatgttccttcttaaaccacgggtcattgaccatcaaggtgataacattg

SEQ ID NO: 111184 - DNA, 771 bp, Homo sapiens
gtagctgggattacaggcacgcaccaccacgctgggctaatttttgtgtttttagtagagacggggtttcgccaggttggccaggctggtctgagaactcctgacctcatgatctgcctacctcagcctcccaaagtgctgggattacaggcatgagccactgcacctggctagttcttctcaatttggattgcacatttaaaaactgggacatttaaaaattgcctgggtctcacttgtatcccatctccactctcccccgagatatttatttaatggttaagaataaggcctgaccattagaacttttaaaatctcataaggtgattataatttgcaacaagtttaaacaagtttaaaaaccagtgcacttaaacaagttctcaaagtgtggccccagaccaatggcatcagtatcacctgggaactgagaaaggccaggctctcaggccccagtccagcctagtgaatcagaaactctgagtgcagggcctctccaggtaatttggatgctagttaaagtttaatagccactgctctaaattatctccaaggccaggaatctccaaattctctttcactcatgcaactacttgctcaactcacaaatatgtaatgagaacattctatatgccagattctgtactggaaacagtattaggatgactcagaccagtccctttcttgaaggcactcaaacttaagtgctgagctcctacccactttgtaaaagtgccacgtactgtgccaaatcatcagtagtgaggtcga

SEQ ID NO: 111185 - DNA, 207 bp, Homo sapiens
caccagatgctcccaccactcctacacaaataacaccccaacacgtacccctaacactcctacacacacaacaccccaacactacatactccaacactcctacacacacatcaacaccaacacatgacccaacactcctacacaaataacaccccaacacgtacccctaacactcctacacacacaacaccccaacactcctccaca

SEQ ID NO: 111186 - DNA, 353 bp, Homo sapiens
tgttctattctcctttccattatcctctaccctggtgcccttccctccatccacattttaaagtctgaggttttccaggaccttgtcctctctttatcttcagcgtcttgtccctaaacagtctcgtctacttccaagcctttagctgttaactttgtgatggccctgtgcgatggctcattcctataatcccagcacttcgtgaggctgaggcaagaggatcacttaagctcaggagtccgagaccagcctgggcaacatggtgaaaccccatctctaccaaaaatacaaaaaaattagtcaggcatggtggcatgtgcctgtattcccagcttcttgggggcctgaggcag

SEQ ID NO: 111187 - DNA, 370 bp, Homo sapiens
catttactgggacaccaatggcattgccgtatcctagtatttatttcccaggtttaaatcatatctaatctgataaattcatttccttcagacatgattatttttctccatcttataaaattaaagtaactaggaatgtttggctcagaaaagcaacaaattaggaggaacatgggaattgtcttcaaacaactgaagtatggtcatgttagaaaagatttgattctttttgtatagtcccagtggattgaacctatgtattgaatttatagtaaaacagatttcagttcagtttaaggaagaactatcctaacagtcaaatctgcttagagagggagttggctgcctaggaagggaatgcagtggtccc

SEQ ID NO: 111188 - DNA, 601 bp, Homo sapiens
agggagcagggcttatgtttcatcctagaaagccaaggctaaactaggagaggtggcagggcctgtgtaattctcagaggtacagactagatgttgtcataagtgagagcagagggctgggaatgacacctgcccatgagagccaggaagaaagttaagtctttaatggctgaccttttctagagcattctttgtgccgagagccatgctagatggttacttatctccccaaatcctaacaatcccagaagataacgcttatcctctcactttacagatgtagaaactgagccggaatatccaaaacaggtcaaattctaggactggttattaaatttcaggcacgtgcaggctctccacaacacctgtacaggtcatgctctgtgtaagttcagtggttgctttcctggagttatgtggtacaaacctgcacaaccatacaatggggtacaagcatagtccctggagccaggctggctggcttcaaatgtcaactccattaattaatagctttgtggccttgggatagccacttaacatctctggggctcactttctttatttgcaatggaggcaataatgacacctaactcataggctc

SEQ ID NO: 111189 - DNA, 314 bp, Homo sapiens
ttttcttttttcgagatgggaatctcactctgtcacccaggatggagtgcaatggtgcaatccatagcctagtggtgagtccatagcctattatgataggtccttccaggatcaataccattagtattgtgatctataacagcatcactaatattgtgatcgataccactaatcaataatcttgtgatctagcaataccactgctaggtatttatctaaaagaaagaggccgggcatggtggctcaccctgtaatcccagcactttgggaggccgaggtgggaggatagcttgaggccaggagtttgagagaag

SEQ ID NO: 111190 - DNA, 433 bp, Homo sapiens
ctgtcatccccagaggcccaagttcccagaaaggtttggcttggccagggcacaggctgaggctgggggcctcctttaaggctgggataaggagaagttaacccttctcctcttgctccccctcccaggccctaagctatttccacctctttgttgaggatggaaataactccggctcagcccctagagaccacgacagctattttcatcagccccaagaagcacagctccagtcattgcagagaggaccgagggacaccctgatccccagttccagttcttggccaagtggcaacagtggtcagagccaaaaggggtctctgggaagaacagggagaccgaggcccagagagagtagggaccagctcaaggtcactccctgtctgctccccaccataacatgcaggtggatttggggaaatgcctctagagc

SEQ ID NO: 111191 - DNA, 325 bp, Homo sapiens
gatcataggaaaagaggtcccacaaatatttaagaaacatttatggaccaagaagatgtagaaagtcacatttacatatattccggaagatgtgagagtctaatggtgagctctatgaagatgaattggacacagttcatacccccagaggaatctggtaaagaagacaaacagggccaggcgcggtggctcacttctttaatcccagcactttgggaggacgaggcaggcggatcacctgaggtcaggagttcgagaccagcctggacaacatgatgaaacctcgtctctagtaaaaatacaaaaaaaaaaaaaaaaaaaaaag

SEQ ID NO: 111192 - DNA, 199 bp, Homo sapiens
atagaccgcaatccaattacaataaattatattaaatattaattaactgaaaatcacaatgaaaatgtacagacctcatttttatctaaataaatcagaaaaagaatagaaaataaagtgtaagttagagacaaaagaaaaaatctagaaattgagaacagaagaacaataaaaataagttattaaaaccaaaggatca

SEQ ID NO: 111193 - DNA, 1944 bp, Homo sapiens
cgcggctgcatggacgcgggtccggcgcgcgggaggcgatgacggccccgccatggcccgggcgggcagctgcggcggcgccgcggcgggcgcagggcggccggagccctgggagctgtccctggaggaggtgctgaaggcctacgagcagccgctcaacgaggagcaggcgtgggccgtgtgcttccagggctgccgcgggctgcggggctcgccgggccggcgcctgcgggataccggggacctcctgctgcgcggggacggctcggtcggggcgcgggagcccgaggccgcggaacctgcaaccatggtcgtgccactagccagctcggaagcccagctgcacagatgaggggcacagctgacgtctgcagggccggcctcccagacacagagccggggtcagggagacgacttcaggtgcaaacaggaaaaatcagcctggtgaccagtgccccgaaaccccacccgaccaaaactggaacctcaccgcagggcagggccttcctctcccattcacctgccctgaagtcatgtctggaacgtcatgtttccactttctactgcctttttagttttctttctttgttttttttgcttttgttcattttattttattttattgttttgagatggagtcgcgctctgtcgcccaggctggagtgcagtggtgtgatctcggcttactgcaagctccgcctcccgggttcacacctttctcctgcctcagcctcccaagtagctgggactactggtgcccgccaccacgcccggctaatttttttctatttttagtagagacggggtttcaccgtgttagccaggatggtcttgatgtcctgaccttgtgattcacctgcctcggcctcccaaagtgctgggattacaggagtgagccaccgcgcccggccttattttattttttaatagagatgtctcactatgttgcccggactagtctcaaactcctgggctcaagccatcctcccacttggcctcccaaagtgctgggattacagttctgagccactgtgcctggcctctttttttttttgagatagaatctccctctgtcacccaggttggactgcagtggtgcgatctcagctcactgcaacctcggctagttgcagcgcaacctccgtctcctgggttcaagcaattctcctgcctcagcctcccgagtagctgagattacaggcgcatgccaccacgcctggctaatttttgtgtttttttttgtttttgagacagagtctctctctgtcaccaggctggagtgcagtggcgtgatcttggctcactgcaacctccgcctcccgggttcacgccattctcctggccagcctctcaagtagctgggactacaggcgcccgccaccatgcccggctaatttttgtatttttagtagaagtggggtttcaccatgttggccaggatggtctcaaactcctgacctcatgattcacccacctcagcctcccaaactgctgggattacaggtgtgagccatcacgcccagccttttttttttttttttttagatctaccctcttgttgcccagggggagtccagtggcgtgatcttggctcactgcaaccgccgcctcccgggttcaagcaattctcctgcctcagtctcccgagtgtcttctgtcttttgtaaaagtttttcatgcccaagtgagattaattgtttaaaaaaaaaaaaacaagaagaaaacaacatagatttaccgcaagacctattgatatattattaaacatggtggtatacccagggtgggtgtgacacagaccaaaagaggctgtgtgttctgttgttgataatttaaaaacaataataaaaccgaagtctatgtcaccacaaacagcacttaacaattcagtgataaggcacctgccaccgtggagaacctcggggcggggatgtttagactgca

SEQ ID NO: 111194 - DNA, 1869 bp, Homo sapiens
cgcggctgcatggacgcgggtccggcgcgcgggaggcgatgacggccccgccatggcccgggcgggcagctgcggcggcgccgcggcgggcgcagggcggccggagccctgggagctgtccctggaggaggtgctgaaggcctacgagcagccgctcaacgaggagcaggcgtgggccgtgtgcttccagggctgccgcgggctgcggggctcgccgggccggcgcctgcgggataccggggacctcctgctgcgcggggacggctcggtcggggcgcgggagcccgaggccgcggaacctgcaaccatggtcgtgccactagccagctcggaagcccagctgcacagatgaggggcacagctgacgtctgcagggccggcctcccagacacagagccggggtcagggagacgacttcaggtgcaaacaggaaaaatcagcctggtgaccagtgccccgaaaccccacccgaccaaaactggaacctcaccgcagggcagggccttcctctcccattcacctgccctgaagtcatgtctggaacgtcatgtttccactttctactgcctttttagttttctttctttgttttttttgcttttgttcattttattttattttattgttttgagatggagtcgcgctctgtcgcccaggctggagtgcagtggtgtgatctcggcttactgcaagctccgcctcccgggttcacacctttctcctgcctcagcctcccaagtagctgggactactggtgcccgccaccacgcccggctaatttttttctatttttagtagagacggggtttcaccgtgttagccaggatggtcttgatgtcctgaccttgtgattcacctgcctcggcctcccaaagtgctgggattacaggagtgagccaccgcgcccggccttattttattttttaatagagatgtctcactatgttgcccggactagtctcaaactcctgggctcaagccatcctcccacttggcctcccaaagtgctgggattacagttctgagccactgtgcctggcctctttttttttttgagatagaatctccctctgtcacccaggttggactgcagtggtgcgatctcagctcactgcaacctcggctagttgcagcgcaacctccgtctcctgggttcaagcaattctcctgcctcagcctcccgagtagctgagattacaggcgcatgccaccacgcctggctaatttttgtgtttttttttgtttttgagacagagtctctctctgtcaccaggctggagtgcagtggcgtgatcttggctcactgcaacctccgcctcccgggttcacgccattctcctggccagcctctcaagtagctgggactacaggcgcccgccaccatgcccggctaatttttgtatttttagtagaagtggggtttcaccatgttggccaggatggtctcaaactcctgacctcatgattcacccacctcagcctcccaaactgctgggattacaggtgtgagccatcacgcccagccttttttttttttttttttagatctaccctcttgttgcccagggggagtccagtggcgtgatcttggctcactgcaaccgccgcctcccgggttcaagcaattctcctgcctcagtctcccgagtgtcttctgtcttttgtaaaagtttttcatgcccaagtgagattaattgtttaaaaaaaaaaaaacaagaagaaaacaacatagatttaccgcaagacctattgatatattattaaacatggtggtatacccagggtgggtgtgacacagaccaaaagaggctgtgtgttctgttgttgataatttaaaaacaataataaaaccgaagtctatgtcaccac

SEQ ID NO: 111195 - DNA, 727 bp, Homo sapiens
agtcctgatggagcctctgctctcccccaggtacctgtcccgcgagtgtctctgaccccagccaccccctactcagcaaccggggctcctcgggggacagacccgaggcctccatgacccccgatgccaaacacctgtggctgcccctctgccctcggtttcttatctgacctgtaattgtgaagagctcacctttgctgacatcttgaggcccacgtggacctgagttctggtgcaggatttaatcaactgaggagttcagccaccccgtggagagcctggcgctgactgtggaagaggtgatggacgtgcgccgtgtgctggtgaaggccgagatggaaaagtttttgcagaacaaggagctcttcagcagtctgaagaaggggaagatttgctgctgctgccgggccaagttcccgctgttctcgtggccgcccagctgtctcttctgcaagagaggtctctgcaagggccacagtggcagagcgtggaggaggcgttcccccacattgctccctgcccttgccctttccctttccctggggtccaaaccacatgtgtcctgcctctcctggccctaccacattctggtgctgtcctcactcgcccctggcccagaggctcctgaagatgctgggcggtcctggcacagggaggagcagctctgtaaatctgtgcacatggccactcttggcctaataaaggaggtctcacagtcaaaaaactg

SEQ ID NO: 111196 - DNA, 719 bp, Homo sapiens
cgcggctgcatggacgcgggtccggcgcgcgggaggcgatgacggccccgccatggcccgggcgggcagctgcggcggcgccgcggcgggcgcagggcggccggagccctgggagctgtccctggaggaggtgctgaaggcctacgagcagccgctcaacgaggagcaggcgtgggccgtgtgcttccagggctgccgcgggctgcggggctcgccgggccggcgcctgcgggataccggggacctcctgctgcgcggggacggctcggtcggggcgcgggagcccgaggccgcggaacctgcaaccatggtcgtgccactagccagctcggaagcccagaccgtgcagtccctcggcttcgccatctaccgcgcgctggactgggggctggacgagagcgaggagcgcgaactcagccctcagctggagcggctcatcgacctcatggccaacaacgacagcgaggacagcggctgcggtgccgccgatgagggctacgggggtcccgaggaggaggaggaggccgagggcgtcccccgcagcgtgcgcacctttgcccaggccatgcggctgtgcgcggcgcggctgaccgacccccggggcgcacaggcgcattaccaggccgtgtgccgcgcgctcttcgtggagaacgctggagctgcgggccttcctggccagggtccgggaggccaaggagtgaacggtgggtggggccgac

SEQ ID NO: 111197 - DNA, 652 bp, Homo sapiens
ggctcagatgagaacagatgttaaaatgctttgagaactatgagccttatataaatgcaaggcactgtgcgtatccccaccgaaacgcagggcctgccctgttagcctaggtcgtatcccaccgaaggcagggcttgccccgttagcctaggattagctatatatcactgcatcaaaagttacctcaaaatgcagcatcttaaaataacaaatatatattatctcacagtttctgagggttgggactccggcagtgtcttagctgtgtggccatggctcagggtctttcgtgaggctgcagttaggatggcagtggggcctgatctcgactgaagggtcaaatcggggctggaggagccgtctgaagtggcgtcttcacccagctgtgagcaggaggcgtgagtcccttgctgtgtaggcctctctcgggctgcttggggatccccacagcgtggtggctggcgtcccccagagcacgtggttcaagagtgagcgcagtgaaagccactgagtatttatgaccaagtccagcagtgccacattgtcccaactcactaggaatgagtcactaagtccagcctattctcaaggggagggagagaattaaggcccacttctttttttttttttttttgagatccgtctcaaaaac

SEQ ID NO: 111198 - DNA, 3353 bp, Homo sapiens
  misc_feature (438)..(438): n is a, c, g, or t
cttgctttgtcacccaggctggagtgcagaggcccgatctcggttcactgcaacctccacctcccaggttcaagcgattctcctgcctcagcctcccaagtaaatgggatttcaggcgtgcaccaccacgcccagctaatttttgtatttttagtagagacggggtttcatcatgttggtcaggctggtcttgaactcctgacctcgtgatccgcccgcctcggcctcccaaagtgctgggattacaggtgtgggccaccgcgcccggccgggaacatccttttcatccggtccatgtcttgcttgtgccttggtctcttgtggaccgacagctgctgtctccctggccgggtgctgggccctctgcacccaccagccgcgttctccccgccccacccccctgcagtaccgcccagtgaccgcgcccctgtcccgcanaccgtgcagtccctcggcttcgccatctaccgcgcgctggactgggggctggacgagagcgaggagcgcgaactcagccctcagctggagcggctcatcgacctcatggccaacaacgacagcgaggacagcggctgcggtgccgccgatgagggctacgggggtcccgaggaggaggaggaggccgagggcgtcccccgcagcgtgcgcacctttgcccaggccatgcggctgtgcgcggcgcggctgaccgacccccggggcgcacaggcgcattaccaggccgtgtgccgcgcgctcttcgtggagaacgctggagctgcgggccttcctggccagggtccgggaggccaaggaagatgctgcagaagcttcgggaggacgagccgcatctggagacgcctcgggcagagctggacagcctgggtcacacagactgggcccgactgtgggttcagctcatgcgggagctccgccgcggagtgaagctgaagaaggtgcaagagcaggagttcaaccccctccccaccgagttccagctcacgcccttcgagatgctgatgcaggacatccgggcccggaactacaagctgcgcaaggtcatggtggatggggacatcccgccccgggtgaagaaggacgctcacgagctcatcctggactttatccgctcacggcctccactgaagcaggtctctgagaggcggctgcgcccgttgccaccaaagcaaaggtccctgcatgagaagatcctggaggagatcaagcaggagcggaggctgcgcccggtgcggggcgagggctgggctgcccgcgggtttggctctctgccctgcatcctcaacgcctgctccggagatgccaagtccacctcctgcatcaacctgtcagtcacagatgctgggggcagcgcccagcgcccgcggccccgcgtgctgctcaaggcgcctaccttggctgaaatggaagagatgaatacatctgaggaagaagagtctccgtgtggggaggtgacgctgaaacgggaccgctccttctcagagcatgacctggcccagctccgaagtgaggtggcctctggcctgcagtcggccacccaccccccaggagggacggagccaccacggccccgagctggcagtgcgcatgtgtggaggcccggctcccgagaccagggtacctgtcccgcgagtgtctctgaccccagccaccccctactcagcaaccggggctcctcgggggacagacccgaggcctccatgacccccgatgccaaacacctgtggctggagttcagccaccccgtggagagcctggcgctgactgtggaagaggtgatggacgtgcgccgtgtgctggtgaaggccgagatggaaaagtttttgcagaacaaggagctcttcagcagtctgaagaaggggaagatttgctgctgctgccgggccaagttcccgctgttctcgtggccgcccagctgtctcttctgcaagagagccgtctgcacttcctgtagcataaagatgaagatgccttctaagaaatttggacacatccctgtctacacactgggctttgagagtcctcagagggtatcagctgccaaaaccgcgccaatccagagaagagacatctttcagtctctgcaagggccacagtggcagagcgtggaggaggcgttcccccacatctactcccacggctgtgtcctgaaggatgtctgcagtgagtgcaccagctttgtggcagacgtggtgcgttccagccgcaagagcgtggacgtcctcaacactacgccacgacgcagtcgccagacccaatccctctacatccctaacaccaggactcttgacttcaagtgacagccccaggtggccaggcctccaggaggcaccaggcaggccctgtatcaggctaggacgctctgagctgtgcatgtacatatatacatatatagatacatttataatatatacacacagtctatatatttatatacactgtttcctggccccagagctcatttgggttcaggcgcacttcaaaaccctccctgggggaggctgtttcttctcaggattccttgccagggaggaaggggagggaacagggtgggttttctcactgaagagagaaagcagaaggttctagatcctggcacagactgcatcccatgttcccatgctcttctccgtccccaggaatgcgaacggcagtttcccttccccagtggacgtctaggtggggacagggtatcttggctcccagctggaccagagtgccctgcttgcctctgctctccctttgtggggactcaggcagcagaggcatctgggaagtctctgagtaggcagggtcctcctgggaggcacccccacctgtttgaaaggtctggccaggcgtggtggttcaggcctgtaattccagcactttgggaggccgaggagggaggatcacctgaggtcaggagtttgagaccagcctggccaacatgatgaaatgttgtctctactgaaaatgcaaaaattagccaggtatagtggcaggaacctgtaatcccagctacaggggaggctgaggcaggagaatcgcttgaacccgggaggtgtaggttgcagtgagccgagattgcaccactgcactccagcctgggcgacagagcgagactctgtctcgaaaaaaaaaaaggtccgtgccaagctgctccctgcccttgccctttccctttccctggggtccaaaccacatgtgtcctgcctctcctggccctaccacattctggtgctgtcctcactcgcccctggcccagaggctcctgaagatgctgggcggtcctggcacagggaggagcagctctgtaaatctgtgcacatggccactcttggcctaataaaggaggtctcacagtcaaaaaactg

SEQ ID NO: 111199 - DNA, 3370 bp, Homo sapiens
cgcggctgcatggacgcgggtccggcgcgcgggaggcgatgacggccccgccatggcccgggcgggcagctgcggcggcgccgcggcgggcgcagggcggccggagccctgggagctgtccctggaggaggtgctgaaggcctacgagcagccgctcaacgaggagcaggcgtgggccgtgtgcttccagggctgccgcgggctgcggggctcgccgggccggcgcctgcgggataccggggacctcctgctgcgcggggacggctcggtcggggcgcgggagcccgaggccgcggaacctgcaaccatggtcgtgccactagccagctcggaagcccagaccgtgcagtccctcggcttcgccatctaccgcgcgctggactgggggctggacgagagcgaggagcgcgaactcagccctcagctggagcggctcatcgacctcatggccaacaacgacagcgaggacagcggctgcggtgccgccgatgagggctacgggggtcccgaggaggaggaggaggccgagggcgtcccccgcagcgtgcgcacctttgcccaggccatgcggctgtgcgcggcgcggctgaccgacccccggggcgcacaggcgcattaccaggccgtgtgccgcgcgctcttcgtggagaacgctggagctgcgggccttcctggccagggtccgggaggccaaggaagatgctgcagaagcttcgggaggacgagccgcatctggagacgcctcgggcagagctggacagcctgggtcacacagactgggcccgactgtgggttcagctcatgcgggagctccgccgcggagtgaagctgaagaaggtgcaagagcaggagttcaaccccctccccaccgagttccagctcacgcccttcgagatgctgatgcaggacatccgggcccggaactacaagctgcgcaaggtcatggtggatggggacatcccgccccgggtgaagaaggacgctcacgagctcatcctggactttatccgctcacggcctccactgaagcaggtctctgagaggcggctgcgcccgttgccaccaaagcaaaggtccctgcatgagaagatcctggaggagatcaagcaggagcggaggctgcgcccggtgcggggcgagggctgggctgcccgcgggtttggctctctgccctgcatcctcaacgcctgctccggagatgccaagtccacctcctgcatcaacctgtcagtcacagatgctgggggcagcgcccagcgcccgcggccccgcgtgctgctcaaggcgcctaccttggctgaaatggaagagatgaatacatctgaggaagaagagtctccgtgtggggaggtgacgctgaaacgggaccgctccttctcagagcatgacctggcccagctccgaagtgaggtggcctctggcctgcagtcggccacccaccccccaggagggacggagccaccacggccccgagctggcagtgcgcatgtgtggaggcccggctcccgagaccagggtacctgtcccgcgagtgtctctgaccccagccaccccctactcagcaaccggggctcctcgggggacagacccgaggcctccatgacccccgatgccaaacacctgtggctggagttcagccaccccgtggagagcctggcgctgactgtggaagaggtgatggacgtgcgccgtgtgctggtgaaggccgagatggaaaagtttttgcagaacaaggagctcttcagcagtctgaagaaggggaagatttgctgctgctgccgggccaagttcccgctgttctcgtggccgcccagctgtctcttctgcaagagagagtttcactcttgttgcccagtcggaagtgcaatctcggctcactgcaacctacacctcccgggttcaagcgattctcctgcctcagcctcctgagtagctggcattacagagccgtctgcacttcctgtagcataaagagatgaagatgccttctaagaaatttggacacatccctgtctacacactgggctttgagagtcctcagagggtatcagctgccaaaaccgcgccaatccagagaagagacatctttcagtctctgcaagggccacagtggcagagcgtggaggaggcgttcccccacatctactcccacggctgtgtcctgaaggatgtctgcagtgagtgcaccagctttgtggcagacgtggtgcgttccagccgcaagagcgtggacgtcctcaacactacgccacgacgcagtcgccagacccaatccctctacatccctaacaccaggactcttgacttcaagtgacagccccaggtggccaggcctccaggaggcaccaggcaggccctgtatcaggctaggacgctctgagctgtgcatgtacatatatacatatatagatacatttataatatatacacacagtctatatatttatatacactgtttcctggccccagagctcatttgggttcaggcgcacttcaaaaccctccctgggggaggctgtttcttctcaggattccttgccagggaggaaggggagggaacagggtgggttttctcactgaagagagaaagcagaaggttctagatcctggcacagactgcatcccatgttcccatgctcttctccgtccccaggaatgcgaacggcagtttcccttccccagtggacgtctaggtggggacagggtatcttggctcccagctggaccagagtgccctgcttgcctctgctctccctttgtggggactcaggcagcagaggcatctgggaagtctctgagtaggcagggtcctcctgggaggcacccccacctgtttgaaaggtctggccaggcgtggtggttcaggcctgtaattccagcactttgggaggccgaggagggaggatcacctgaggtcaggagtttgagaccagcctggccaacatgatgaaatgttgtctctactgaaaatgcaaaaattagccaggtatagtggcaggaacctgtaatcccagctacaggggaggctgaggcaggagaatcgcttgaacccgggaggtgtaggttgcagtgagccgagattgcaccactgcactccagcctgggcgacagagcgagactctgtctcgaaaaaaaaaaaggtccgtgccaagctgctccctgcccttgccctttccctttccctggggtccaaaccacatgtgtcctgcctctcctggccctaccacattctggtgctgtcctcactcgcccctggcccagaggctcctgaagatgctgggcggtcctggcacagggaggagcagctctgtaaatctgtgcacatggccactcttggcctaataaaggaggtctcacagtcaaaaaactg

SEQ ID NO: 111200 - DNA, 2217 bp, Homo sapiens
cgcggctgcatggacgcgggtccggcgcgcgggaggcgatgacggccccgccatggcccgggcgggcagctgcggcggcgccgcggcgggcgcagggcggccggagccctgggagctgtccctggaggaggtgctgaaggcctacgagcagccgctcaacgaggagcaggcgtgggccgtgtgcttccagggctgccgcgggctgcggggctcgccgggccggcgcctgcgggataccggggacctcctgctgcgcggggacggctcggtcggggcgcgggagcccgaggccgcggaacctgcaaccatggtcgtgccactagccagctcggaagcccagaccgtgcagtccctcggcttcgccatctaccgcgcgctggactgggggctggacgagagcgaggagcgcgaactcagccctcagctggagcggctcatcgacctcatggccaacaacgacagcgaggacagcggctgcggtgccgccgatgagggctacgggggtcccgaggaggaggaggaggccgagggcgtcccccgcagcgtgcgcacctttgcccaggccatgcggctgtgcgcggcgcggctgaccgacccccggggcgcacaggcgcattaccaggccgtgtgccgcgcgctcttcgtggagaacgctggagctgcgggccttcctggccagggtccgggaggccaaggaagatgctgcagaagcttcgggaggacgagccgcatctggagacgcctcgggcagagctggacagcctgggtcacacagactgggcccgactgtgggttcagctcatgcgggagctccgccgcggagtgaagctgaagaaggtgcaagagcaggagttcaaccccctccccaccgagttccagctcacgcccttcgagatgctgatgcaggacatccgggcccggaactacaagctgcgcaaggtcatggtggatggggacatcccgccccgggtgaagaaggacgctcacgagctcatcctggactttatccgctcacggcctccactgaagcaggtctctgagaggcggctgcgcccgttgccaccaaagcaaaggtccctgcatgagaagatcctggaggagatcaagcaggagcggaggctgcgcccggtgcggggcgagggctgggctgcccgcgggtttggctctctgccctgcatcctcaacgcctgctccggagatgccaagtccacctcctgcatcaacctgtcagtcacagatgctgggggcagcgcccagcgcccgcggccccgcgtgctgctcaaggcgcctaccttggctgaaatggaagagatgaatacatctgaggaagaagagtctccgtgtggggaggtgacgctgaaacgggaccgctccttctcagagcatgacctggcccagctccgaagtgaggtggcctctggcctgcagtcggccacccaccccccaggagggacggagccaccacggccccgagctggcagtgcgcatgtgtggaggcccggctcccgagaccagggtacctgtcccgcgagtgtctctgaccccagccaccccctactcagcaaccggggctcctcgggggacagacccgaggcctccatgacccccgatgccaaacacctgtggctggagttcagccaccccgtggagagcctggcgctgactgtggaagaggtgatggacgtgcgccgtgtgctggtgaaggccgagatggaaaagtttttgcagaacaaggagctcttcagcagtctgaagaaggggaagatttgctgctgctgccgggccaagttcccgctgttctcgtggccgcccagctgtctcttctgcaagagagccgtctgcacttcctgtagcataaagatgaagatgccttctaagaaatttggacacatccctgtctacacactgggctttgagagtcctcagagggtatcagctgccaaaaccgcgccaatccagagaagagacatctttcagtctctgcaagggccacagtggcagagcgtggaggaggcgttcccccacatctactcccacggctgtgtcctgaaggatgtctgcagtgagtgcaccagctttgtggcagacgtggtgcgttccagccgcaagagcgtggacgtcctcaacactacgccacgacgcagtcgccagacccaatccctctacatccctaacacccgggcggtgggggcactgctccgcgccttggccagcagc

SEQ ID NO: 111201 - DNA, 1636 bp, Homo sapiens
catagaagacttcctacctgaggccgtcccctaggagttcagccaccccgtggagagcctggcgctgactgtggaagaggtgatggacgtgcgccgtgtgctggtgaaggccgagatggaaaagtttttgcagaacaaggagctcttcagcagtctgaagaaggggaagatttgctgctgctgccgggccaagttcccgctgttctcgtggccgcccagctgtctcttctgcaagagagagatgaagatgccttctaagaaatttggacacatccctgtctacacactgggctttgagagtcctcagagggtatcagctgccaaaaccgcgccaatccagagaagagacatctttcagtctctgcaagggccacagtggcagagcgtggaggaggcgttcccccacatctactcccacggctgtgtcctgaaggatgtctgcagtgagtgcaccagctttgtggcagacgtggtgcgttccagccgcaagagcgtggacgtcctcaacactacgccacgacgcagtcgccagacccaatccctctacatccctaacaccaggactcttgacttcaagtgacagccccaggtggccaggcctccaggaggcaccaggcaggccctgtatcaggctaggacgctctgagctgtgcatgtacatatatacatatatagatacatttataatatatacacacagtctatatatttatatacactgtttcctggccccagagctcatttgggttcaggcgcacttcaaaaccctccctgggggaggctgtttcttctcaggattccttgccagggaggaaggggagggaacagggtgggttttctcactgaagagagaaagcagaaggttctagatcctggcacagactgcatcccatgttcccatgctcttctccgtccccaggaatgcgaacggcagtttcccttccccagtggacgtctaggtggggacagggtatcttggctcccagctggaccagagtgccctgcttgcctctgctctccctttgtggggactcaggcagcagaggcatctgggaagtctctgagtaggcagggtcctcctgggaggcacccccacctgtttgaaaggtctggccaggcgtggtggttcaggcctgtaattccagcactttgggaggccgaggagggaggatcacctgaggtcaggagtttgagaccagcctggccaacatgatgaaatgttgtctctactgaaaatgcaaaaattagccaggtatagtggcaggaacctgtaatcccagctacaggggaggctgaggcaggagaatcgcttgaacccgggaggtgtaggttgcagtgagccgagattgcaccactgcactccagcctgggcgacagagcgagactctgtctcgaaaaaaaaaaaggtccgtgccaagctgctccctgcccttgccctttccctttccctggggtccaaaccacatgtgtcctgcctctcctggccctaccacattctggtgctgtcctcactcgcccctggcccagaggctcctgaagatgctgggcggtcctggcacagggaggagcagctctgtaaatctgtgcacatggccactcttggcctaataaaggaggtctcacagtcaaaaaactg

SEQ ID NO: 111202 - DNA, 1855 bp, Homo sapiens
cgcggctgcatggacgcgggtccggcgcgcgggaggcgatgacggccccgccatggcccgggcgggcagctgcggcggcgccgcggcgggcgcagggcggccggagccctgggagctgtccctggaggaggtgctgaaggcctacgagcagccgctcaacgaggagcaggcgtgggccgtgtgcttccagggctgccgcgggctgcggggctcgccgggccggcgcctgcgggataccggggacctcctgctgcgcggggacggctcggtcggggcgcgggagcccgaggccgcggaacctgcaaccatggtcgtgccactagccagctcggaagcccagaccgtgcagtccctcggcttcgccatctaccgcgcgctggactgggggctggacgagagcgaggagcgcgaactcagccctcagctggagcggctcatcgacctcatggccaacaacgacagcgaggacagcggctgcggtgccgccgatgagggctacgggggtcccgaggaggaggaggaggccgagggcgtcccccgcagcgtgcgcacctttgcccaggccatgcggctgtgcgcggcgcggctgaccgacccccggggcgcacaggcgcattaccaggccgtgtgccgcgcgctcttcgtggagaacgctggagctgcgggccttcctggccagggtccgggaggccaaggaagatgctgcagaagcttcgggaggacgagccgcatctggagacgcctcgggcagagctggacagcctgggtcacacagactgggcccgactgtgggttcagctcatgcgggagctccgccgcggagtgaagctgaagaaggtgcaagagcaggagttcaaccccctccccaccgagttccagctcacgcccttcgagatgctgatgcaggacatccgggcccggaactacaagctgcgcaaggtcatggtggatggggacatcccgccccgggtgaagaaggacgctcacgagctcatcctggactttatccgctcacggcctccactgaagcaggtctctgagaggcggctgcgcccgttgccaccaaagcaaaggtccctgcatgagaagatcctggaggagatcaagcaggagcggaggctgcgcccggtgcggggcgagggctgggctgcccgcgggtttggctctctgccctgcatcctcaacgcctgctccggagatgccaagtccacctcctgcatcaacctgtcagtcacagatgctgggggcagcgcccagcgcccgcggccccgcgtgctgctcaaggcgcctaccttggctgaaatggaagagatgaatacatctgaggaagaagagtctccgtgtggggaggtgacgctgaaacgggaccgctccttctcagagcatgacctggcccagctccgaagtgaggtggcctctggcctgcagtcggccacccaccccccaggagggacggagccaccacggccccgagctggcagtgcgcatgtgtggaggcccggctcccgagaccagggtacctgtcccgcgagtgtctctgaccccagccaccccctactcagcaaccggggctcctcgggggacagacccgaggcctccatgacccccgatgccaaacacctgtggctggagttcagccaccccgtggagagcctggcgctgactgtggaagaggtgatggacgtgcgccgtgtgctggtgaaggccgagatggaaaagtttttgcagaacaaggagctcttcacaattacaggtcagataagtaaccgagggcagaggggctgaccagtaccgtgtcggagtcacggccagagtcaaggtctcgacccagtgaaccccccacactgcctcgtgc

SEQ ID NO: 111203 - DNA, 251 bp, Homo sapiens
agtcccttgctgtgtaggcctctctcgggctgcttggggatccccacagcgtggtggctggcgtcccccagagcacgtggttcaagagtgagcgcagtgaaagccactgagtatttatgaccaagtccagcagtgccacattgtcccaactcactaggaatgagtcactaagtccagcctattctcaaggggagggagagaattaaggcccacttctttttttttttttttttgagatccgtctcaaaaac

SEQ ID NO: 111204 - DNA, 399 bp, Homo sapiens
ggttcactgggtcgagaccttgactctggccgtgacgccgccacggtactgctcagcccctctgccctcggtttcttatctgacctgtaattgtgaagagctcacctttgctgacatcttgaggcccacgtggacctgagttctggtgcaggatttaatcaactgaggtaaggggagtgtgcggcccgtgggccacggtggcagcatgcaggtgttggagggatgtgaacggtgtggttgctgtcactatttgaggttttatccagcggctcagatgagaacagatgttaaaatgctttgagaactatgagccttatataaatgcaaggcactgtgcgtatccccaccgaaacgcagggcctgccctgttagcctaggtcgtatcccaccgaaggcagg

SEQ ID NO: 111205 - DNA, 154 bp, Homo sapiens
catattctctcagtcactcacccaggtgcagaaacataggttccttatggagttttctatttttacctctattttacccacaaaccctgctagtcctccctgccatatgcctggcttattttaaggaaacacatgttgagtgaatggatgtctc

SEQ ID NO: 111206 - DNA, 275 bp, Homo sapiens
ataaactcttacaaactccaaaactaaagaaaacaggcttttaagtgtgacagaaactactgctttgacaacatttactgtatttgtttacatatagaagagcccaagtcccctacaattgtcttacaagtgtcttatgtccagagaacatgtaagatgagtgctagagacttgtcttactgagcttgtaactccagagcaggaccatgtagtcactactcatttatgcttttaattacaccactcggcactcttcaattgggttaggggaaatg

SEQ ID NO: 111207 - DNA, 487 bp, Homo sapiens
agagtccccatccagctctccaaattagcccctttccccatcttgccttgcgatgattatttacacacttcaccagccaccgcttcacccttctctcctccagtggaaaacatcaccatgtgatggacagaatatagctatgcagatgcaaacagacgttactggaaaaagagctctgtgatcaaaaagtttgataactgttgtttgataaatcttatgaaattattctcacagctttaagattccagtgtgcactgtgatcttttgaaagacaatgtatcattttgcaagagttttcagctacatttcttttaacgtgctggttatctggaaggactggtgtgctgaatgctgttcgggactatcacatcgggatcccgctcaactatagccaatataagcagctcaccatccaggtgctgctggacaggctcgtgttgcggagactttaacccctgggcatccagatatgcgagtacttgcgcct

SEQ ID NO: 111208 - DNA, 648 bp, Homo sapiens
agttcaagaccagcctggccaagatggtgaaaccccggctctactaaacatacaaaaattagccaggcgcggtggtgggcacctgtaatcccagttatttaggaggctgaggcaggagaatctcttgaactcaggaggcagaggttgcattgagccgagatcactgcactttagcctgggtgacagagcaagactccatctcaaaaaaaaaaaactggggtagaaatggatgctctagattagaaagaacttaaatgacataacagatttttaaatattggcaaaatgaaacactataaaggtatacatgtgggtgataagtctataaagaaatacagaaaaatagattattattataaatgtcaaagaagttgttacttttaggggcagggagtgaccatttgaagaactttgggaatcctggcaatattctatttttcatgtccaggctagtgattacaaacatttatcctataataattcattgagccaaatatttgtgcaattttctgtggtctgtgaatttacatactctgggaaagagtattccaagcataaaaaataaccaaggaaagtaatctgggatgggagtgagctcagtattcctaagagggagaatgaagggcagggtggttcaatctcataagt

SEQ ID NO: 111209 - DNA, 658 bp, Homo sapiens
gatccgcccgcctcggcctcccaaagtgctgggattacaggcgtgagccatcacgcccggccccaaccatttctgtagtgggtatcttttatcctagaaaaatttagaacatacagaaataataaaagccattactgtgtaccagtaaagcccactgatttagtatttttgcgacaagtttaggaatacgttttgtactgagacaatctatgtatattttgcatatcaagtatgtgttagacttcaactgtaatcaagtaactggttttcagattcactaattctttttttttttttgagacagagttttgctcttgttgcccaggctggagtgcaatggtgtgatcttggctcaccacaacctccgcctcgcaggttcaagcttttctcctgcctcagcctcccaagtagcagagtttacaggtatgtaccaccaagcctgactaattttttttgtatttttaatagagacggggtttctccatgttgggtcaggctggtctcgaactcccctcctcaggtgatgcgcccaccacagcctcccaaagtgctgggattacaggtgtgagtcacagtgcccggcccagattcattaattcctaaggtgaaagatactttctaaattgactaatttggttgcagtggatggtttaagata

SEQ ID NO: 111210 - DNA, 356 bp, Homo sapiens
aaacattccaagcttgtgataagccccctcaccctaaaaccaacatatactctcagtctgtaagagaaagcgctcctgaccaaaatcggccaggagtacctctcaggttttaactaaagaaaacctgtctttgactgccaagctgcgtttcatgtttctttcctctttaactcttacacctgttacagatactgggaggtccagcatgatattatttgaaacaacacatcagggttctatggctggaagaaaccccagctgtctccaccccctgggaggcgccactcaccccgctgtcttggacatggcacctggtgtccaggctgggtgactgggaggtgggggaccctctgctc

SEQ ID NO: 111211 - DNA, 129 bp, Homo sapiens
agcacctttatctctgtgactagaaatcagtcttcagcaaggatcaaggacagtttttacctgtaggctttggaatagtctggaggctctcatttttacctggctgtcaatccctataggaggagtttt

SEQ ID NO: 111212 - DNA, 281 bp, Homo sapiens
aaaaatccagaaagaaaaatatttgataaaagttgattacctatttgataaaatacagttaactcttcaacaacaatgggggttggggcattgaccctcatgcagttgaaaatttgtttataacttttgggttcccaaaaacttaacctactaacagcgtactgttgcacagaagccttgccgataacgtaaaatagtcacttaacatattttgtatgtttcatgtattatatactatattctttaataaagtaacctagagaaaagaaatggtcattaat

SEQ ID NO: 111213 - DNA, 295 bp, Homo sapiens
attttaacagtaaataaatattgaaaagaaagaaaggttaaaactagcctttaagtaaacgtgtcagaaatatatctaagaaaacaggctatttgatatcatgccactggattacaacccactgagaaacaggtgggggcatcataaattcaaaatgccaaaaagtcactataaaacactttttatataaatcatttaactattaagtaaacaattgcttatttaaaaatccagatgaaggcgaggcacaatggctcacacctataatcccatgtctttcggaggccaaggcagg

SEQ ID NO: 111214 - DNA, 403 bp, Homo sapiens
acgttatctatataggtgtattaaaacattcatgaattttgaggaaattatgctaagtgaaataagccagacacagaaatgcaaatactgcatgattccatttatatgaagtatctaaaatagtcaaactcaatgaaggagaaagtagaattgtggttgctatgggccaggggaggggaaatcaggagttgcttttcaaagggtataaagtttcagtcaagcaaaataaaaatgttatagaaatcagctgtgcaatattgtgtttatagttaacaatactgtactgtatgtataaaaatttgtaaagtgagtagatctcatatgcttaacacaataaaaatatttaaaaaataataggaaaaaaaaaagcagtccaataaattgactaaattaaggacaaata

SEQ ID NO: 111215 - DNA, 292 bp, Homo sapiens
tctaagggagtttcccagccccaggggttaaagaactggagtcaagattggaacccagctggcgaaggattccgcaccgctagatcttgacatttgcctcttcttctgccaggaaggctcccctgttcctttttgctgacgtgtcatttctaagtactttctcctactccataaagacttcaagtgagtacacaatactggtgttagtttaatttctaagacagtgagacactcggagaagttcaattttctttaatgcaagtgaaaaattgagttacttaaaagaaataga

SEQ ID NO: 111216 - DNA, 645 bp, Homo sapiens
atgctttggaaagtagctccaaggaggacaattttggatcccacagggagggatttggtagtagtgggagctggctgagattggagggagtccccatccctggagaaatgcacctggggggccgtgggaggcatggaatggtatgttcatgtcctatgctgctgtaacaaatggccactgaagttgtgacgtgaagcaacaggagtttatcatcttacagttacgaggccagaactccaaagtgggtcccactgggttacaatcagggtgtcagcagggcacgatcctccgggaggctctaagggagagtccaagccttcgtcttttctggcttctggaggctgcctgtgttccttgactcatggccttccctccatcctcaaagccagcagtgtcaggccgggtacctctcatgctgcccctctctagggctctcttctgcctccctcttccatttcctgtctcctgtgatttcctcaggcccacccagataatccaggataatctccccatcccgaggtcagctgattagcaaacttaactccatctgcagccttaattttcctttccatgtaccctaacatattcccaggctccagggaccagggtgtgaacatctctggtagggctgttatgctgcccacc

SEQ ID NO: 111217 - DNA, 448 bp, Homo sapiens
agtgcagggcctctgactagcccgggcatcatttataccagttattcaagactgagggaccccgggagttcaggcccaaagaatgtctttagctgcaaaattgcagtacaacatcaagtgaaacgatggatctaccctcttctctggattgcttctgggtatctcagagctgctaataaaattgtcttgtgctttgggctgtcttgtggggagaaacagggggcagggtaagtgtttttgagctctaacctttcaaaaaccccatagaggtggcaggatttctgttcattcctcctcatgcctcttttcccagcccttgtacattttatcaactgttctcggcatgtaatacatttacggagctgcacttttggtctcagggaattcagcagtttctccaagtttatctggtggcacattgtttccttactaggaggcagaggtcaag

SEQ ID NO: 111218 - DNA, 789 bp, Homo sapiens
attgtgggaaaactaccttacatcttgacggaacctgaaaactttctctactttatctggtttcaaattatgcaagaaagtccccatgaggacttcattaaacctgccagagttttataaccaaaaacctcactggaacccccacttttacgaatctatgaaagtaatttaacccctctgtgttctgcttgcccaagatcagatgcaaatactattaaacagtatatacagtttaattctcttgagttttggtgatgaaaaatcctatccaaatattatgatccttgcaatacgtaatgtaaccaaattaacgatagctccaggtggaaattaacaaggccagggctactcacgtttcctctcatctattcccatagtaacagctaatgtattatattgctaaaatatcttatattcagttttatgtctgaacttggtgttgtgtcataaagcgtagcattcctatccagactggattcttaatatgtgtatcctcatgaaatttaggagagtttcgtgtctgcaaatcaacacttcatgtgcatagtctaaaccacatgcagataaaagcaagtcagaacctaccaagactctcaccatagtgaacctacacatggtatagaggaagaattcttacctgggagacctgatgacacattaccagtgcaggacctaaagcgaatcaccatagagagatccacacaggaattatagtgtgaaaaaaaatccccaatcatagacattgttagcttcagttttcagtgaatctaaactcttctagtatgaaaa

SEQ ID NO: 111219 - DNA, 410 bp, Homo sapiens
tcaaaatcctattacaagattttatttgcagatgctaggaacagaaggctagagcctccatagtttattgctactcaacttcatcaggtctgctcactctattgaaaactgtggcaaaaatgatatacatcagctcttttatttttttgttaccactctgtgcaaataaaagcatattggggaatttaatgaagcagtatgtccttggagggagctttaaagattctgagtgtacaactatttgtctttaatactggaggtttctgtgtaaaactggcaggagcaaaataaagtcttcacagaccaatgtttgccacatacacacttgaatcgcacaaatgtctacgcagcggtgaccttggagatggatgcattcagtgactattatagtggcttttgaggtgtgtcag

SEQ ID NO: 111220 - DNA, 650 bp, Homo sapiens
catataaagcataccaaaaagttaatattcataaaagcattttcttgccaaaaatagataaatttaagagaaatcattgttgatttctgagttacatgtaaagtcaatatatgctgctaaactctctttaacttttccagtatgttacagtttttaacaatctgttgttcaaaaactaaataccagaggtatataaaatattagataatatttgagcataaactgttgaaggcaacagcataattttatttccttatgccataatagagcatcacatctcagtcagcctaccccaatgatgacatattttctgaattgtttttacccacacatcttatgctcaatttaacaaatatttattaagtgcatagttggcaaggtgacactatggaggagatgaaaaagactaaggtatcatttgtgcccttgaggaattaataatctgacggcaaaagctgacatgtatacaatcaactgtagtatttgaaaggataaagtaagtcctttaatagcaatataaactgctcggctagtattgagagagcaaggctagagggcagagcaatgtgaagcttggattgaagtggcaggatattaaaggcaagacatcagttatgaagctaaagcatatataggcaataacatgataa

SEQ ID NO: 111221 - DNA, 1458 bp, Homo sapiens
ttcctgcttagttcttcctgaggtctgagcaccctccaaactgagtccagatctgagtttttcctcggagatttgtcagaatgagcctccaggccccatccagactgctggagctggcagggcagagcctgctgaggaaccagttcttgaccatcttcaccctggatgagctgcccagggaggtcttccctctgatgttcatggaggccttcagcatgagacgttttgaggccctgaagctgatggtgcaggcctggcccttcctcagcctccctctgggatccctgatgaagacacttcatctggagaccttgcaagctgtcctgaggggacttgatacactggtggcccagaaggttcgccccaggaggtggaaacttcaagtgctggatttgcgggatgttgatgagaatttctggaccatatggtctggagccagggtcctctcctgctccccagaggccatgagtaagaggcagacagtggaggactgtccaaggatgggagagcaccagcccttgaaggtgttcatagacctctgcctaaaggaaagtacactggatgaatgcctgagctacctttttgggtggatccactacagaagaggcctagtgcacctgtgttgtagtaaggtgcagaattactcaatgcccacttcaagtttcagaaatctattggaaaggatatacccagacagtatccaggagttggaagtctggaaaaagtgctctctcaataaaacgggaaagtttgccccttacctgagccagatgagcaatcttcgtgaactctttttagccttcggttatgagcgtgagttgtacgtgagcgtccagtggccgtgcattcctgacttggactctccattcctctgcctgtactacccccagatgctttatataaaaaagatcagtaatatcaaagagcacctggagcacctgctcaggtacctcaagaaccccttgggggcctttatattcagtgatgcttacctaactgatcgggacatggagtgtctgtctcagtacccaagcctcagtcagctaaaggagctgcgtctgattcatatcctaatgtggaccacccatcttgagccccttggagttctgctggagaaagttgctgctactctcaagaccctcgtcttaaaggactgtcggatccaggacccccaactcagggtcctcctgcctgccctgagccactgttcccagctcaccaccttcaactttcatggaaatgagacctccatgaatgctctgaaagacctgctgcgtcacacaggcgggctgagcaagttaggcctggagttgtatcctgcccctctggagagtcttgactacaagggtcatgtcaattgggagatcctcaccccaattcgggctgagctgatgcgtacactcagggaagtcaggcagcccaagaggatcttctttggtcccgtcccttgccctaact

SEQ ID NO: 111222 - DNA, 430 bp, Homo sapiens
gaactcaaaagttaaatatttcaccatgcttctgtatgattttaacatgttaaatgtggctaatttgtcactgttggacttcaggtgacctaatattcaaaaagttaattaggtcactaagggtaaattagaatttgatttggaaagtttgtcaaatatcaaaggattgaaacagtgttacaaaatagaatcaccaatcacgattaaatgaattactcattaagtcaaaaatgatattttaaatatttctaaaaagcaaaaatctttattctttgatatagagaaaggagatacagtttcttaaacaataaggtctaatatcaggctgagtgcactggcttgtgcctgtaattccattgctttgggaggccgacacgggaagatcatttgagctcaggagttcaagacgagcctgggcaatatagtgaga

SEQ ID NO: 111223 - DNA, 335 bp, Homo sapiens
ccgaggctcacgtgggtgctaagactgacttttctagggtcagctccacttaaagggacttagggctggctacatgcccctctttcccaaacccaggtcttccagaactttcaaaatcaaaatcggggttgcgttaggacatgcctctgggataagattccccatggtgggatggcagcaggtgagcaggtgtgccttcctctcgcctcctgctgtacctttgaagtccatggctgaggttccatgtccctaactcaggagagtgaggacagagggaaggaggctttaccaagatctcagtctaaaaaggctggtgagctgcagagtggagcggg

SEQ ID NO: 111224 - DNA, 301 bp, Homo sapiens
aaaaaaaaaaaatctgggacttttaaaagtgaaatggtgatatacaaaaaataattccttgagtttttatgttggtctctttgttatagtgcttcaattcaagatatatgtgtatgtttgcaagtgtacatgttttctaataaggttgaagatgtagaaattgaaaagattatatcctgctatggagatttacttttttaaagagcaataatcaaggaattaaaataaacatgaagtgtaaaatgcttaggttactcatgtttttcctcaagagaagaaatgctcatgtttttccctgagg

SEQ ID NO: 111225 - DNA, 566 bp, Homo sapiens
tacactgagttaacaatgttcacctataaggtagtccctcacttggcttctcttccctcaatggacaacacacccaattggtgagactctagaggagaggaatggacacactcacatgttgtttattggaatgcagagtggtataacctcctataatggggttttgtcaacatcatctttgatctaggaaatcctaccttaggagtatgccttaaagatagaatggcaaaaatacaaaatgacatatgcacaaggatatattcattgcagcattatttagagtagcaaaagattgaaacaacccaaatatccatctgttagggttctgattgaataaaatggttcatgccccaagtgggatattatgtaggtataaaaatcaaaaacaataccttttaagctgtgattgctactgtacattttgttaagtaaaataataagatacagaacagtgagtaaagtaggctttttatttaagtaaatatatttgagtatgtgttcatgtgtatatctatgtttctacttttatttttttttaaaaaatggaattaacccaaaactaattt

SEQ ID NO: 111226 - DNA, 718 bp, Homo sapiens
gaaagtaggtccagtaaaggaagccatatggtttgccgttcaagtctgatgcatttgtgaagtaacagatgcaaaattgagcacacctggaattcagaggcagaagccctgacagagcaatctgttgtgtaacaccatagatgcttgagaatttgtggggatgaagtccctacagaaataacctgccttgagagaacccacatcttaatacataacctacattggctgttgggcatttcttttttatggctggctacatttatactctcattagttttctgatgattgaataaatatggtcacatagagtttatttgagtgaataaaaagaataagaggtataatacgaaaatgcaggcactgtcttagctgtattgttctgtaatattatagtagggtttttacatatggtgggtgttgtgtgtggtcattgctgagttttgcataactcttttacacaaaaggggcttcttttgcattatttttttgctctactaacagtggtaactccttcaggatagaggttggcagtgttgcagaatgtcacatggattatatgtctggattgtttagaccaaatattactgtataaatctgggctcaaggaagagttgggctgaggcacaatctagttctaatgcatctgtcagttacaaatccctctcatatctctattgcatattagtgcaataacctgaaatgactgatagccagagag

SEQ ID NO: 111227 - DNA, 667 bp, Homo sapiens
gcccaacaaattctagcccccgcagcctccccagctctgatctcaactgaccactctccactccaatctcagatgtcctcagctggcaagactgggccctccttccctgtgcagcagcctgcaacctgccttcaggcagcacagtctggcattccccgtggttcaatgtctaaaagtcattgtttatgtactttgtccagtttcctattgtttacagcaggaagataaatccagcctctagtactccatggccagaagaagtctcatcttctaaatgtaaattaagcatgtattgatacttctagggggaagttaggggacttggctcatcagttcccaacatacttaaatataacacactttaatgtctgctttcttctttgtaacttaagcgatgacataaatgatgctcttcagtgctcacactaggctaatctaagcttgagtgtttttctgtgatcaacttgaaattatctacataaagagtattaattttgacttatttgtggccaacttatatagagtagcttcccatgaatgatggatatgttagtattctgattctaaggacattgttagctatctgtatgtctggttaatttgtcataagaacttatgtcatgtatcatgcttggacttttaaaaatatgaacttgctgattttata

SEQ ID NO: 111228 - DNA, 335 bp, Homo sapiens
atcctcgggggagacacatctaaatgtgtaaaaaggaaattttattgtacacattgtggcctatttattttcgaattactcattctggaattagaaaatagaaacggtttaaggcttctggataattattttgtcatcgcacacacaccaaggattagaaggaaaaaaagagcagtctgctattaaagactcaacaatgtgaacctttggacacgcagtcctacctctccgttaagccagattgactgcccaagaactggcacagtacacaagaactagtattctctgttctgctcacacatgagcgtgtgagggcgatgggcagaggatcactt

SEQ ID NO: 111229 - DNA, 378 bp, Homo sapiens
ccagagcctgccacctaaccccctgccatgggttcctaatgggtatttttgggccatgtccttttcttcctactgcctacaactgccgctgcctcacattctccctaagacccatctcccaatgggtctcccttaccaacacactgagtcttcattctacctcaaggtcaagggctctcttggtcttaataatatttttccttcttaatggagggggagaagagctctggtgccagagagacctagggacagatcctggagctgccccttgctggtgattggaccaggatgtagctcatcgtgtgtgaaatggcagtgctttctacctggaggggcaggtgtaaggatggaaatgggatagtgccctgccccgaggct

SEQ ID NO: 111230 - DNA, 363 bp, Homo sapiens
gtgatgaagcctcctctgccacctccttgtgtgtaccacgtgccgcagccagccatggcagggcccctgctaccacctctgcatctcgcttgagtggcacctggctggggcaggaagaccactgatttggagtcagacagacctactttctagccaccatctggagctctctgagcctcagttcctcactgagcaacgcatgcaggaacacatctgcttaggtccccacagccacgtcctgggtaggctgcctcccccatcctgccctgccctgtgtttaactcccctccaactctaggattgagatactgtggcatcccaatggcagcaaagtaacagctcagataaatctcctccccccga

SEQ ID NO: 111231 - DNA, 515 bp, Homo sapiens
gtgatgaagcctcctctgccacctccttgtgtgtaccacgtgccgcagccagccatggcagggcccctgctaccacctctgcatctcgcttgagtggcacctggctggggcaggaagaccactgatttggagtcagacagacctactttctagccaccatctggagctctctgagcctcagttcctcactgagcaacgcatgcaggaacacatctgcttaggtccccacagccacgtcctgggtaggctgcctcccccatcctgccctgccctgtgtttaactcccctccaactctaggattgagatactgtggcatcccaatggcagcaaagtaacagctcagataaatctcctccccccgacccctgcctgactccttgattccctttaataattagcttctcttccaggctttccatttcaaagcaagaataaatatgtgaaatcaaccagggagctgctgagtcttggctgtcatgagactgatgatggctggtgctccagcaaccacaga

SEQ ID NO: 111232 - DNA, 5361 bp, Homo sapiens
aggaagtagggagagaggagttgggctgtgccggaggccgaggaccgagagggctcaggtgacccctggaaagcctgggtggctggaaaggagcctagcgcctgcatgaaaggaagaacctgctgggaagtacctgagctcgagctgtgggttccgccgcccttcccctgcgtggtggcttggtggccgcgtctgcgcctcagccctgagaatccggatggcggtgaggtggacttgggcaggcaagagctgcctgctgctggcgtttttaacagtggcctatatcttcgtggagctcttggtctctacttttcatgcctccgcaggagccggccgtgccagggagctggggtcaagaaggctctcagacctccagaaaaatacggaggatttgtctcgaccgctttataagaagccccctgcagattcccgtgcacttggggagtgggggaaagccagcaaactccagctcaacgaggatgaactgaagcagcaagaagaactcattgagagatacgccatcaatatttacctcagtgacaggatttccctgcatcgacacatagaggataaaagaatgtatgagtgtaagtcccagaagttcaactataggacacttcctaccacctctgttatcattgctttctataacgaagcctggtcgactttgctccgtaccattcacagtgttttagaaacttctcctgcagttcttttgaaagagatcatcttggtggatgacttgagtgacagagtttatttgaagacacaacttgaaacttacatcagcaatcttgatagagtacgcttgattaggaccaataagcgagaggggctggttagggcccgtctgattggggccactttcgccactggggacgtcctcactttcctggattgtcactgtgagtgtaattccggttggctggaaccgcttttggaaaggattgggagagatgaaacagcagttgtgtgtcctgttatagacacaattgattggaatacttttgaattctatatgcagataggggagcccatgattggtgggtttgactggcgtttaacatttcagtggcattctgtccccaaacaggaaagggacaggcggatatcaagaattgaccccatcagatcacctaccatggctggaggactgtttgctgtcagcaagaaatattttcagtaccttggaacgtatgacacaggaatggaagtgtggggaggtgaaaaccttgagctgtcttttagggtgtggcagtgtggtggcaaattggagatccacccgtgttcccacgtgggccatgtgttccccaagcgggcaccatatgctcgccccaatttcctacagaatactgctcgggcagcagaagtttggatggatgaatacaaagagcacttctacaatagaaaccctccagcaagaaaagaagcttatggtgatatttctgaaagaaaattactacgagagcggttgagatgcaagagctttgactggtatttgaaaaacgtttttcctaatttacatgttccagaggatagaccaggctggcatggggctattcgcagtagagggatctcgtctgaatgtttagattataattctcctgacaacaaccccacaggtgctaacctttcactgtttggatgccatggtcaaggaggcaatcaattctttgaatatacttcaaacaaagaaataaggtttaattctgtgacagagttatgtgcagaggtacctgagcaaaaaaattatgtgggaatgcaaaattgtcccaaagatgggttccctgtaccagcaaacattatttggcattttaaagaagatggaactatttttcacccacactcaggactgtgtcttagtgcttatcggacaccggagggccgacctgatgtacaaatgagaacttgtgatgctctagataaaaatcaaatttggagttttgagaaatagagcacaacagcactttcgtcatgagctgacagtagtgtcaagaaagtcaaaagagccttaagagcctcagtgaagattgtattttattttatcaaaagccacctagcagtcatctgtggagcactggaaagctggggttcattttggtatatcacactgaaactgggtacccagagtgctgctgtttaatatttcacaatgccttacttattggttgttttatataagagtttgtcaatatggtctcttcttaaaagaagttgactatgaattgaaacacacaaaacatttaagtgccagacttaatattaaagaatgtaaaggtccaagtaaaatgaggtatgatttatgttgatgtgtaagttcaccgcacatcccactttttaacaaaactcatgaatgtgcagttgagccattgctattttgattacatagaattgtatttcttttttagccagcacattaaattttagattttattttttaatctaatttttttctaatcaaaaagaaaattgagcttaaggcaaaaggcctggttttagagatatgtgtaattggaagagggcatttgtttgagtgtgagtttggaggcctttttaacatgcagacatacccatatttaaatgaaatggggagatatttacattccgtactttgtaaacttgagctattggacttcactgatgtatatattaatacctcagattcctctgattttgtaagctgtcttctctgtgaacgtgtttgtgtgtgtagggcattttctgattgcacttccttaagttatgaatgtactagaaagggactcatccagaatactatgcctccctttgttaatgcttaatcatttaaagtaaacacaattgaagcctctctgaagttaaacccaactatgtttattaaaatgtgtgaaactgaaagtgggctaggttctaccaaggctgtggaactctcctacgagttctgctgatcaggaaatttaagaatttatcttaaaaatgcaaggaaaaaagactgccttggcaattgtgaatggtgctttcaatctcctagcaccgagcctggcacttaggcagctttcagtaagtgggtgaatgaatgactgaatgaatgaatgaatggctcagctgaggaatgtaactttggtcaagttattatgatgtgtttgggcttagttttctcattggtaaaatgtgggtgctggattggatcttaaagatcccttccagctctgaaatgctgattgtacagtatattcttcccagattgactcactgtgcaatctttacaatactttttatcttttcacttttgacataggtaatgttgttgagcagttgagcaatgttcagtccagttgtgaagctggagaagagaaatgggttttaaaaattaagtgaggggaggccgggtgcggtggctcacgcatgtaatcccagcactttgggaggccaaggcaggtggatcacgaggtcaggagatccagaccatcctggctaacatggtgaaacctcgtctctactaaaaatacaaaaaattagccagctgtggtggcgggcgcctgtagtcccagctactcaggaggctgaggcaggagaatggcgtgaacctgtgaggcagagcttacagtgagccgagatcgtgccactgcactccagcctgggcgacagagcaagactctgtctcaaaaaaaaaaaataataataaaataagtgagctgaactcacctgaagtggtttacttctgtgggttaagaagttctagtcagtgttcatagtcgtttcgttttgataattgttgaaccaattttgtttttaaaacctttagactctgaaagtaatattttgactaagaatgtaaatatttccaaactaaattactcgggaagtaaacgctttttttaaaagtatttttactggttttataccaatattatatgcagaaatcacaggatgaatttagaattaaatctcaattagttcactttggcctagatttatgaaaaatgcatgcctcgtaaagagtccactgtattcacgagtaaagttgcttttagtgttcacttgatgacttggagagtaggaattttgcaaaatctgaatttaaggaaattctttaggataaccatttcaaaaaataaaattgctatgcaatcttgaatattttctcttttgcctcgtaaaatgaaaatgcattcacagtttctgtaaattatttagcagccttaaagtttatcaaaaaattgtccagattccacgtgcagcatgcttggccctgcatttaatttaagaaggattaataataatgctctgaatttttcgaaagggattctcctaaacccacccacttctcttgcccaggctgctttttaaaaatatttttttattttttacttatttttaaattttctctttttatttatttttggttttcttgttagccccctgttatatgggagaacgaaaattgttatattttgaaagtacttattacattatttttattttagtatcttgatgctcctgtcaaaagggaaatgaggcttttaaaaataaagtaccttaattctttattgactttttgccctaaattgctaggtgtgacccagcaatcttttaggaagagattttacagtggtgctttatttatatcaataatccagtatagttaggctgttcattcctcataatagagtacataacagaaaagtgggactttcacattttcatatttaggcacgttccaatttaattccaaaaatactctgtaattctacatctaaaaaaaccgattccctaattcgaatttattggtaccaaagctctctttggctatagacaattaagagttgaccttttaagttaatgtatatgcttaaaaacagttttaggaaaatatttggtagacaaagagtttcaactttaaatgttcactatgtcatttagtgtccaactttacggataggttgactatctaaataggcatttttagtcattaaaaaaaaatctagtcaccaggaggatccctataactcaaaataacttgtttgtaaaagaaaatttgtttacttacccattagtaagttcctgcatattcattataagatggcaaatcaaacttttctaggatgaagacagcttatttttaagttgtatagtcttagttggtttagggtctcaattttaattaataaaatacttggtttttatttgcttgtccttttgaattcctgttttaataattttaaaatgagcacaaagaatgttgaagttcagattaatctcttctgaatgatgtttttttcctctgtgatgagttgtttctgacttttttccttttgtatttgtaatgttgattaagatgtaaaataaaaagtgtgcctgattatttttgcaaaataaaga

SEQ ID NO: 111233 - DNA, 4094 bp, Homo sapiens
aggaagtagggagagaggagttgggctgtgccggaggccgaggaccgagagggctcaggtgacccctggaaagcctgggtggctggaaaggagcctagcgcctgcatgaaaggaagaacctgctgggaagtacctgagctcgagctgtgggttccgccgcccttcccctgcgtggtggcttggtggccgcgtctgcgcctcagccctgagaatccggatggcggtgaggtggacttgggcaggcaagagctgcctgctgctggcgtttttaacagtggcctatatcttcgtggagctcttggtctctacttttcatgcctccgcaggagccggccgtgccagggagctggggtcaagaaggctctcagacctccagaaaaatacggaggatttgtctcgaccgctttataagaagccccctgcagattcccgtgcacttggggagtgggggaaagccagcaaactccagctcaacgaggatgaactgaagcagcaagaagaactcattgagagatacgccatcaatatttacctcagtgacaggatttccctgcatcgacacatagaggataaaagaatgtatgagtgtaagtcccagaagttcaactataggacacttcctaccacctctgttatcattgctttctataacgaagcctggtcgactttgctccgtaccattcacagtgttttagaaacttctcctgcagttcttttgaaagagatcatcttggtggatgacttgagtgacagagtttatttgaagacacaacttgaaacttacatcagcaatcttgatagagtacgcttgattaggaccaataagcgagaggggctggttagggcccgtctgattggggccactttcgccactggggacgtcctcactttcctggattgtcactgtgagtgtaattccggttggctggaaccgcttttggaaaggattgggagagatgaaacagcagttgtgtgtcctgttatagacacaattgattggaatacttttgaattctatatgcagataggggagcccatgattggtgggtttgactggcgtttaacatttcagtggcattctgtccccaaacaggaaagggacaggcggatatcaagaattgaccccatcagatcacctaccatggctggaggactgtttgctgtcagcaagaaatattttcagtaccttggaacgtatgacacaggaatggaagtgtggggaggtgaaaaccttgagctgtcttttagggtgtggcagtgtggtggcaaattggagatccacccgtgttcccacgtgggccatgtgttccccaagcgggcaccatatgctcgccccaatttcctacagaatactgctcgggcagcagaagtttggatggatgaatacaaagagcacttctacaatagaaaccctccagcaagaaaagaagcttatggtgatatttctgaaagaaaattactacgagagcggttgagatgcaagagctttgactggtatttgaaaaacgtttttcctaatttacatgttccagaggatagaccaggctggcatggggctattcgcagtagagggatctcgtctgaatgtttagattataattctcctgacaacaaccccacaggtgctaacctttcactgtttggatgccatggtcaaggaggcaatcaattctttgaatatacttcaaacaaagaaataaggtttaattctgtgacagagttatgtgcagaggtacctgagcaaaaaaattatgtgggaatgcaaaattgtcccaaagatgggttccctgtaccagcaaacattatttggcattttaaagaagatggaactatttttcacccacactcaggactgtgtcttagtgcttatcggacaccggagggccgacctgatgtacaaatgagaacttgtgatgctctagataaaaatcaaatttggagttttgagaaatagagcacaacagcactttcgtcatgagctgacagtagtgtcaagaaagtcaaaagagccttaagagcctcagtgaagattgtattttattttatcaaaagccacctagcagtcatctgtggagcactggaaagctggggttcattttggtatatcacactgaaactgggtacccagagtgctgctgtttaatatttcacaatgccttacttattggttgttttatataagagtttgtcaatatggtctcttcttaaaagaagttgactatgaattgaaacacacaaaacatttaagtgccagacttaatattaaagaatgtaaaggtccaagtaaaatgaggtatgatttatgttgatgtgtaagttcaccgcacatcccactttttaacaaaactcatgaatgtgcagttgagccattgctattttgattacatagaattgtatttcttttttagccagcacattaaattttagattttattttttaatctaatttttttctaatcaaaaagaaaattgagcttaaggcaaaaggcctggttttagagatatgtgtaattggaagagggcatttgtttgagtgtgagtttggaggcctttttaacatgcagacatacccatatttaaatgaaatggggagatatttacattccgtactttgtaaacttgagctattggacttcactgatgtatatattaatacctcagattcctctgattttgtaagctgtcttctctgtgaacgtgtttgtgtgtgtagggcattttctgattgcacttccttaagttatgaatgtactagaaagggactcatccagaatactatgcaaaatctgaatttaaggaaattctttaggataaccatttcaaaaaataaaattgctatgcaatcttgaatattttctcttttgcctcgtaaaatgaaaatgcattcacagtttctgtaaattatttagcagccttaaagtttatcaaaaaattgtccagattccacgtgcagcatgcttggccctgcatttaatttaagaaggattaataataatgctctgaatttttcgaaagggattctcctaaacccacccacttctcttgcccaggctgctttttaaaaatatttttttattttttacttatttttaaattttctctttttatttatttttggttttcttgttagccccctgttatatgggagaacgaaaattgttatattttgaaagtacttattacattatttttattttagtatcttgatgctcctgtcaaaagggaaatgaggcttttaaaaataaagtaccttaattctttattgactttttgccctaaattgctaggtgtgacccagcaatcttttaggaagagattttacagtggtgctttatttatatcaataatccagtatagttaggctgttcattcctcataatagagtacataacagaaaagtgggactttcacattttcatatttaggcacgttccaatttaattccaaaaatactctgtaattctacatctaaaaaaaccgattccctaattcgaatttattggtaccaaagctctctttggctatagacaattaagagttgaccttttaagttaatgtatatgcttaaaaacagttttaggaaaatatttggtagacaaagagtttcaactttaaatgttcactatgtcatttagtgtccaactttacggataggttgactatctaaataggcatttttagtcattaaaaaaaaatctagtcaccaggaggatccctataactcaaaataacttgtttgtaaaagaaaatttgtttacttacccattagtaagttcctgcatattcattataagatggcaaatcaaacttttctaggatgaagacagcttatttttaagttgtatagtcttagttggtttagggtctcaattttaattaataaaatacttggtttttatttgcttgtccttttgaattcctgttttaataattttaaaatgagcacaaagaatgttgaagttcagattaatctcttctgaatgatgtttttttcctctgtgatgagttgtttctgacttttttccttttgtatttgtaatgttgattaagatgtaaaataaaaagtgtgcctgattatttttgcaaaataaaga

SEQ ID NO: 111234 - DNA, 2669 bp, Homo sapiens
gaatgtactagaaagggaggcatagtattctggatgagtccctttctagtacattcataacttaaggaagtgcaatcagaatactatgcctccctttgttaatgcttaatcatttaaagtaaacacaattgaagcctctctgaagttaaacccaactatgtttattaaaatgtgtgaaactgaaagtgggctaggttctaccaaggctgtggaactctcctacgagttctgctgatcaggaaatttaagaatttatcttaaaaatgcaaggaaaaaagactgccttggcaattgtgaatggtgctttcaatctcctagcaccgagcctggcacttaggcagctttcagtaagtgggtgaatgaatgactgaatgaatgaatgaatggctcagctgaggaatgtaactttggtcaagttattatgatgtgtttgggcttagttttctcattggtaaaatgtgggtgctggattggatcttaaagatcccttccagctctgaaatgctgattgtacagtatattcttcccagattgactcactgtgcaatctttacaatactttttatcttttcacttttgacataggtaatgttgttgagcagttgagcaatgttcagtccagttgtgaagctggagaagagaaatgggttttaaaaattaagtgaggggaggccgggtgcggtggctcacgcatgtaatcccagcactttgggaggccaaggcaggtggatcacgaggtcaggagatccagaccatcctggctaacatggtgaaacctcgtctctactaaaaatacaaaaaattagccagctgtggtggcgggcgcctgtagtcccagctactcaggaggctgaggcaggagaatggcgtgaacctgtgaggcagagcttacagtgagccgagatcgtgccactgcactccagcctgggcgacagagcaagactctgtctcaaaaaaaaaaaataataataaaataagtgagctgaactcacctgaagtggtttacttctgtgggttaagaagttctagtcagtgttcatagtcgtttcgttttgataattgttgaaccaattttgtttttaaaacctttagactctgaaagtaatattttgactaagaatgtaaatatttccaaactaaattactcgggaagtaaacgctttttttaaaagtatttttactggttttataccaatattatatgcagaaatcacaggatgaatttagaattaaatctcaattagttcactttggcctagatttatgaaaaatgcatgcctcgtaaagagtccactgtattcacgagtaaagttgcttttagtgttcacttgatgacttggagagtaggaattttgcaaaatctgaatttaaggaaattctttaggataaccatttcaaaaaataaaattgctatgcaatcttgaatattttctcttttgcctcgtaaaatgaaaatgcattcacagtttctgtaaattatttagcagccttaaagtttatcaaaaaattgtccagattccacgtgcagcatgcttggccctgcatttaatttaagaaggattaataataatgctctgaatttttcgaaagggattctcctaaacccacccacttctcttgcccaggctgctttttaaaaatatttttttattttttacttatttttaaattttctctttttatttatttttggttttcttgttagccccctgttatatgggagaacgaaaattgttatattttgaaagtacttattacattatttttattttagtatcttgatgctcctgtcaaaagggaaatgaggcttttaaaaataaagtaccttaattctttattgactttttgccctaaattgctaggtgtgacccagcaatcttttaggaagagattttacagtggtgctttatttatatcaataatccagtatagttaggctgttcattcctcataatagagtacataacagaaaagtgggactttcacattttcatatttaggcacgttccaatttaattccaaaaatactctgtaattctacatctaaaaaaaccgattccctaattcgaatttattggtaccaaagctctctttggctatagacaattaagagttgaccttttaagttaatgtatatgcttaaaaacagttttaggaaaatatttggtagacaaagagtttcaactttaaatgttcactatgtcatttagtgtccaactttacggataggttgactatctaaataggcatttttagtcattaaaaaaaaatctagtcaccaggaggatccctataactcaaaataacttgtttgtaaaagaaaatttgtttacttacccattagtaagttcctgcatattcattataagatggcaaatcaaacttttctaggatgaagacagcttatttttaagttgtatagtcttagttggtttagggtctcaattttaattaataaaatacttggtttttatttgcttgtccttttgaattcctgttttaataattttaaaatgagcacaaagaatgttgaagttcagattaatctcttctgaatgatgtttttttcctctgtgatgagttgtttctgacttttttccttttgtatttgtaatgttgattaagatgtaaaataaaaagtgtgcctgattatttttgcaaaataaaga

SEQ ID NO: 111235 - DNA, 437 bp, Homo sapiens
gtcaggaatagggatagggattgattcctagcacctagaaaagtgcctggaatatgttggatgcttagtaaaaattttccaaatgaattatattgaatcctgggccagatattgagtagatattggggatataaaaagaacaaagtacaaagttccttcttttaaaaaagcatatggtataatagaggagactcatacttgtacaactaactacaataattttaccccctgggagtgatggtgatagttaaggtgtactgaagatggcgtcacagaacgcgtcattgaagtgtacgtttgatctatataagagacacaggggaaagttatttccaggtggaggtaaaaacaaagttaaagagcttaacagtctcagcaatggcttgttgtctaggttaacagtgtgtgtcaacgggtagtcgagggagatagggata

SEQ ID NO: 111236 - DNA, 224 bp, Homo sapiens
ctggggaagagaagcggtcttaaggggaagaatttcgatcaagtaatcctggagtattgagcctgggtaagattatcaattagtttctgccacttttgctgaagctatttgtgaaagaaaaaaagaagaccttttaatgtttaaaattgtataaaaactgtgtaaagaatgggtaagacaggaagcttaatgactcttggttcaaatttcacatccagcaagat

SEQ ID NO: 111237 - DNA, 481 bp, Homo sapiens
agataaagaagcctggggctcaggaggaaagtctagacaggagacatggatttgggagcatggggactaattattggtctgcctgaatcatgaattcacaatgctattaatataacctattcgtacagctgcattacatagatgtctcatttacagattctactctaataattcttaaatatttttacattttttgctactgtgtcagatctaccctatgctatacttgtatttttgcacctttttagactaagtgaagtagaagcctgttaatttatcttttttcaatgtcaatactattgaatattcaacaaagaagtggtcagaacttgggcttcagagcctagtagtcattggggctttttttctcttctcccggacacaatgccattatatccctcctcttcccccatctccaagtaagatttagctacgtgactagcttttagctcttgaaatgtgagtagacagatcatgtcat

SEQ ID NO: 111238 - DNA, 282 bp, Homo sapiens
ctgcagtgaaccaaaatcacaccactgcactccagactgggcttgtctcaaaaaaaaaaaaatttcctttacatttgaataattatttaatggtctcttttttcctccaaattaaagcactcagaggaacctagagacaacatggtctagccgcttgctttcatggctagaatattttaactgaaagtaatatgtacaaaatatgtattgtcagtttttatacctttcaaaacattacacatttcattatgtattttcttaaaaatgatcaccttttatgtt

SEQ ID NO: 111239 - DNA, 272 bp, Homo sapiens
tttagaagtccttcagtagtgttaattcacattcttctcaaaatttaacactcaggctccagaaaatcttctcaaattaatcccatgagactgatctttcctcaacccatgtcctctcaacttcatgtactcttttacactttcttacatttgcaagtactatgttgatgtccttttcacatataggtattatatctccccaactacattgcttacagaaggcagagacaacacattgtgttttgttgaatgaatgagtaagctacatactc

SEQ ID NO: 111240 - DNA, 282 bp, Homo sapiens
atatggacaggacactgctacatggacaggacccccataggtattccaactgaccaccccagctaaggtcccagctgacagccagcatcaaccgctagacacaggagacagccctccagattatcccagccccagctgactgcaatggcgtgaaagaccacaagcaagaaccacatagctgagatgttaataaaatgattctgttgttgtaagccactaagttctggggtgactcattatgcagccatcagtacctgaagcaatgagagaaacagactctag

SEQ ID NO: 111241 - DNA, 384 bp, Homo sapiens
caagtatttagcctgcagtcccagaggcaacaaaaaatagccaagtccaagggagtgccatgagcatatggaccctggtcacaagagtgtcacactgggaggggcttggacatatgccatgggctgcatcaggacatatgccatgggctgccaccccaaataattccctcttccccaggacccagtggaacagcttgttgaataaacaagagactgaaagagtggttgaactggcaccaggccagtgtcccttgccttacccactgaatcaatgaaaacttggcatatactacattttcaaggagcagggaagcatgaaggcataatctctttgtccctcctgtgttttgtcactttgtcttttctccacctacttatctgact

SEQ ID NO: 111242 - DNA, 731 bp, Homo sapiens
ctgttttgagtagatactaatgacttctgggggctgtaaataatcttatgattttagatattatttagacaatttaagaaataatataagcatatcttataaattaagaaaaaaacaattggctgttcattgttttagaatttattaacccagaagcagttttgcaaactgaaatcttgctttagagaattttgaagttctccatgtccacaggtccagtaaatatttactcctatcttgttaatccttgcctcttctgggtctggtgtccccatccccatatccaccccttttaccaagggaaatcaatttgtttcttttaaaacggcagcttccatgattgggtgaagaaacagagtgaaaaaccgaagacagtgggatgccgtaaggtttgagaactcttacgtgggagctggaaggaagcttgccttgaagttgcaactatgctaccaaaccaaaaaaataccaaacaaacaaaagcaaaccctaactactttgcattcagctattgtgactagtcttgagtggatataaaaatactcctaagaaaatgattgttttcctttaaaatatgcattattgaaaggcttgcagcattcttaattgatcatcattccttagagtcaaaatgttttccaagggaacagatctctaatgtggcatttactaaaaaatattgagaaaatgtctttcaatagagaaatctgctttgcaggaaaacatccaggaac

SEQ ID NO: 111243 - DNA, 426 bp, Homo sapiens
atgccccaggcctgagccaaggtggcagtggctgggttgaagtgagctaggccaagttgagagcaattatctcaattggcagaacttccagatttcttgcttgggcagaggtgaaacagagggcagactttttcaatgtaggaggagctaaaggaaaaggaataaactttataggccgggggtgagggaagatgccgtattccatttcagacgtgctgacttcgagctgcctgcaggacagacatcacccccacggggctaaccagtaggcaagatctatgagtctgcagctgataagatcttggggaggtttgcagttgagagttatctcgttggttcattattcagctcatgttcacttagcctctgctgtgtgctaaggtctgtgcccagcatgagaagcgcagttcctgggacagacaccag

SEQ ID NO: 111244 - DNA, 150 bp, Homo sapiens
agtctcatgggaaccaacaggacagagtgtttcagaaatgcgggagagattagccaggtcaaacactgccaggattacaagtacatgctgggccaggcacactttccccaggcttcctggtgaccagcatcacaataggcagcatggttg

SEQ ID NO: 111245 - DNA, 725 bp, Homo sapiens
attttaaaacaatataagtattataagcattgctctacagtttgcttttttccccccacataacatgttttaatctgcattgctctaatgtatctagtttctaagtcagactctgttgtatgaatcccctctcttgttgatggatatctaggtgttttcctttctgttgctgtcatggtcattgcaaacagtgctgaacagacacctttacaagtcaccttatgcacgtgagcaagcattctacttggggagaggaattttggggtttcaaattttatccttaacaaagcagtttattcattcattcagtaaatattgattgactatgtaaaaactgagccaggttctagaggtaaacagaacagaaataatccttcatttatcatgagtttacaatctaattgggaaaatgaacattaaagaagtaattaaagatatgtatgtactatacagctgtatcataaaaataaagaacaatgtattgtgtgccatgaaaaaaatataaggcttattaagggatgtttcttaatgtttcttgtatcataaattacctaaagaatttctggacaggaaaatgctactctcctactgaatttatgtgctttctttatcgaacaatggaagcaatgtaaagcaaagtgtttcttttttgccttagctactaggagtagctctcatgtagatgctgtgcccagctgcagtgcctggaacagcccagctacatt

SEQ ID NO: 111246 - DNA, 893 bp, Homo sapiens
aaaatatataaaacttaaaattcaccatttaaatcatttttaagtgtacagttcagtggcgttaagtaccttcacattgtggtaccacgatgaccaccatccatctccagaatcttttcatcctgcaaaactgaaactccatactcattaaacactaacttcccattcactcctcccctctagaatccaccattctactttctatatctgtgaacttcactactctaagtacctcatataaatgaaattaatattatgtggacttttgtgcttacttatttcgcttagcataatgtcctcaaaattcatccatgcagcagcatgtgtcaaaatttcctttcttttttaggctgaataatatccaattgtatctatatgccacattttgtttattcattcatcttgttgatggtcatttgggctgcttctgccttttatctattatgaatagctctgtacatggatgtacaaatgcttcttaagacctatagataaatctttgagaccttgtttccgattcttctgagtatatatacagatttaaaatggccagattatgtagtaattttatttttaatttcttaaagagttaccatactgttttccatagcagctgtaccattttacaatcctaccaacaatgcacatgattccaattattccacaggctcatcaacatttattattttctgatttttgcttgtttgctcgcttttaaaaatagctatcctaatggatataaggtggtatctcattgtggttttgatttgcctttccccatcttttcatgtgctcattagccatttgtatactttctttggggcaatgtctaagaattgactttttagaatgatccctctggggagaagtaaaagggtagaaggagggtcaga

SEQ ID NO: 111247 - DNA, 432 bp, Homo sapiens
cagcttatttttctacataggatccccacatccctgcttttgctagaatggaaactagacaaggaccaacttttatcaacttgttcatttctctattcctagaacacagcctggtacaaaatttgcgtttaataatgtttgttgaatgaatttgaatgatggatttgtttagaaggtttataacatcccatgccttatgagtttgttgccagaggaaaaaagaagcctgtttttggttcataacatcaggtatgtaacctggaatttggaatcatgagtttttatgcatttgcttcatattatttatttttaagagatctttcaaagtattgacaaagatactttaagattgagagcctccctgataacccaggaatgagagttttagattaagtttacaatatgattgaaggctaatcatataaggagaaa

SEQ ID NO: 111248 - DNA, 429 bp, Homo sapiens
gcgaaaggatggttaggacaggagtgtagtggagggaaagttaaaacaacggtagatggatcatcttagggcttgctggtgggggtaggaacatacttcaatttggtttcagactgagaagaagaaagctatgctccctgatgaaggcacagtttgatctactagatgggaaataccctcattttataacttcagtaatttaacattttctgtattgcaaagtggaatttagtcccaaagtattaaagctaaccatagcttgatcaggagatttgacaatttagcataaaattatgttgtggatttttttatttaagaattattgttactattattgaacaccatgtatgaaatgaaagaaagggtgcttttatttcattatacttatttggtttttttagcggacatcccttgacattagaatagcat

SEQ ID NO: 111249 - DNA, 458 bp, Homo sapiens
tgtccgtgctgtgggtgtgaagatgtgtgctgcacatcccagtttccagcacaggacaaagactcagagaggcacctgccaggagtctcaggtgatggaacccagtggcgggcatgtgggcagctgccccaggtggaagggatcgtggcacagctcttggttccccaggctggccctgaccttcgtgctttcctgcccatggcccagacttccgagctccatgttggggatgctcagggacaacccttcagcctcccccaccatgtcccggctactgcccaggattcttgttctctggagggtggatccagccctccccatcttggtgccctaccagggccaggcttcccatggctctttctgcagcccctggcacagactgtggggcgcacagcccggggagcagtgggccttggaggggccaggtctgcatgttcccacccccatcatggagtttg

SEQ ID NO: 111250 - DNA, 291 bp, Homo sapiens
acaacatctctaatgacttagttccattttgggccacaagtgcatttgtcattgaatgtgtacacgattgtttgaggaaagtatttggtttaacgaattgtgcataattccactgtttgcacttgtgaaatttaagtaaaagggattaatgtactaaaaattagttatgtgtcccagttcctgggaagtagaaaaaataaaataagttgtgtggtaataaaataagttatgatttataattgttttaggtatctgttgcttcaacagttggtatattaagaaaagtaatca

SEQ ID NO: 111251 - DNA, 239 bp, Homo sapiens
atgagacagatacgaatcgagccggtacccctagtttagaagtttcaatagcatttgagaagaaaacatttctttcttggctgtaaataaaacccaaaccatatttgttttaataatagccaagttgtactatagctctccctaaactttgcttccagcgcggcttcccttgctaactctgccaaccagtgtcaaagtggacggtgggcttaacctctgctattaatctgtacaagtgc

SEQ ID NO: 111252 - DNA, 817 bp, Homo sapiens
gctcatgtaaatgcagtttgctaatattttgttgtaaatttttacagttttgatcaagtggagattggcctgtaatattcgttttttaaaatgtctttgatggtttttggtaatacaagtaatgatgctttcttaaaattagctagtaaatattctatctgatgccaaagtttgtgtaagatttatatcttttcaacatgttaggaaaactatactcgtaaagttagctagactagagatctttttgggaaaacttttaattaccgactcaatttctttaatagttgtagaacttttctatcgtctcagttttcataaattgtttctgggaataaaaaaattaacagctctattgatgtaaaatagcatgcatattgaatgtgtacatgttgataaactttgacatataaacacactcaatggaaccattatcaaaatcaaaataatggacatatctttcactctggagagtttctttgtacactctgacatgtatataatattgagtcttccagtccataagtactatataacaccctctcccatcttctgattttgtactggataatcctctgtggtgggggatggacttggggatggttacctgtccttataggatatttaccagcatacctggcctctacctactagacataactagcatcccctgcctccagtccctaacaatcaaaagtattctctagaaattgccaaatggttccaggaggaaaaattccccaaggctaagagattgaagaaccacttacgtagagatctcacacatctttcgtttgaatttatttattccaaggtattt

SEQ ID NO: 111253 - DNA, 543 bp, Homo sapiens
gctgttggtatcttattgttaaaacaaatgaaaaactggctacctgggcactccacagttaaaaatttctcctgaattatcttgcagatttcttcttaaagggaaataataataaagatctgttttattcttgtaaccaacaaaccacaaaatatctcatttgtatttctacctaactatatcaaaatggcattttatacttcaatgaataccaaattggacaatcagctctcaatagttcacatagtttctttagctcctctcttgagtctaattactattttcattaatgggaataaaagtatttagctaaaaatgtaaggggaagctacaagaaaaacaagtcaatctcagaatttccagaacaagcctgctgacacctttactttagcccaagtgaaaatgattcttcacttctagcctccacaactgtaagagaataaatttgtattgttttaagccactacatttgtggtaatttgttacatcagcaataggaaactaatgcacattcctgttttcagaggggtcttgaaagttcct

SEQ ID NO: 111254 - DNA, 196 bp, Homo sapiens
gagattgcgccactgcactccagcctgggtgacagagcaagactgtctcaaaaaaaaaaaaaatctatatgtcaatatatgtaaatgaaaggctgttgctctagttcagatgttgctaagaactgacttatgtatatagttgtttccttccttggaattagtttttggaattaaaatttcaggagttggggagaag

SEQ ID NO: 111255 - DNA, 636 bp, Homo sapiens
tatttaaaggtgaattagatgacctcactagaaatttaaaaaaacacaaatgaaaataagtttcagatgttaaattagcaaagattgataatactgtgttaaggtgttaaattagcaaagactgattatactgtgttacactgcctgaaaaagtataaattaatacagtcttattgtggaatttggggggtgtatatctggagtctttttttttctcctaactccccaaacttgttacagatccagaatcttttaaaatatacatattttagtcagctgttctacttctagaaaggaaatatttaattagatatgaaaacacatactgaaagattgttatcacaatgttttgtattagcaaaaaacttagtatgacttaattgtccatcaaaagggaatttgttagataaattagggtatgtatttaatatactagagtaccaaataacaatttaaaatgttaataaagattcagtgttaaaatttgacctgtaaatatcatataactcatagaagacagcctatcatcaaaaattacaagtctagtattatgcattattttaatgtaatatttagtgttgcagcagaatgatgttctttacctggccagtatcagatgggtgctgactttcatca

SEQ ID NO: 111256 - DNA, 467 bp, Homo sapiens
aaaaagatttgataaatgatacggtgcggagaagtagccactcacccaccgttagtaagagaataaattgctacagtatatatttagggcagtttgacagttttatcaaaaaccgtaaaatgttcatacactttttgacctagcagttttacttcttttctaacccaataaataaaaatttgtgtgaagacatatggtcacctgagtgttattcccagtattctcattgtctgtactgagtttagcttcatccgtgttagtatataaacctactcaaatgggtcttcctgtctctttccctccactccttccttcatactgcagccggtatgatctttttttttttttttttttttgggacggagtctcgctctgtcgcccaggctggagtgcagtggcatgatcttggctcactgcaacctccgcctcccgggttcaagcgattctcctgcatcagcctccagtgt

SEQ ID NO: 111257 - DNA, 725 bp, Homo sapiens
gtttcaaactcctgacctcgtgatccacccgccttggtctcccaaagtgttgggattacaggcgtgagccactgcgcctggccaaattaaagtgtttttaagaactgtgttggtcaggcagagagtaaatagattgatttaatacatcatttaatatactaaatacacatcttaatatttataaaactgaagcttacattatgaaactggtgtttatttttactataaaaatagtaaaagtggtgtgaagtggaatctcattgtggttttggtttgcatttccctaatgactaataatgttgaacttattttcgtgctggttggccatttgtatatcttctttaatattttatttctttttatttatttatttttttggatcaggtttcattcttgctgaggctgaagtgcagtggtgcaatcacggctcactgccgccttgaccgccggagctcaattgatcctcccacctcctgagtagctgggactacaggcacacactaccatgcctgtctaattttttaatttttgtagaggtggggtttcaccatgtttcacaggttggtatcgaactcctgggctgcctcagcttccaaaagcactgggattataggtattagtcaccctgcccaacctaatattttcttctattcaaatcttttgcctacttcaaagccatactatttatgttgctccgggtccatcattcacaatctttaacaatg

SEQ ID NO: 111258 - DNA, 568 bp, Homo sapiens
acattttatactttccactggtttttctgtattgtatgtttttgagtaatttccaaaagtatatctagaaaagtcttttacctaaagttagtctaaaaagtatctatatatgcatgtgtatgtgtatatgaaacacttaagagagagtggcaataacataatcattttttacaaactgccaaattatagaaaatattgtaagaaatttttcagaatcatgaagccatgtgtattcacaatacagttcatattatcatgtttcatttgaaaaatttatgatctctatttataattgttaagaacttacagcttatttcacaaaatcattgctcttttccactgttatttgtaccatacgtatgtaccatagtgtgcttaaacgtgattatttgaacgtctagttttttggatggtatgcgcattctaatctaaatcaataatgaagttttatctttggggtagtttttgttgcataatgaattctaattttatgtttaatttaaagcaaacaattattgttagaaaactatgcacaaaataaaattcaaggatgaaaaataaattggaa

SEQ ID NO: 111259 - DNA, 324 bp, Homo sapiens
gagattacaggcgtgagccactgttcccggcctagaagtaggttcttgatgtatccttcatgtctcgtcttccctctcgcaccctgcacccttctcgcccagtgcttactgcttgctgggtgctggtctcctgcttaaagagcagactgaggacccctggaaagacgcccccacagcacgtggaccccacaccacccaagacgctcccacagcacgtgcactggactccacccaagacgccccccacagcacgtgcactccacgactgcacccaagacgccgcccacagcacgtgcactcacctccacccaagacgccccccac

SEQ ID NO: 111260 - DNA, 826 bp, Homo sapiens
tgcagtggctcacgcctataatcccagcactttgggaggctgaggtgggcaggtcgcctgaggtcaggagttcgagaccagcctggccaacatggcgaaaccccatctctattaaaaatacaaaaattagccaagcatggtggtaggcgcctataatcccagctactcgggaggctgaggcagaagaattgcttgaacctgggaggcagaggttgcagtgagccgagatcaggccacttcaccccagcctggcaagagcgaaactccaccaaaaaacaacattttaagaaagtttacaaatttgtgttgggctgcaatgcggcccacaggcctcaggttggacaagcatgactaggcattcatacagcaaatatttattgagacctactatgtaccaggcactgtcagaggatataccaggaaataaaacatgaagttctctaccctcatggagcttatattttagtggctactgacaattttttgcttttataccaaaaattctagctaggagtttttgagcattgtctgtcttaaatatttggcttttataactaattttataataagcattctcttatttcttcctttggataaatttctaaaaatagacttgctggaacaattattttagaaatgcttttatactaaaaataataaccctttatcatatatattcctaacatttttctaattttcctgcctttgaactatagttcagaggcccccaaacaggcatcttttgctgtagatatgttccgaatgcttaagcagatatcttttcatagcttatagccttattgtcaaactaagaaactctttacct

SEQ ID NO: 111261 - DNA, 187 bp, Homo sapiens
gccaagtgtgttggggaggtgacatcaatccagatgagttgcaatgagctgtgaacattctaacctgatattacgaaatgttatttgactggacttggatgtctgtattaaatgcagtaagattttgataatttaggctcaggttctataaaactgtgtgttggtattccgctatgtttttttgata

SEQ ID NO: 111262 - DNA, 475 bp, Homo sapiens
gatgttgttccagtctgaatctgaaagcctgagacccaggagagctgatggtgttgttccagtctgaaaaccagcaggcttgagacccagaaagagtcaagtttagtctgacttcagaggccagaaaagactcacgtccccatgcaaggcagtcaagcaggagggcatcttctcactcatgggaggggcagcttttgcttttatttgttctattcaggtctccagctgattggatgggcacatgaggagggcaaccttctttactcactctgctgattcaaatgttaatctcatttagaagcaccctcatccacacatccagaatcatgtttggccaatatccaaatacttcgtggcccagttagattgacacataacattttacccctcacataagatgacccctcatgtaacatcaaccctcatgccctcctgagtctgcaagcctctctccttattaactttatgggttttc

SEQ ID NO: 111263 - DNA, 222 bp, Homo sapiens
aaaaaactatcccaaatttttatgtctttacttattacttggcattctcatgttgctatctgttaacaacagttttattttaaagccaaacagtaattatctctctcatcaccatcaccacagacttcactttaacattgaaattacaatgaatgcctgatgagaagtgctaaagatggtggtgtcttccccactcttaagtaatcacagtgctataaaatt

SEQ ID NO: 111264 - DNA, 362 bp, Homo sapiens
catggggcctgggtgtccacttggaacgtgatgtgcacctgggacctgagtttccacctagggcctgatgaccaccggagacccaggtgtccacctggggtctgatgtctacctgaagcctaggtaaccacctgtgccttggtgttacctgtgccttgatttccacctgagcctgatgtacacctggggcctgggtgtccatctgaggcctgatgtacacctcaagtccagtgtccacttgtggcctgatgtcaacttggaagctgatatccacctggggactgatgttctcctggggtctgatatccaactgggatcagatgttcacctaaggcctggagttaatctggggcctgatggtc

SEQ ID NO: 111265 - DNA, 522 bp, Homo sapiens
gaaaagcactccaaaacacaggctggaaagcagcacacagaggagtaaagaccaaacacgtggtcaagggtagggttccggttcaaggcccgtatgaggaaacaaacaggcagaattcacctgaagaatcggaagagcttccctgaatcagtaactagtgggcaggttcctgagtatggctgaaaattagaaacacctgcagaactacagcaacaaaataaccccctatgtaccacagccattaaatcaaaatctatggtttagaggtccaagcactgtccagaacctcctcacaggtgattgcgatgtccaatatgaaaagagtgtatttcacccagaggtctcagaagctccaaaacctcttcaaggacatgaattcagcatcctccaggaaagagccaaggatccagatctttaggggagtagcacatccctggtatgtttacccactctctgcatcacactatgacaaccacaacttcttttaaataaatgtaaaaaaaaaaaaaaaaaaaaaaaaaa

SEQ ID NO: 111266 - DNA, 639 bp, Homo sapiens
gggtgttataatcggtctcttatctttttaaataatatatactttcctttgtattgatgccaagaagcttataggacacctaaatgaaaacttttaaaatgcaaaatgttttatatatgtaagagtatggatatttgaaaatgtctagttaatgctttgagtttgttttgatgcttggctatagatgcagccagtaacaccatactctttgtccatttatgtactcagtaaacatttactgagcatctactcgggtcaggccttggactagtgctgaataggactatgtttcttccttaactaataaggaaacaaactatttaggtacagcaatgctacagagacccatgtgatgctagaaaaacacataggaagggcactgaatcatcccctgttctagttacctaaataagtatacaaactacttctctattcctagttatgcctcagatttttttttaatttattttcttgagacagagttttattctgtcacctaggctggagtgcagtgctgtgatctcagttcactgcagcctccacttcccgggttcaagtgattctcgtgcctcagcctcccaagtagctgggattacaggcatgcaccaccacgcctggccaatttttgtattttttgta

SEQ ID NO: 111267 - DNA, 223 bp, Homo sapiens
gtactaacatatgccacaacatgggtaaacctccaaaatattgctacatgaaagaagcctgtcacaaagtccaaatgttatctgaaacaaccagagtaggcaaatccatagagacataaagtagattagtggatgccaggggctgggggaaagaggaaatgagaagtgactgctaatggtttgcaggatctttcaggagccaagacagtgttccaaaattaga

SEQ ID NO: 111268 - DNA, 281 bp, Homo sapiens
ggtcgaatataatgggtacgcagaaagtcactgtaagtgtaatatgaagatacacagcccttttaagcatttcattatattacatctagcttacttctaagtgatttattcagatgtgactgaagaaagtctaaagggaaaaaaaacaatttaatttgataaattaaattatcaattatagccaaattatttgggtataacaaattaaacattttaagcagacagaagatgcaaacattttaagttgacagaagatataaaatgttcactatcaaatgtag

SEQ ID NO: 111269 - DNA, 344 bp, Homo sapiens
tactgcactccagcctgggtgacagagcaatactctgtctcaaaaaaaaaagcaggaatgaatttactgtctgaaaaccttggagaaaccagagttattttttgtctcccaactgctgtccaggctctccaggccttggggagttggatggctttgtggatgcctcaagcaagtccctgagcaatgctgggaaaactctatcacttcacaatggctgagaagaagagcagtgagggggttgcactagaggaccccagaccacaaggctatgatttggtgcatggaataaccacgtgggtgtagtttgacttctcaggtgctgaggacaaattgtatctctgggg

SEQ ID NO: 111270 - DNA, 419 bp, Homo sapiens
gccctttgacttagcaggcttattttacccattactcatattttgaatatgagtaattttgaatttcatccattcttctcacacatgaatgcacccttcagacaatacacccactgtggacacactgagtacaaggagagactgttactgtggacaccatatgtttccatattgtttacatcttttttcattttttctttttttttcattttagagacaagtcttgctgtcacccaggctggagtacagtggtatgatcatagctcactgcagtcttaacctgctaggttcaggcgatccgctcgcctcagcctcctgagtagctgggactacaagcacgcaccaccacgcccaaataactttttgattttttgtaaaagtagggtcctgctatgttgctcaggctggtctcgaactcc

SEQ ID NO: 111271 - DNA, 434 bp, Homo sapiens
caaaagttgttcactgcccagccttgtggaatttctccctgtgcatgctcagattggttcagcaaagactcaaagggatcccctaggctctctggaactttttatctatgtagcttcctccttttccatatcatgtctcacaaattacagcctcctgggcctcccccaagtcatctgttctaagacagcatttttgccagctatgtctgggtttcccatccctgcacctgcactgtggcagctgctttcggtggaaaggcgggtggactgttaggctcaccatgtttgtctcctttcactctgggaacattgccctgcacagcctgtggtccagtgcctgcaaacagttgttatgtctattttattcagtttcctagctatcagtggcaggtgaagaagtacagacgctgttctctttaggtgggaagagggtg

SEQ ID NO: 111272 - DNA, 385 bp, Homo sapiens
ttccacagttaagctcatcattatcctgatgaaagctgagtctacctgagattcagattcctttaaaatccagcccaataaaaacaggaggttggcatagatgtttttttatttgcccctaaagagccagtgtccacttttctctgccatgttatttcagaaggtcgacctctatgaacaccctagctgtcttctctaacttcgatcttttcattgaatgtggtcagggagaggcctgacaataggtatggagttttcctttctgtgatcccttctgtagaagtcactggtcttattcaagtagccacttcataatttccctcttctgagttttagccgtttctctctcctcttatccctttcagaaagtttacacaatcctgct

SEQ ID NO: 111273 - DNA, 464 bp, Homo sapiens
attagtgcccatgaccatctaatgtgaggccggtcttctgatccgaacctgcaaaaaacattaactccattgtgtgagtctatcacaaactcacgtagcaccctgcagaagcatccaaacacatggaaagctcagtccgtgggtaattggcacgaccctcctccagacccctcctggcttcagcaggaggaagttgaagaactgtttggagcccagctactctgattttcttctggttgagattgtacacttctctccctagctaaaatagagtcaaggaatctgtgcatttgggacataggtacacattggcctcatagagttaaaaagcatttccccaattgaactttcttttgatgattctagtaatgatttttttttttttttttttttttttgcctgtgtaaaaattctgcaatttctgcagttaagtgactccttagactagattgccttttaaatgt

SEQ ID NO: 111274 - DNA, 678 bp, Homo sapiens
ccctaagaaatttcacccaaattatgttctttgaaacagctggcacttcattgctgggtaaagccttttctttatctttttgtttgtgtgtatatatatgtgtgtgtgtgtgtgtgtgtgtgtatgtattttaaagaaactgctgtttttaagatgatagttatataattgatgtaaaatttcagtagactgaaacttcctacatagtatgctggcgctatatgtaactttgaaggaaagaggaataagcaaagaaacctttcacccaactatgatagttttataaacctctttcaaacaactcgggtgtcaatgtgggctctaatattaattctgtgactggatttctaccttcttcaccagtctcatagggttgtttgatgagcaaatggaagtgtatataggaaaacattctgagcacagtaaagcactgcacaagtgacagataatgaaagacacagctttttactgagtttccaacaccagaaactaccaatggtaacaaaaaaaaaaagaatttggcagcaataaattataagccaccatttattccttaacagtaatggccactacttacagagcacttactgtgtgtcagccactgtgataatggctttatcatttaatcttctcaacaatgagaattaaaaccatttaatcttctcaacaatgcttttg

SEQ ID NO: 111275 - DNA, 634 bp, Homo sapiens
gccagcctccagctgcgacttaagcaacagtgaccctgagttcaggaaaagtgtttgctaggagctgaggctgcgtccaaaaatgttgtgcacccactagctgtgagtgtgtctgtggggggaaggaggggcccggatccccagcagggcaggctgctgcttgggagcaggagattaacagaatgctttttaatccgaaatgatgggtcaagtcataattaaggggctgagcaagaactgagagtcagaagggaaactgaggttcaggaaattagggaaggacacccagaaggttggagaatgaaggcaggggtcagaagttcatgagagcagagggtgaatggaacatagcaggggcttggcggaccaacaagccagagtgtaagaggggctgataccacaggttctctgtggtggctgaagcatggtacgtgggaaagccagctatgtttaaagggacagagacaggccaatgcagggtgatgtcatgcagatctgtgtccctgcccaaatctcatgttgaaatgtaatccccagtattggaggtggggcctggtgggaggtgattggatcaagggggttgattgctcatgaatgcattcgcgcactgtacgaacgggggccgagctcgatt

SEQ ID NO: 111276 - DNA, 568 bp, Homo sapiens
tctattctgatgcagcacttaacgtaaaggaggcatctgtaaatgcatgtgatgtggctgtaggcagacctagctctagatcacatcacaaatttggagcattcaccctctaacctgtcccagcctcctgcatcttcactgccacctacccactgcacagttctcccttctcctccatgaagacctaccttaaggaaaggctacgctagtaatcattcagactaaggtcaaatggaatcctacacgcaaaattattccctccgaaaatgtaacccccacactcacactcagggtattatgcacccatccacccttgacctaagggaattaaattataattggataattttagccaatcacaggggtagatattttggttgggttttttgaggaggagctagaaaaactggctcctccagctgcttttgaaagcacacagtgacccactcctggccctcagcaaacccagcatccagggaccaccccccgagcccaggggagttggtccagcctagcccgctgtccagcaatgcctctgttgattttgctaatagagcaaacagaccct

SEQ ID NO: 111277 - DNA, 579 bp, Homo sapiens
caacatggcgaaactgggtctctaccaaaaatataaaaattagccagacctggtggcttgtgcttgttgtcccagctactcaggaggcacaggctggaggatcacttgagcaccactgcatgccagccagcctgggcgacacagtgagaccctgtctcaaaaataaaaaaagaagaagaaaaaaaaaaaaccagaactaccaccaaggttttatgtcaggaaataggtctaaaagtgagagcaaggaaatgatggaggtttacagatcacccttgtatgcaacgtcagcattcaagaaaggtataatgtaatattatgcctgaattattaacaatgtcgttattttataaagtttctatgcagaaagaaaattcttcctagttaatccttaaagactgaggcaccaacgaagtacactgtgtatatgcaaagtacatgaaggtctacatatgctcttctttttcaaaatggaacctagatttcacaatggttaaatcaatgcagtcccaccacctgccccccaaaaagaaaagatactagagagagtactcactcctctcttcaaattttaacatattg

SEQ ID NO: 111278 - DNA, 98 bp, Homo sapiens
cactgtgctggggtgtacatctacactagacaccttcctgcttccctccttccagagcagacctctttgtcaccccgagctccttgtttcttaagcag

SEQ ID NO: 111279 - DNA, 375 bp, Homo sapiens
gactctgtctcaaaaaaaacacaaacaaacaaacaaacaaaaactcaagtgaagtcttgccctagccaggaaactgttgtgataaaggagcatcggggccgggcgcaggggctcacgcctataatcccaacactttggaaggccaaggcaggtggataatgaggtcaggagttcaagaccagcctggccaagatggtgaaaccctgtctctactaaaaatccaaaaattagctgggtgtggtggcaggtgcttgtaatcccagctacttgggagactgaggcagagaattgcttgaacccaggaggcggaggttgaagtgagccaagatcgcaccactgcattccagcctgggcggcagagcgagattccatctc

SEQ ID NO: 111280 - DNA, 1204 bp, Homo sapiens
gtttgggttgctctaaaggaagacctaagggtgggtaatttataaagaaaagaggtttatttgactcggggttctgcagactgtacaaaaagcatgacaccagcatctgtgtctggtgaggccctcaggaagctttcactcatggcagaaggcaaggggagccacgtgtgatgtggtgagagaaaggagcaagagagagagcatggagggaggtcccagactctttaataaccaggtttcatgtgagctaatagtgtgtgaactcactcgttactgcagggaggccaccgagccgtttgtgaggaatccatccccatgacccaaacacctgccacttaggtcccacctccaacactggggatcacatttcaacttgagatttggagtggacagatatccaaacaatatacccattagaggttacccaatacctcccacccacttgcagtctactttctgtttctatggattttgcctactttatagttcaatataaatggaatcatgtaagatataatatagtcaggtaacatataatgatgtttcggtcaatgaccacatataggaaggtggtcccacaagattataatactgtatttttactgtgccttttctatgtttggctatgtttagagacacaaatactcaccatgttacaaccagctacagtattcagtacactgagggccatacagttttgtagcctaagtgcaacaggttataccatttagccagggtgtgtagaaggctgtaccttcttggtttgtgtgaatacactttatgatgtgtgcatgatgacaagttggctaacaacacatttctcagaaggtatccctgccgttaagtgatgcttggctgtatataatacataagatatggtattgtgtgcctgggctcttagacctagcatagtattttcaaggttaatgtgtagcatgagtcactacttcattcctttctgtgtctgagtaacattccattgtatggatatgccacattattcattcatcatttatggacattgggttatcagaattactttagagtaaaactgatgcttgaagaagtgtcagcaatggtcaggcgccaggggcccatgcctgtaatccaagcattttggaggccaacatgggaggatcacttgagcccaggagtcaagaccagcttgggcaacagtgcaagaccctgtatctacccaaaaaaa

SEQ ID NO: 111281 - DNA, 263 bp, Homo sapiens
ggaaaaagtaaaaaaagaaaaaataatcccatcacatattgaatgtagggaacaactatcagccccacccactctaggaaattttggaataaaggaattcctctgtaagtttctttttttttccctccaactttattgaagtatgattgacaaataaaaattacatatatttaaagtgtacaaggtgatggttttatatatgtatacattgtgaaatgattgccacaaactacttaacatatctatcacctcatacaattccc

SEQ ID NO: 111282 - DNA, 809 bp, Homo sapiens
gatgagatctcattctgtcatccaggctggagtgcactggcttgatctcagctcactacagtgtccaccttcagggctcaagcgatcctcccacctcagcctgctgagtagctgcgaccacaggcacgtgccaccatgtctggctaattttctgtatttctggtagagactgggttttgtcatgctggctaggctggtctctagctcctaaactcaggcaatccacctgccttgacctcccaaaatgctgggattacaggcatgagccactgtgcctggcctaattgtagctctatgtattattgactatatgcgaggtactgtgctatttaattttacctaacaacagcccagtgaagcccaatgagtaaattattagttccaatttataagtcaggaaaccaaagctcagaaaggccaaatcacttgctcaaggttactttgtgagtaagtggcatagtaagaattgaaccccagactgctcaaagacaccaaaccactgtgctattttctatgtaacattgtatttttcttttcttttcttttctttttttttttttttttgagacagggtttccctctgtcatcaggaggctggagtgcagtggtgtgattatagctcactttagcctcgacctcctgggctcaagcaatcctcctgcctcagcttcctgagtagctgggaccacaggcacacagcaccatgcctggctcattctttgtatttttggggtctcactatgtggcttgggctgtatcgaacttctggactcaactgattctcccactttggtctcccaaaatgctgg

SEQ ID NO: 111283 - DNA, 360 bp, Homo sapiens
gccgccgcctactactactaaattcgcggccgcgtcgagctggagtgcagtggtgcgatctcagctcactgcaaccactgcctcctgggttcaagcaattctcctgcctcagcttcccaaataactgggattacaggtgtacgccaccatgcccagctaattttttttgtatttttagtagagacagggttttgccatgttggccagcctggtcttgaactcctgacctcaggtgatccatcacctcagcctcccaaagtgctgggattacaggcgtgagccacagcacctggactataatccttcttaataatcatcaccatccaccaaaagaagatggaaatctgagtaattgtgtgc

SEQ ID NO: 111284 - DNA, 341 bp, Homo sapiens
ctcctgacctcatgatctgcccgcctcggcctcccaaagtgctgggattacaggcttgagccaccgcacctggccaagttaataattttttaagctattgattttctttgtgtgggtgtgtgtttttgtttttgtttttgttttttttgagatgggcaataagtttcactcttgttgcccaggctggagtgcaatggcgcaatcttggctcactgcaacctctgcctccccggttcaagcaattctcctgcctcagcttcccaagtagctgggattacaggcatgtgccaccaagctattgattttttaacagctttattgaagtgcaatttatatgccat

SEQ ID NO: 111285 - DNA, 778 bp, Homo sapiens
tcagagctcctgctgatagctggatgttctagaaaattcctgttcccagtctgaatggtgcctctggtagttcttgactaatttgcagagcagagatgattggcattcctgagccccaatgaatggggccttttttaggtcctagttaccaatacttcccatctcccaaaattctctgattgctcatttgtttattcatttattcatctatttgttcaccaaatatttatttagcacataccaagtgccaggcattgtgtggtcgtttcattgtatggtgatgagccaggcagatatggtttctggttttaacaaagagatgtttaacaagagtataacaggtagacctggtatctgtggagtcagggaaagtttccatgaggaagggacatttaaactgagataagaagtagctggatgaagtggggaggagggcatgtaggtgtgaggaccatgggtgctggaattttgaaaatggtaatcaaccacagcatgtgcaaaagtcctgcagtgggaaggaacacgatggactctaggtgaatgagagattcagagagtaactggagatggttctggagacatgggcagggccaaatcacacagggttttgtaagccatgtcagataagaattttaaactctatcttaagatcaatgggaagccactgataaggcaggagagtggcataagcaggttcatatttttaaatgtcactctgtctacactgtggagaatgggtgggaggggaaagtaaaaggatgaaggaagaccaattata

SEQ ID NO: 111286 - DNA, 883 bp, Homo sapiens
gtgccggaagatctggatggagagacctcagccagcggagtgaggtgtgcagcacacacataagctgtccagaagcagtaggtagaggagcatgaaacgcactctctgctgtcaggcaagtgtttttcacagcaagagctccctggcatgttccttttatgtgggcccccatcctaaatcatccctcccttcatgtggctcaagccacaggcatttggcaacttcctttgcctcgtgaccatagatgttacctctcgtatcatgtaccagttaaaacttccctgggtccccttataaaatgaacttcctatgttcatattcacagtagcattatttacaaaaagatgaaaacaacctaaatgtccaacaatgaatgaataagcaacatgtggtatatacatacaatgaaatattattccaccttcaaaagattctgacacgtgttgcaacatggtaagcccttgaggacattacgctcaatcataagccagtcacgaaggaccaatgctgcgcgattccatttatgcgaggtgcctggagtcatcagattcatagagacagaaagtagaatggtgcttgccaggggctgaggggaagagggaatgtggagttagtgtttaatgagtacagaatttcagtttgggaagatggaaagagttctggaggcggatggcagtgatggctgcacagtaatgtgagtgtgcagagtgccactcaactgtccactttaaaatgggtggccggcacagtggctcacgcctgcaatcccagcactgtgggaggctgaggcgggtggatcacgaggtcaggagatcgagaccatcctggcgaacacggtgaagccccgtcgctactaaaaataaaaaaaattaaccaggcatgg

SEQ ID NO: 111287 - DNA, 149 bp, Homo sapiens
tcgaggtatcccttcccaaagccttcacttattggtgagaaaaacctgggcccagggagggcttgcagcttacccagttcggactcctgccagttcagcgctctgcactccattgattgttctaggcccggcagcctgttaggttcctg

SEQ ID NO: 111288 - DNA, 179 bp, Homo sapiens
agtacttgcgctctgggagcacgatgatcttgatcttccttgtgctggcaccagggcagtgatctctttctgcatcctgttggagatgcttgggtacatggtggtgccactggccagcaccgtgttggcatacaggtccttgtggatgcccacatcacaccttatgatagagctgaagg

SEQ ID NO: 111289 - DNA, 319 bp, Homo sapiens
ttgaaaacattatttgtcaacaaatgttagctctgtttgttggagtggaatttaaccattataccttggcagcagtataatacattcataagataccaacatcaccaaatatcaaatgggccagtgttgtgctagcgagtcgcagtggctcatgcttgtatctcaacacattgggagtctgaagtgggaggatcacttgaagccatgcatttgacactagccttggcaacaaagtgagaccctgtctccacaaaaaaaatttaaaaattaaaaaaatattggctgggcgcggtggctcacacctgtaatcccagcactt

SEQ ID NO: 111290 - DNA, 349 bp, Homo sapiens
cagaagcgtccagggccctccttggtatcaaacaagcaaaaccctaaaatgcagagcaagggttttccccagaagtggatggacaagggttagtcttaaagcccagcaaacgctgtaatagcaacctgtatcctcttacctccacccagaccaggattaacaaatctgaaaacagctggaatagatgaccttcaactgaagttccctgaaaagcctctaccaacctaagcacccaggaaatcgagattatgttgcattcatctgtgaagcgccatgacgaccttctagaaataggactgcataagatgaggatatgggagaaagcaaatgcaagtcatattatttaaag

SEQ ID NO: 111291 - DNA, 376 bp, Homo sapiens
ctattatattttagtgggtatgtctatataaattgtggttttggtctggaatatcttttcagcttgtttgtcaggtttaagtattttgctggcctcataaaattattaagtggttggctgggagcagtggctcatgcctataatcccagcactttgggaggccgaggtgggtgaatcacaaggtcaggagatcaagaccatcctggccaacacggtgaaaccccgtctctactaaaaatacaaaatattggccaggtgtggttgcatgcgcctgtattcccagctacttgggtggctgagggaggggaatcactcgaacccaggagtcagaggttgcagtgagcagagatcacaccactgcatcccagcctgggcg

SEQ ID NO: 111292 - DNA, 289 bp, Homo sapiens
tttctggtgctgggacggttcctgacttcagtagccatttcgttacccctcccatgtgcacagcgctcgtcctggcatttggggtgtgcagtgaggccacaggaagagaacacggcagacccagtggagtaggggagtgaggacctggactttgaaatcagacaggggagcttgaatcctgcctctgcagtgtcccaggtggtgaccttgggcaggtcccctagcctgtgtccttatctgtaaagcgaggatcagagaaacttcctcttagcattgatgtcagggtaaa

SEQ ID NO: 111293 - DNA, 523 bp, Homo sapiens
agaaaatacaactggttgcttgcttttataggaattttccctggaggccacacgaaaccacttgtgcctcagaacaactcatgactgggggagtaaggacaagcagtatatccattggcttctttctgtgtctcgtttcttactggttaatgtctactcctgggatatttcacttttccacacttcttagttatgtttcctggcctctttgaggagctgctgggaagacagagctttaattggtcctgttagagttatgaacaggaatggtggtttgtctctcttttctgggaagatacataactccagaaactgtgagagtcttttctggggctacaagacaagtggctgaagccaggggtgaggtgagaggtgatagtgtggttggtgggtgtgcaagcagggccaagcaaattcaaggtggggcatattctaggacttacacaacagtctggaaataaatatgtattttagaatattgagattctaaactaagaatgatgtcttacgtaaaattacaaaa

SEQ ID NO: 111294 - DNA, 369 bp, Homo sapiens
tggtgggaaatggatgaaaagcaggactgtttggatctaatttaactgccttctcattttgaaataaaattgatcttaaaaaaaatccttctactataatacaagtacatcttttcaaaagtaaccctttaaaaaagattaaaccagaaaatggagtacaaaaagcattctaaaaagaattcaaaaacatgttcacatttttcaaagaaatactgtaaagagcttaagagcttaaaaattataagttgtcaacttacagatgaaaaggtaaaatatttctaatacatttaaacttcataaaaggaaacatatcagaacttacacattgaaattggtattatccccttcaaagtattcatcaatgaagca

SEQ ID NO: 111295 - DNA, 123 bp, Homo sapiens
tgtaatcccagctattcgggaagctgaggcaggagaattgtttgaatctgggagatgaaatttcagtgagccaatattacgccactgtactccaccctgggggacagaacgagcctctgtctc

SEQ ID NO: 111296 - DNA, 229 bp, Homo sapiens
attcctgggactctacagagtttgtaaaatcttgtgtaaacctcaagcacagtattaaaattctatttgtagactttttcttattttaatttattttgcatatctaactcaagtgattttttatttgagtctttttcttcaactagtatagtgatcattattttaaattctcagtattaaatgagattgggtgcaattattgaattgatttttaaaaagaaaaccagtg

SEQ ID NO: 111297 - DNA, 388 bp, Homo sapiens
attggttcaaggtcagtaatataaggaaccagtgtggacaagtgtgtgccttaaggagttggcatgagagagtagattatatagttgatgtttttagggttctacgctggaggttggacagagaagagaagcttccctacaaaaatagccagatgcatcttttgtttgttcctcctccctcagttgattatgacaaatttcaaacatgaaatgttgaaagaactgtgcagcgtatacacacagtagcagttagattccaacattttgtgttacatttgctttatcaaaaaagaaaaatttacctgtccatctttttttattttttggtgcattttaaagatagttgaagacattagtacacttcacccccaaatacgtcagcatacat

SEQ ID NO: 111298 - DNA, 431 bp, Homo sapiens
ctaatataataaataggcatattctcggtgctcaataaatatttgttgaatgaatgtataaatggacaagtaattgaatggttaaagaaagaggttcctattaaatgttttcatgtttcaagtccagttcacccctgaattttggtgtaatttccagtttctcaaccatgcactgatgagaattgatatttggactttgtgaaataatgctaatagctattgtatacatttgtgtttaaatcacatgaaatggagaaacctcatgttgtttttagtttggggtgtaacctgggcatatttggcagaaaaatctgttggctgcatggagaatggaagaaactcatgaaaatagatgaagtaggagctgttgaacttgatgtgagagagacgaggaaaggagatgtagatgattaagacatcagcaatggaaa

SEQ ID NO: 111299 - DNA, 242 bp, Homo sapiens
ttcagagcctgaagattgacaagtattcagccaaagaataggaaataggctagatattataacaagtagattgatccctttggatttgtcctttcagatgcattagccatttgtctcagatctaatgtctcaggtttgattatgcctcatgctaagatgtaggttcaatgagaaatttgaacaagctttgaccaggccaaaaaaaaatcactaaaatctttacttaaatgtcagtggcttcc

SEQ ID NO: 111300 - DNA, 3044 bp, Homo sapiens
tgatggaataatgtgaaaaagcaggtaattaattctccttgaacaaagcaaaactgaacagtcatatcacattgctattctccaaagcataatctcaaatggtttcatatcatggttgtgtattacttgcaatgggtgtgttaggatatgacagctttttaaaaaaatgagctgctggttatacaaagcaaatggcatatgaccaagaagctgtgatatgctagtgtttctttttatcatagtgtattactaggccaaataatgacaccttgaatatttttacatttattgcagaaaccttaaactttggaatttccataaggtttttatgtaatattctatttctagctttttagttttatcttgctgtactgtaagtttgaggatatttttcacctgcactcttaggaataagttcataattctgtttatggggctttcctcccataacactgcatttgtatattttctgtataaaatatgtgttgtgtattaacctttatcccatacagagagtggtacatgaatgactagttttctaagatgtcctttttattgtgaataaaatataaaagttaaaggccctctgctaagtcacataaagtacagcatataagttcatataggtacaaataaatgagtttgcagtgaattgggccttcaaattacctcaagtgacagatagtaagaaaagcttcttgagcaggtggaggtcactgaatcccctactatgcacttatcaagattttacttactttaatttactggaaattgattttttaaaaaatgactacactgtaacaagggaagggatctgggtttttttgttgttttattcttgttttttttaagtagttcaaattctgaaactgtgatttaaaaattttttacagtcaagcattctgattttgaacataactcccttccctttctgtgtaacaaaggtctctctgttatctcttaaattttgttacatctccctcagcctctttctttgtccgtctcccttctgtcattgtctatggatgtttacctctctgttctcctaaaagtttgaagattaggtcaactcttatttctagttcattggtaatttaatcttaatttttttttcgtgatttttgttggttgtataatctgctgacgtatttttatactcaagtgtagttttctattaaaaagaaaagtggttggattaaaaatagtaagctatgtaaccctcatgttactttcactttcaaatattgggtacctaaaacattacttcagagattatgtaatcctattatagtatgtttgctttcctttattgttggattttacattctgatttggctttcctccaaaaaatgtatatcatgaaagactagacagttatttgcaagtgtttagaaaggtgttaaaaatgtaaagcaaagagtcttaactttctcctaattgggagaaaaatgctttaacattactataataatattccaggtttggagggggtctccaggccccatatttgctgttaatagttggaccttttagaccatgtgttatttgcaatcccagaatgattgcttctgctattagttaaaaagatactattcttttctttctgtacaagtgcaatactccccttgaagtcttaaaaactatggtgatttttttttcttttctgacctattcttcctttagctaatgacaaaaagaaactcataaaagtcatagtatgttaaaggacacaacaagcaaagagaaaaacactccacaatcaaaagattacagaatgtggaaaccactagtctgatctcatggtatctttatttaagctaaatttccatggaaattagtaatcttttgcttgaaaaatgtgtcctaaagttgaactttttacagattgaatcttcttagaccctcgcccaatgctctaaattaagaacctaatacttaatatttttattttacttctccccttttagaaataaacttttaaataaaagcaaagcacttagctgagttttaaacacttacatatcacctattggagaaattttttttaaaaatatttggagcagtcctgttttcatacaaatttaagtaagaggtatttttcttatacatatttatatgtagtgtgctaattttctttttttatacctgtgtccctgtagtaaaactgctgtaatataaatacatgttttgttaaaagataacatttctttggcatttcttttaaaggcagttactgcatttctgcatttgtacagtatgtgtcttggccattttagatattctttctttaacaataccaaaggtaattagactattttaaagactaattgcttgacagtttctagggtattttgtgttttagaagcaaaaaaagaaaaaaaaataggtcaaaccagtaaacctcattttttttcaaactaataatttggggaaataaaaactattgtttaaaaaagaaatatatatatatatatatataaatatatatgtaaagttaaaattccataccttgtatgtcaggtttgctaagtgtaatgtagtttttttaaggctcaaataccatacctcagaaaatgaggtttactatggaaatactgaaacagtctttgcagctgtgtgacaagtcactctactacatactgatttggagacctccgctaaatagttttatcactgcagactaaaatgtgggacttgtatcttctttgtttttaatgcacacacatacatgttctgtgcatgtatgtggttactgtgtatatgtgtatgagtgttgtatatgcatgtgtgagtgtgtgtctgtatgtgtgtacaactaaagaagctgcagaaactttgtaatactttgtgaaaaggattatattataaaggtttgtactgtctgagtgcacagctactggaataaatttagggaatctcaggaacaagcatataatttgtccaagatttatttcttctcagaagtgtaagtgcagtttttaattctgtatattatttaatattttaccaataaaataaacttctgacataaaaagtttgctata

SEQ ID NO: 111301 - DNA, 656 bp, Homo sapiens
gaaaaactggaatgatcaggcctttaaaaaaatatggaatcagccaggcatggtagctcacacctttaatcccagctctttgggaggccgatgcaggaggattgcttgagcccaggagtgcgagaccagcctggacaatatagcaagaccctgtctctataaaaataaaatttaaaaataaaaaataaaatctagaatcaaggccagctcttctctctatagcaggaactcatgaaccttgagtattctcaagatagcatagcacccaacagattcatatgctttgtaacctctgtctatcactcataacttcaggagaaagtctgataggttccactgagaccatattcccacctatgtctaagactggaaggtgggcttactggcaggcactaccagtaatgctcattgtatctccttcggcttggctccttagttgacatatatcttgtgctcaaagaattaatgttgaatttaaatattctaaatggccagtttttaatgaaggcacatgctggtaagcagtacagctattcttataatcctagacttttgttctttcctatttattttcacatttttctatgctcccgtttttgtcagaaatctgttggaacagttattatctctatttcttccatggtgtctaaaactag

SEQ ID NO: 111302 - DNA, 130 bp, Homo sapiens
cccagatggcgccactgtgctccatcctgggcgacagagcgagagtccttctcaaaaaaaagttgcgaaatgaagaaaagtcttggaatagagcacaaggcattttagctctggggattttcttgaaagg

SEQ ID NO: 111303 - DNA, 328 bp, Homo sapiens
agatggggttttgccatgttggccagggtggtctcgaactcctacaccaaagtcagtctcacgatgacgatagacagccagactattgatgacctggaataataatagttgaaagaatgaaaaggtcaatgacaccgacaatatttcactcagaaagaatcatccttagaaaccgtcaacctcctccaaaaggtaaccacatccctcagatatcaccgtgggattccactgctacaaaaaagaacagaagttagaagtctcatgtttttcagatggctggtagtgtttttaggcattgcaaatgtggggtgttgtctttcttggtata

SEQ ID NO: 111304 - DNA, 525 bp, Homo sapiens
ccttaggtaaaagatacctctgcacacacattatttgacagtacagtgcttagtaaatatttgtcatttgtttattgatctcttgttctttcttgacttccctgttcttgccttgttctcttcccacccacttgtgcttgatcttatctcccatctgggtgacaatgtttgggtctcctctggcacctttcaattctggagaaacacaattcagatcttctatgtgaagtgatggactataatccagtaaaccagaattctaccttcaaaacataaaaaaaagctttgtaactcgtgactggcccatctgagttatctataattagattgcagattcctaagcccacctgaactgtgttcagatgaaaatgagatttaagcactttttgttcgaggaggaattcataactgttattgagaatgagaatgagggggaatatgcaatgagtctctatgttagagccggcatcaatctttaataggaaaatacatgctttttttttgttttgttttttgagacagagt

SEQ ID NO: 111305 - DNA, 750 bp, Homo sapiens
aagagtactcttgaagctgagactcaaatttgcatttcaattgaatagatgcaaaaaaataaagaagataaggaatcaatagccttcaccaagtcatggaaatgtgaactatgagttatacacatctgaacggaatttggcgtaggtggactatgccctgagagctggaatgtttaggcagaggaataaaaagtggtgtgtgtatagggagctggggagcggtaggtatttgaagtataaagaaagtaaaggaaggtgaagttagaagcgaagatttaaggcagtttgtagagggtcttggatggcaggattaggagtctagaatgtgtgctgtgattaaagggagccaaaaggatgctagcagagccctgattggtttagagttttatttaagaaaaaaaggtttctgcttgtttccttatacaaggagacatacattgcaaagatgccacaatttttaggaaagaagcatgtgtgctatacccataagaattcactactggggaataagttcttgctttataaactttctaagaatagtcaagttcacccagaccagagttgagctttagatttaaggatgcttagcttgccaccttgtggctgacagtgaatgctgcacacaagggatgtaatctgggaaataaaccaactccaaaccacttagtgaagtttttttatttgttcaagttcatcacaagcgttagagataataataagaataataacacttagaataaatattaatga

SEQ ID NO: 111306 - DNA, 260 bp, Homo sapiens
ggtctcacaccactctcctatgcatccctacctgctaaaaagatgtgccggctctggcctggccggctcctccaccttccagccacctgtcctgtttattcatttcttccctctcttttctccttttcttttccatttatccagtcattccttccttctacccacccaccaacctgatcacccactcattcttctctccttcaatccaacctttcctcagtacccaacctgtgcaactgtaccatggactccttcaggca

SEQ ID NO: 111307 - DNA, 141 bp, Homo sapiens
aacagcatcactcgtgcctcctcgggtcagcgacagcaaaccttagcgcgccccctcccagggaatgttacctgccaacccccatcccttccttgtgacagcccaggatcggaatcctggcttaggtagaagcaaatgaca

SEQ ID NO: 111308 - DNA, 551 bp, Homo sapiens
ggtgacacatgccttcttaacacttagagtttttattttagttattgaaagagtaattttagacttgtttggacatacgcttttatcatatgtttcttgtgcacaaaaagaggaagaaaaggtgaaacatgttggcaaatgtagtcctaaactttccagctctccacttaaccactttacctgagagctgccatgtctcagcttttgggccatcgggagatggagtgcatcaccttccaagccatcgtccccccatctgcaaggtttgatgctggagctttgttgttcttgtcagaaggcatgagtggacaaccagtgcccacctcctccttggggattattacctggtttgtgggctgatagagttaagtactgcaatcatgccaccacctacctgaggtacagcagctgagatacatccctattttaggctgggagcagtggctcacgcctgtaatcccagcactttaggaggccaaggcaggtggatcacctgaggtcaggagttcaagatcagcacagccaacatgatgaaacccccatctctacta

SEQ ID NO: 111309 - DNA, 1498 bp, Homo sapiens
gattttacttcttagagactccttcctgataggtgaaatggggacagctaacatgtgaaagaaggcaccaccttcacacgtgcttaatagataataaatgtaaattctctttatgctccaaagatgctttttactctaagccatcattttttgaatgttatactatgcctctgcaagaaatagtttttgatatttctttttgattgatgtagtaactattgcattggaggcaatactgtgattttctttcagtgtgtgtcttattgagccagacattgactcattatgagttgagactttaggctaccagatccaaaacgcaataacattggtattattaagcacttgaggctgtcttttgttaatccagaatgtgcttatttagtcagtgagtttttcctttcttcctagacctatatcttgctcctagagttggttagggttacatcatcactgtcagcagtcctcattttatggttatttaggtgccacatctctcaattaccaaagagatcagtacaatgtgaggcaaagtacctttttttttaaaagctataagatatcagatttctttcatttagccaatattttggttttagagggaggtttttaaaaagtcaccgagaactgaggatcatgtgtgtatagaaacactgtaatctgatagatgagtcttaactagcaatgtctttgcttatcatttattctgacagtgatcacctgcattaattatcctaataggcgatatcaagtgtttatactgaggccataagtagaatgttcattgagtttgttatcagggctgctgatcatgaaattaaactgtagttgtgcacatgtgtattgtttcattaacttgcctgcctattcagccttctgcagtaatgtagcttctcagagcacaggagaaaaaacataaatctagtgagccgcattaaagtttcttcatgtctggatggaatagtgtcacttgcataggtctgagggtttcattatttgcctgccccagatttggactccgtttttcaggtgaaagaatccttggataactgtttcattttcataggaaacctctttggtttcgggatccaaagtaatatgtaggttcaatattttgtaggttttataatcaaatgtctccctaaagagatgacatagggaagaaaagcctaatgtatcatcttaatggattcagtttttattatgcacaaataactgggcttgtaacctaggaatatgattagagcgtgatgctggcttaaaaaataggactggtgaatcacagtttgtgaataataaactactggttggaaatatttcccagaagcagttttttttttcctttctatctttacctatatcccatgtttggtttcaaacttccctgccttagagcaacacagctggttttagacagtctttctatcaatatcttataatctttgctcatgtacaaacatacagcaaatacaacggtataaaaatacgatgttatcta

SEQ ID NO: 111310 - DNA, 1549 bp, Homo sapiens
gattttacttcttagagactccttcctgataggtgaaatggggacagctaacatgtgaaagaaggcaccaccttcacacgtgcttaatagataataaatgtaaattctctttatgctccaaagatgctttttactctaagccatcattttttgaatgttatactatgcctctgcaagaaatagtttttgatatttctttttgattgatgtagtaactattgcattggaggcaatactgtgattttctttcagtgtgtgtcttattgagccagacattgactcattatgagttgagactttaggctaccagatccaaaacgcaataacattggtattattaagcacttgaggctgtcttttgttaatccagaatgtgcttatttagtcagtgagtttttcctttcttcctagacctatatcttgctcctagagttggttagggttacatcatcactgtcagcagtcctcattttatggttatttaggtgccacatctctcaattaccaaagagatcagtacaatgtgaggcaaagtacctttttttttaaaagctataagatatcagatttctttcatttagccaatattttggttttagagggaggtttttaaaaagtcaccgagaactgaggatcatgtgtgtatagaaacactgtaatctgatagatgagtcttaactagcaatgtctttgcttatcatttattctgacagtgatcacctgcattaattatcctaataggcgatatcaagtgtttatactgaggccataagtagaatgttcattgagtttgttatcagggctgctgatcatgaaattaaactgtagttgtgcacatgtgtattgtttcattaacttgcctgcctattcagccttctgcagtaatgtagcttctcagagcacaggagaaaaatgtatctgagagttattcgagagagagttcaacaatagcccatatttccgaacataaatctagtgagccgcattaaagtttcttcatgtctggatggaatagtgtcacttgcataggtctgagggtttcattatttgcctgccccagatttggactccgtttttcaggtgaaagaatccttggataactgtttcattttcataggaaacctctttggtttcgggatccaaagtaatatgtaggttcaatattttgtaggttttataatcaaatgtctccctaaagagatgacatagggaagaaaagcctaatgtatcatcttaatggattcagtttttattatgcacaaataactgggcttgtaacctaggaatatgattagagcgtgatgctggcttaaaaaataggactggtgaatcacagtttgtgaataataaactactggttggaaatatttcccagaagcagttttttttttcctttctatctttacctatatcccatgtttggtttcaaacttccctgccttagagcaacacagctggttttagacagtctttctatcaatatcttataatctttgctcatgtacaaacatacagcaaatacaacggtataaaaatacgatgttatcta

SEQ ID NO: 111311 - DNA, 1494 bp, Homo sapiens
gattttacttcttagagactccttcctgataggtgaaatggggacagctaacatgtgaaagaaggcaccaccttcacacgtgcttaatagataataaatgtaaattctctttatgctccaaagatgctttttactctaagccatcattttttgaatgttatactatgcctctgcaagaaatagtttttgatatttctttttgattgatgtagtaactattgcattggaggcaatactgtgattttctttcagtgtgtgtcttattgagccagacattgactcattatgagttgagactttaggctaccagatccaaaacgcaataacattggtattattaagcacttgaggctgtcttttgttaatccagaatgtgcttatttagtcagtgagtttttcctttcttcctagacctatatcttgctcctagagttggttagggttacatcatcactgtcagcagtcctcattttatggttatttaggtgccacatctctcaattaccaaagagatcagtacaatgtgaggcaaagtacctttttttttaaaagctataagatatcagatttctttcatttagccaatattttggttttagagggaggtttttaatgagtcttaactagcaatgtctttgcttatcatttattctgacagtgatcacctgcattaattatcctaataggcgatatcaagtgtttatactgaggccataagtagaatgttcattgagtttgttatcagggctgctgatcatgaaattaaactgtagttgtgcacatgtgtattgtttcattaacttgcctgcctattcagccttctgcagtaatgtagcttctcagagcacaggagaaaaatgtatctgagagttattcgagagagagttcaacaatagcccatatttccgaacataaatctagtgagccgcattaaagtttcttcatgtctggatggaatagtgtcacttgcataggtctgagggtttcattatttgcctgccccagatttggactccgtttttcaggtgaaagaatccttggataactgtttcattttcataggaaacctctttggtttcgggatccaaagtaatatgtaggttcaatattttgtaggttttataatcaaatgtctccctaaagagatgacatagggaagaaaagcctaatgtatcatcttaatggattcagtttttattatgcacaaataactgggcttgtaacctaggaatatgattagagcgtgatgctggcttaaaaaataggactggtgaatcacagtttgtgaataataaactactggttggaaatatttcccagaagcagttttttttttcctttctatctttacctatatcccatgtttggtttcaaacttccctgccttagagcaacacagctggttttagacagtctttctatcaatatcttataatctttgctcatgtacaaacatacagcaaatacaacggtataaaaatacgatgttatcta

SEQ ID NO: 111312 - DNA, 1076 bp, Homo sapiens
gattttacttcttagagactccttcctgataggtgaaatggggacagctaacatgtgaaagaaggcaccaccttcacacgtgcttaatagataataaatgtaaattctctttatgctccaaagatgctttttactctaagccatcattttttgaatgttatactatgcctctgcaagaaatagtttttgatatttctttttgattgatgtagtaactattgcattggaggcaatactgtgattttctttcagtgtgtgtcttattgagccagacattgactcattatgagttgagactttaggctaccagatccaaaacgcaataacattggtattattaagcacttgaggctgtcttttgttaatccagaatgtgcttatttagtcagtgagtttttcctttcttcctagacctatatcttgctcctagagttggttagggttacatcatcactgtcagcagtcctcattttatggttatttaggtgccacatctctcaattaccaaagagatcagtacaatgtgaggcaaagtacctttttttttaaaagctataagatatcagatttctttcatttagccaatattttggttttagagggaggtttttaaaaagtcaccgagaactgaggatcatgtgtgtatagaaacactgtaatctgatagatgagtcttaactagcaatgtctttgcttatcatttattctgacagtgatcacctgcattaattatcctaataggcgatatcaagtgtttatactgaggccataagtagaatgttcattgagtttgttatcagggctgctgatcatgaaattaaactgtagttgtgcacatgtgtattgtttcattaacttgcctgcctattcagccttctgcagtaatgtagcttctcagagcacaggagaaaaatgtatctgagagttattcgagagagagttcaacaatagcccatatttccgtaaagcctgcagaactatgagccaattatgcctcttttctttataaatgagccagtctcaggtatttctttatagcgattcagaatgcttcacacacacccttgcacactttg

SEQ ID NO: 111313 - DNA, 318 bp, Homo sapiens
ggtatttttttcaaatgattactgatgattttggccttgggtgccagcttgagaacttcatccctcctaacacatggttctactcccaaaaagtagatttgccatttactgtttgcatgactataaacaaactccttttcacctttgtttccccacttaggaaagtgagatattagagcctatctcaaatgattatttttaaagattaaattaaataatatgtgtcagtctcctagaacagtgcctggtatctggtaagggctcaataaatgttaagcacttttataataatgttttgtgacctcgctgacttcatat

SEQ ID NO: 111314 - DNA, 269 bp, Homo sapiens
tgcattcataacacatggcaacttcctggaagaaaagcttttctatgcttacctgacacactcttcctttttttaaatttagtctcttattcctgcccatgttattcgacaaactattggctctgagaagatatgactaaaataataatgtgtaattgatgcatctaaatatatgtgtggccatttcattttaaaatatcaatgactactgttttattttaaaatgttaagtaaactaccagaaccaggggaaaatatttgcaagaaat

SEQ ID NO: 111315 - DNA, 3613 bp, Homo sapiens
catctttaaacccatcattcttattgaagcccatttgagaactcttagaattaatagaaccttttataagggaatatatggaatattttttattgttaatgtaacttaattccttaaaacctggaatattaatatatataatctattaaaagctgaagattaaatatgtaatttttgcttttagtttcttgtgttagtatgcttaaaggtatcaatacttttattctatattcattagaagaaaggtaataaatttaagtttcattgctgaaaaattttaaatgagtgccaccccatagccatagtcattttgattaagcataatttaactttcattatagcataaagagaaaataattattttagtatggaaacagtgataggcagtgctgtaaacaatattctctgaaaagttgtgggggtcacaaagaaaattttaaagaatatagaagcttttttaaaaaatctttttagtgtagtttcttagaacaaattataaacataatcattctgaataatcaatttttatttagtccttaactatgtaaaaccgtatcagtagaaaaatgtgctggtgtcgtgtctaaagatggataaatttctttggaatttatctttggagaccaactttatgaggcagactttttgtctacggctttggaaccaaaaaaacttcactctaattcagtcctaaaggctattttacattttgccggggtaaagtgacttcaagatacagcatggtgtcttgtatctagtagaatattgtgctagccatctaaaaaagtggatttgagccttaatttggccgtttctcaattgtctagttgaccttagacaattagtgtccatggctttccttttgtttttcccatactgaggaacttaaactacagctctaaaatgtcttttggttttaaaattctgaatgcttatatactactattaaaaattaaaaatccctcaaatagtagggaaatacaggtaatatgaaattaaatgtatttttatccattatttgattcccacctgttattttatttagaatacgaatacaaccaagtagggaaaaacgtatcagtaactgctattcaacttaaattcagcgaattaatagctgaatagaaatagctaatgacaatgcaaaagagaaaacaagccatattgctaagaaaaggatagtaagctgcttagaaagaaccagcctgtgttggaaataattctcttctagataatttaccttattttcttggcttgtactaattgaatggaagtggttaatttgttcagagtttattgccgtttgatgccaccccagtctatagttctgtgtgactttccatattgaaagagtagggttagtagccaggttgtcagtcttttacaaatgtctacataaatgtctacataaatctgaaagtggtttatattcaaggttagtttttcagtagcgtctcctccttattcattcacttttactgtgaagactgaaatccaaaagccaggttccccaaaaaagtatttttaaaaaattttaggggaccaaaataaatagaggaagaccaatataaaaaaatatgttcaactattccattttaaatttaaagcagaaaaaaaaattgtgcccctcagacctaaaggcagctttaaatgtatatagtttggtgaaacatttgggaaatattaatttggaggtttagaagcatacgaaaaacaaattcaaagcacttgaaagtaaagacaatatcatgaggtcgaaaaaacttcaaaaggatattaggtaagagaaaatgtgaatgaaagcagtgaatttctgcctctcctcgtatttagggtacttaaaattactaaaaaatactgtctttttaccatacagctagatggcctgtattattcttaatgtggccaaaggagtgaagactgattagggttttagaatttggaactgtagtcacataaaggcatcttttgcatttcttaaaccagtaatctacattttctcctggaaatggagaaatatgaaatgtgctgtgcatagcttttggaatagaaaacaaagttttaaaagaatggatatgttttcttgcacaacttgtaaaattttaattaaaaaattacctcatttttcaatccataaggtgctttgctcaagtttgtgggatgtttgtaccatcccataaaaacccccttcacccaaactgtatttgaaatatgcaaaattcataactaagggatagcattccttggagactttgttttgttttactcttgtttaccagctgggccaacatggtagatatatgagattcacatatggtttcattaaagcacataggaaagtgctcagtcaatatttaattagtttaattagataagggaaaggagaaatcctaaatttgatggattcttttatactgtgaatatatttccatcagtgttggtaagatatcaaatgactatcagttgatcccagtcatcagtgacttatttgcatatttaagccctattcacaagagaccataatcattttaatcttatattttccctcaggaaatttagggactctgaagcccctattttattctcttggagtaaactgttgagtgtagttacaaaaacttttatttatgacttaaaaaaagtttagctgctatttcagtgaaagtgtaaaataaaacggtcatgatttttttcaattacagaatagttacaaattttaccatgttcatctattccacagagcatgttaaaaacaacaacaacaaaaacctaacagcaattacaaccttggtgttgcgtttattctaatcagagtgaatgattataatcacactttgctattttaacataaattggtgctttagagcattaaagaggaagcagcaggccctgtactcagtatttattatttcttgcctcagaatgcaaaacaactttaaagtgtctatattcatatatatgtgcatttcttaagatttaaatacaaactgttgttactccttaagcttcaggctttctgcgaaagctctaagaatatcttcattactatgcttggtcaactggaagatggtattaataaggtcagaattaggaattggattgctctgtgggtcctccggtattgtgcagaggaaagaaaaatgtctttcacaccacaaactgtgtgtctgaaccccagccaaacaaatgtgttccattggtccaatatataagcattaacaacaacaacaaaaaatttaaaacaagtaaattaatgcattcacatgatcacttcttgaaaatggttcaaagcatgttttcctgatggtgggattgtttaaatgacatgttttaaagtttttaatactttattagttatgaagtgcttcttttatatgttaagtttaggttgccagtactcataatttttatttctgcaattatgttataatgagttgtttgcatgcctacttaacccaagtaaaacgatgctgtttgctctggaatgttcatcttttagacaggttttggctcatttccaatcatggtgcaatatagtgtaacattcatttgttttcattcaacagttttatttttgtcataataaataattacttttccaataaaaaaagaa

SEQ ID NO: 111316 - DNA, 2566 bp, Homo sapiens
  misc_feature (72)..(72): n is a, c, g, or t
cccaggcatatggtatctctttgcatgtcattagctatttctattcagctattaattcgctgaatttaagtngaatagcagttactaatgacaatgcaaaagagaaaacaagccatattgctaagaaaaggatagtaagctgcttagaaagaaccagcctgtgttggaaataattctcttctagataatttaccttattttcttggcttgtactaattgaatggaagtggttaatttgttcagagtttattgccgtttgatgccaccccagtctatagttctgtgtgactttccatattgaaagagtagggttagtagccaggttgtcagtcttttacaaatgtctacataaatgtctacataaatctgaaagtggtttatattcaaggttagtttttcagtagcgtctcctccttattcattcacttttactgtgaagactgaaatccaaaagccaggttccccaaaaaagtatttttaaaaaattttaggggaccaaaataaatagaggaagaccaatataaaaaaatatgttcaactattccattttaaatttaaagcagaaaaaaaaattgtgcccctcagacctaaaggcagctttaaatgtatatagtttggtgaaacatttgggaaatattaatttggaggtttagaagcatacgaaaaacaaattcaaagcacttgaaagtaaagacaatatcatgaggtcgaaaaaacttcaaaaggatattaggtaagagaaaatgtgaatgaaagcagtgaatttctgcctctcctcgtatttagggtacttaaaattactaaaaaatactgtctttttaccatacagctagatggcctgtattattcttaatgtggccaaaggagtgaagactgattagggttttagaatttggaactgtagtcacataaaggcatcttttgcatttcttaaaccagtaatctacattttctcctggaaatggagaaatatgaaatgtgctgtgcatagcttttggaatagaaaacaaagttttaaaagaatggatatgttttcttgcacaacttgtaaaattttaattaaaaaattacctcatttttcaatccataaggtgctttgctcaagtttgtgggatgtttgtaccatcccataaaaacccccttcacccaaactgtatttgaaatatgcaaaattcataactaagggatagcattccttggagactttgttttgttttactcttgtttaccagctgggccaacatggtagatatatgagattcacatatggtttcattaaagcacataggaaagtgctcagtcaatatttaattagtttaattagataagggaaaggagaaatcctaaatttgatggattcttttatactgtgaatatatttccatcagtgttggtaagatatcaaatgactatcagttgatcccagtcatcagtgacttatttgcatatttaagccctattcacaagagaccataatcattttaatcttatattttccctcaggaaatttagggactctgaagcccctattttattctcttggagtaaactgttgagtgtagttacaaaaacttttatttatgacttaaaaaaagtttagctgctatttcagtgaaagtgtaaaataaaacggtcatgatttttttcaattacagaatagttacaaattttaccatgttcatctattccacagagcatgttaaaaacaacaacaacaaaaacctaacagcaattacaaccttggtgttgcgtttattctaatcagagtgaatgattataatcacactttgctattttaacataaattggtgctttagagcattaaagaggaagcagcaggccctgtactcagtatttattatttcttgcctcagaatgcaaaacaactttaaagtgtctatattcatatatatgtgcatttcttaagatttaaatacaaactgttgttactccttaagcttcaggctttctgcgaaagctctaagaatatcttcattactatgcttggtcaactggaagatggtattaataaggtcagaattaggaattggattgctctgtgggtcctccggtattgtgcagaggaaagaaaaatgtctttcacaccacaaactgtgtgtctgaaccccagccaaacaaatgtgttccattggtccaatatataagcattaacaacaacaacaaaaaatttaaaacaagtaaattaatgcattcacatgatcacttcttgaaaatggttcaaagcatgttttcctgatggtgggattgtttaaatgacatgttttaaagtttttaatactttattagttatgaagtgcttcttttatatgttaagtttaggttgccagtactcataatttttatttctgcaattatgttataatgagttgtttgcatgcctacttaacccaagtaaaacgatgctgtttgctctggaatgttcatcttttagacaggttttggctcatttccaatcatggtgcaatatagtgtaacattcatttgttttcattcaacagttttatttttgtcataataaataattacttttccaataaaaaaagaa

SEQ ID NO: 111317 - DNA, 3559 bp, Homo sapiens
catctttaaacccatcattcttattgaagcccatttgagaactcttagaattaatagaaccttttataagggaatatatggaatattttttattgttaatgtaacttaattccttaaaacctggaatattaatatatataatctattaaaagctgaagattaaatatgtaatttttgcttttagtttcttgtgttagtatgcttaaaggtatcaatacttttattctatattcattagaagaaaggtaataaatttaagtttcattgctgaaaaattttaaatgagtgccaccccatagccatagtcattttgattaagcataatttaactttcattatagcataaagagaaaataattattttagtatggaaacagtgataggcagtgctgtaaacaatattctctgaaaagttgtgggggtcacaaagaaaattttaaagaatatagaagcttttttaaaaaatctttttagtgtagtttcttagaacaaattataaacataatcattctgaataatcaatttttatttagtccttaactatgtaaaaccgtatcagtagaaaaatgtgctggtgtcgtgtctaaagatggataaatttctttggaatttatctttggagaccaactttatgaggcagactttttgtctacggctttggaaccaaaaaaacttcactctaattcagtcctaaaggctattttacattttgccggggtaaagtgacttcaagatacagcatggtgtcttgtatctagtagaatattgtgctagccatctaaaaaagtggatttgagccttaatttggccgtttctcaattgtctagttgaccttagacaattagtgtccatggctttccttttgtttttcccatactgaggaacttaaactacagctctaaaatgtcttttggttttaaaattctgaatgcttatatactactattaaaaattaaaaatccctcaaatagtagggaaatacaggtaatatgaaattaaatgtatttttatccattatttgattcccacctgttattttatttagaatacgaatacaaccaagtagggaaaaacgtatcagtaactgctattcaacttaaattcagcgaattaatagctgaatagaaatagctaatgacaatgcaaaagagaaaacaagccatattgctaagaaaaggatagtaagctgcttagaaagaaccagcctgtgttggaaataattctcttctagataatttaccttattttcttggcttgtactaattgaatggaagtggttaatttgttcagagtttattgccgtttgatgccaccccagtctatagttctgtgtgactttccatattgaaagagtagggttagtagccaggttgtcagtcttttacaaatgtctacataaatgtctacataaatctgaaagtggtttatattcaaggttagtttttcagtagcgtctcctccttattcattcacttttactgtgaagactgaaatccaaaagccaggttccccaaaaaagtatttttaaaaaattttaggggaccaaaataaatagaggaagaccaatataaaaaaatatgttcaactattccattttaaatttaaagcagaaaaaaaaattgtgcccctcagacctaaaggcagctttaaatgtatatagtttggtgaaacatttgggaaatattaatttggaggtttagaagcatacgaaaaacaaattcaaagcacttgaaagtaaagacaatatcatgaggtcgaaaaaacttcaaaaggatattaggtaagagaaaatgtgaatgaaagcagtgaatttctgcctctcctcgtatttagggtacttaaaattactaaccaaaggagtgaagactgattagggttttagaatttggaactgtagtcacataaaggcatcttttgcatttcttaaaccagtaatctacattttctcctggaaatggagaaatatgaaatgtgctgtgcatagcttttggaatagaaaacaaagttttaaaagaatggatatgttttcttgcacaacttgtaaaattttaattaaaaaattacctcatttttcaatccataaggtgctttgctcaagtttgtgggatgtttgtaccatcccataaaaacccccttcacccaaactgtatttgaaatatgcaaaattcataactaagggatagcattccttggagactttgttttgttttactcttgtttaccagctgggccaacatggtagatatatgagattcacatatggtttcattaaagcacataggaaagtgctcagtcaatatttaattagtttaattagataagggaaaggagaaatcctaaatttgatggattcttttatactgtgaatatatttccatcagtgttggtaagatatcaaatgactatcagttgatcccagtcatcagtgacttatttgcatatttaagccctattcacaagagaccataatcattttaatcttatattttccctcaggaaatttagggactctgaagcccctattttattctcttggagtaaactgttgagtgtagttacaaaaacttttatttatgacttaaaaaaagtttagctgctatttcagtgaaagtgtaaaataaaacggtcatgatttttttcaattacagaatagttacaaattttaccatgttcatctattccacagagcatgttaaaaacaacaacaacaaaaacctaacagcaattacaaccttggtgttgcgtttattctaatcagagtgaatgattataatcacactttgctattttaacataaattggtgctttagagcattaaagaggaagcagcaggccctgtactcagtatttattatttcttgcctcagaatgcaaaacaactttaaagtgtctatattcatatatatgtgcatttcttaagatttaaatacaaactgttgttactccttaagcttcaggctttctgcgaaagctctaagaatatcttcattactatgcttggtcaactggaagatggtattaataaggtcagaattaggaattggattgctctgtgggtcctccggtattgtgcagaggaaagaaaaatgtctttcacaccacaaactgtgtgtctgaaccccagccaaacaaatgtgttccattggtccaatatataagcattaacaacaacaacaaaaaatttaaaacaagtaaattaatgcattcacatgatcacttcttgaaaatggttcaaagcatgttttcctgatggtgggattgtttaaatgacatgttttaaagtttttaatactttattagttatgaagtgcttcttttatatgttaagtttaggttgccagtactcataatttttatttctgcaattatgttataatgagttgtttgcatgcctacttaacccaagtaaaacgatgctgtttgctctggaatgttcatcttttagacaggttttggctcatttccaatcatggtgcaatatagtgtaacattcatttgttttcattcaacagttttatttttgtcataataaataattacttttccaataaaaaaagaa

SEQ ID NO: 111318 - DNA, 3559 bp, Homo sapiens
catctttaaacccatcattcttattgaagcccatttgagaactcttagaattaatagaaccttttataagggaatatatggaatattttttattgttaatgtaacttaattccttaaaacctggaatattaatatatataatctattaaaagctgaagattaaatatgtaatttttgcttttagtttcttgtgttagtatgcttaaaggtatcaatacttttattctatattcattagaagaaaggtaataaatttaagtttcattgctgaaaaattttaaatgagtgccaccccatagccatagtcattttgattaagcataatttaactttcattatagcataaagagaaaataattattttagtatggaaacagtgataggcagtgctgtaaacaatattctctgaaaagttgtgggggtcacaaagaaaattttaaagaatatagaagcttttttaaaaaatctttttagtgtagtttcttagaacaaattataaacataatcattctgaataatcaatttttatttagtccttaactatgtaaaaccgtatcagtagaaaaatgtgctggtgtcgtgtctaaagatggataaatttctttggaatttatctttggagaccaactttatgaggcagactttttgtctacggctttggaaccaaaaaaacttcactctaattcagtcctaaaggctattttacattttgccggggtaaagtgacttcaagatacagcatggtgtcttgtatctagtagaatattgtgctagccatctaaaaaagtggatttgagccttaatttggccgtttctcaattgtctagttgaccttagacaattagtgtccatggctttccttttgtttttcccatactgaggaacttaaactacagctctaaaatgtcttttggttttaaaattctgaatgcttatatactactattaaaaattaaaaatccctcaaatagtagggaaatacaggtaatatgaaattaaatgtatttttatccattatttgattcccacctgttattttatttagaatacgaatacaaccaagtagggaaaaacgtatcagtaactgctattcaacttaaattcagcgaattaatagctgaatagaaatagctaatgacaatgcaaaagagaaaacaagccatattgctaagaaaaggatagtaagctgcttagaaagaaccagcctgtgttggaaataattctcttctagataatttaccttattttcttggcttgtactaattgaatggaagtggttaatttgttcagagtttattgccgtttgatgccaccccagtctatagttctgtgtgactttccatattgaaagagtagggttagtagccaggttgtcagtcttttacaaatgtctacataaatgtctacataaatctgaaagtggtttatattcaaggttagtttttcagtagcgtctcctccttattcattcacttttactgtgaagactgaaatccaaaagccaggttccccaaaaaagtatttttaaaaaattttaggggaccaaaataaatagaggaagaccaatataaaaaaatatgttcaactattccattttaaatttaaagcagaaaaaaaaattgtgcccctcagacctaaaggcagctttaaatgtatatagtttggtgaaacatttgggaaatattaatttggaggtttagaagcatacgaaaaacaaattcaaagcacttgaaagtaaagacaatatcatgaggtcgaaaaaacttcaaaaggatattaggtaagagaaaatgtgaatgaaagcagtgaatttctgcctctcctcgtatttagggtacttaaaattactaaaaaatactgtctttttaccatacagctagatggcctgtattattcttaatgtggccaaaggagtgaagactgattagggttttagaatttggaactgtagtcacataaaggcatcttttgcatttcttaaaccagtaatctacattttctcctggaaatggagaaatatgaaatgtgctgtgcatagcttttggaatagaaaacaaagttttaaaagaatggatatgttttcttgcacaacttgtaaaattttaattaaaaaattacctcatttttcaatccataaggtgctttgctcaagtttgtgggatgtttgtaccatcccataaaaacccccttcacccaaactgtatttgaaatatgcaaaattcataactaagggatagcattccttggagactttgttttgttttactcttgtttaccagctgggccaacatggtagatatatgagattcacatatggtttcattaaagcacataggaaagtgctcagtcaatatttaattagtttaattagataagggaaaggagaaatcctaaatttgatggattcttttatactgtgaatatatttccatcagtgttggtaagatatcaaatgactatcagttgatcccagtcatcagtgacttatttgcatatttaagccctattcacaagagaccataatcattttaatcttatattttccctcaggaaatttagggactctgaagcccctattttattctcttggagtaaactgttgagtgtagttacaaaaacttttatttatgacttaaaaaaagtttagctgctatttcagtgaaagtgtaaaataaaacggtcatgatttttttcaattacagaatagttacaaattttaccatgttcatctattccacagagcatgttaaaaacaacaacaacatgattataatcacactttgctattttaacataaattggtgctttagagcattaaagaggaagcagcaggccctgtactcagtatttattatttcttgcctcagaatgcaaaacaactttaaagtgtctatattcatatatatgtgcatttcttaagatttaaatacaaactgttgttactccttaagcttcaggctttctgcgaaagctctaagaatatcttcattactatgcttggtcaactggaagatggtattaataaggtcagaattaggaattggattgctctgtgggtcctccggtattgtgcagaggaaagaaaaatgtctttcacaccacaaactgtgtgtctgaaccccagccaaacaaatgtgttccattggtccaatatataagcattaacaacaacaacaaaaaatttaaaacaagtaaattaatgcattcacatgatcacttcttgaaaatggttcaaagcatgttttcctgatggtgggattgtttaaatgacatgttttaaagtttttaatactttattagttatgaagtgcttcttttatatgttaagtttaggttgccagtactcataatttttatttctgcaattatgttataatgagttgtttgcatgcctacttaacccaagtaaaacgatgctgtttgctctggaatgttcatcttttagacaggttttggctcatttccaatcatggtgcaatatagtgtaacattcatttgttttcattcaacagttttatttttgtcataataaataattacttttccaataaaaaaagaa

SEQ ID NO: 111319 - DNA, 287 bp, Homo sapiens
agagttcttgcaaaagaaaggatagaaggaggcataaacaaaagcacagaaattagggtgtatattttttcctttttaaaaaaagtttcccaattttagtcattttgcaaaagagaaattaccattagagacatgtacattcgacctgccttatgcttgacatatcgttaatgagtggagcgatgataacaagagtcttgggctgggagcctgcaccagaagtagcctaaaaatgccagctgtccaggtaccttccttgttggtgtggttctgggatcacttgcaca

SEQ ID NO: 111320 - DNA, 257 bp, Homo sapiens
aaggagagattgctgtcgttcagagcacaggcctgactaggttcaaatctcagctctgtctgtatcactcacgtgctgcgtgactgccagggagctgtttgatcgctctgtgcctcagtttccctacctgagaatctgaatgatgtccaccccataaggttgttgtaaggcttaccttattcatttaatatttgtaatccttttggggcagtggctattatcatcatcatcatttaaataatttctgttcatggtta

SEQ ID NO: 111321 - DNA, 569 bp, Homo sapiens
ctcgtgctcccactctctcccttccttccttctttttacctatccatgtggaatttcactttctctatgcctgtcctagtacttagcagactcaagggaacccctgtgtaaatttctgcagttctttttctgcattgctctttttttggggaactctgccacacaacttcaagctgaatcaactttcctgagctactatcactgattctttaagtcagcaaggctgctgagctctgttttgattttttctggctgtgcccatgacctagaagtcaactttaggtagataatcctgtaattattaaactcaccttgtttgtttctctttttacagagatagcagttctatgttgcctgatgtccaatgtctgaaaatggctgtttcatatatttttgccaatattctacttgtttataaagtgagagatcatgtctgttccttgttaggctttcgtagctagaagtcttttttttttttttttttaagctataaatactgatttttctactgcattttgtgctccctagggaaagacatctgaacatctttctatctctagcgcacagaa

SEQ ID NO: 111322 - DNA, 434 bp, Homo sapiens
tcactccagcatatccttcattgcataggcaatcacggtgaggctgagcgactcacccccattttgcagtgcacaaggcatttagatccatgttgctttgctttagagatgaatttgtaagtggtcagtgtaactggggagaaggaaccaagtggggagttgccatggataaaaatagatagagagggccaggctggtctcgaattcctgacttcaagtgatccacctgcctcggcctcccgaagtgctgggattacaggcatgagccaccacgcccggcctattacgtatttattgttgtggacatggatttcaggatttactcagtagacatttattgaggtcttactgtgtgtccgatgctgggctatcatcagagaaacacataaaggcctggttcttgcctggaaggaattctggcagtgatggattct

SEQ ID NO: 111323 - DNA, 252 bp, Homo sapiens
catccgggccgacgagactttcaatgggcctgtgttcctgggcagctgctcctgcctcctgctgtgtcacctttgattctctcactggttttgcccgtgatgaaaacctcacactcctgacctggtgcctgatgttgcaaagggagggcagagggcaggaccacatgagtcagacagaaggacggggcctcttggagcatctgacaaggtttatggaaaaagcacgtctcagagactcaatgagatgctgaa

SEQ ID NO: 111324 - DNA, 492 bp, Homo sapiens
gttataaccacagaatatggaataaaatttatttcaatggactgagaatggagtgctatatctaaggcaatgaggacagtgaaaaaattacagggttggtgtgcaagttccctgctaatgtaggcaccaatgaaccacagcatttcatacatagaatgcagcagtccaggaatttaaatgggaaaaaattacatcttcacctatactaatttctgcgtaaaagtttacattttaagaatgattactacaatagtaccacagtggtattagctgctgctgtgactttgtcatcagtagaagttacagatattttcatagcacatttttgctaatatcttagaatattgttttcatttatcacatctggaaaaatgacatcactagaactgccactagatcttgttattatagttaatggtgtgtgcaaagcaacacatatctttaatattttgatagctacataaatataatttatttcctttgtgtgatatg

SEQ ID NO: 111325 - DNA, 490 bp, Homo sapiens
caaatctcatttcacttccctggctcattccagcctagccacaatgtccccatttttcctccaacactgcactcttgggataaactctacttggtcttcttttaggtattgtcacattcaacttgctaaaattttgctaaggatttttcgtctgtgctcacaagggaaattggtccatggttttcattacttatgtctttgattttggtatcagagtaatgctagccttgtggaatgagttgggaagtattcactcctcttcaacttcttagaagagttcacatagaatgagtattatatcatgcttaagtgtttgttagcattcacagatgaaataattcaggcctaggatttacttcgtggaaagtattttcattcatatacttctttataaattgaatttttaaaaataaacttaatttccttaatagatgcagggctatttagtgtcttctgtttcttcttgaatgcattatgatagctgtattag

SEQ ID NO: 111326 - DNA, 257 bp, Homo sapiens
tgtgtctaaaaaaaagagtaaattaaatcagattgatgagagaacctaaaaggaacatgttaaactctgaatacattatcaaagatcactataactacacaccaatactactcactgtagtctcctcctggtgagatacagtaacacagtggaaaaagcatggggtaggagcaagacaaatgtaggcttcaatttctactcagtcatttacttgcagtgtgagcttaggcaagtaatgggattataccacccaactc

SEQ ID NO: 111327 - DNA, 337 bp, Homo sapiens
tgctggtctttcgtgcctggctggcttcacttaggctcatgtcctcaaggttcagccacattggagcgtgtcggtgcctccttcctttttgtggctgaatcatcttccgttgtgtggctggaccacgttgtgtttatgcactcattagctgatggacatttgggtcgtttccactttctggctattgtgagtcatgttgctctgaaggtccatgtacaggatttgtgtggacattcccatggccttaaactccgtttccacctggatgacttcagcccggacctctcccctagaccctgggcttgtcttccggcccgttgagtttctgcatttgagt

SEQ ID NO: 111328 - DNA, 441 bp, Homo sapiens
ccaaaaaaaaaaaaaaaaaagagcatatcctatgtgattccattttgataaaattctttatgatgcaaattgatgtaaggcatcagaaaacagatcagttgtgttggagtggggagtagaagcctgaaagtgcagaggatagggattactaagggcacaaggcaactttgtgaacaatcaacaaatattcactctcttgattgtggtaatgattgaacagatgtgtacattatcaaattatatactttatatgcatagttaattatatattaattatgcctcattaaagatggggacaggaagctacttacttaaatgcttattatagtctcagttactcaggaggctgaggcaggaggatcacttgagtccgggagttcaaggctgcagtacactatgatagtgcctgtgaatagccactgcactccagcttgggtaaca

SEQ ID NO: 111329 - DNA, 206 bp, Homo sapiens
ggcaatcagatcagtggggaaatgaattctttaataaattgtgttaggacaattcattgtggggagcagatccctacttcaccccatacactgaaaataaatagcagatggattaaataactgattgttttaaaaaatgtgtaagaaggccaaagaaatgtctaagagaattctttcaaaatcttagaatgaggaaaaccttctga

SEQ ID NO: 111330 - DNA, 303 bp, Homo sapiens
ggtaagtggtagaatggatcaactcttatcgtcagaccaggtattacatggaattgtgggcacccgccctcttgctcatggcatctcctagaactgttctggaagcaacaacacctagaaaactaaaccttcatttactgtgaacatcttctgactgtggcttccagatgctagtttacagaacaaccacacagcaagaccaagcttatgctgagttgacggaacaatgagtaaacataaggatattactgtgtctttgaaattctgaaagtgttctttcttaacttgcgcattaaaatcaca

SEQ ID NO: 111331 - DNA, 365 bp, Homo sapiens
tacaaagagttttccaactcttcctctaccttctaacactgaattggaaattgtgccctaaggctcactcctgcaagagagggcagataagtgataattggggctttaacaccagaggagctgaactgcctcacagtaattattcacctgaaaggaaggaggtttgaccagcaatctctaacatcttttctggtccaaaacctgtgattataaaaaaagcacttaattggatattgttttatattatgttccagatatctcgattttcccaactaccctgtaaactcctagaggccaggggccatatcttatagacctcatgtagcttctataataattagcataatgctagacacctaggagat

SEQ ID NO: 111332 - DNA, 785 bp, Homo sapiens
cacggctggggcaacccaacccgcgcctgaagcggcttggcttgacctgcggaagcgcgggccgggatggcgtggggagagggaggtaggtgccactgggctgcagatgacgagtgggttgggggcttgctgtgggacaagaggttcaggttccggcctgcgccttccactccgcggtggcgctctctgcctgcggttttccaggaggccgatctaccccagggacactctcatccttcaggcggtctcctggacgccctttcctccccttgcctcccagcctgacctggctctttcgcccctcggagaaccggtaggttggggtccctcggcgggggtctagtgagccgagtcgcgagctttgcgcccccggtatctaggccccgtgccgcgcgcaaatccgggcccaggcgtacagttctggagcctagtcgccgccagacacagggccctttgtacccggaggagcgggagcgggagcgggggcgtcagggcaacccttgcaccccagaggcctgcctaggaccaccctgggaacaaatgtctcgctcggaaaacgaggtgaacccggaggatgtcctacgcatcatacccctccccttcttgagaaggctttttctttttttctttttttttcccggtttccttttctctggcttcttccacaccttaccgcaggtgtgggcctcttttcatgtatgtgcggctgctatctcggggatgcaggggaaggcggtgtaggaggcagcgtggaagggtactaggaggtggcggcgggattttgg

SEQ ID NO: 111333 - DNA, 335 bp, Homo sapiens
ccctactggtgaacacttaggttcttcccagcattttgcggcaatgaacatactaaacagatgtgcttttgtgcacatgtgtgaagttctctagaggtaagtatatggaagtgaaatttctgggtcctagggtttgagcatcttcaccccaactagatattgccaaattgctttccaaagtcattgtacttgttcatgctcctactaacagtttctgagtgctatttctgcacatctccaacaggctggatgttgttcatgttcaacctgactcataatcggtgacatgtaatttaacacaccaatgaaacatattacatctatcagaagccaat

SEQ ID NO: 111334 - DNA, 231 bp, Homo sapiens
ctcttgacaaatatctggtagagaggaccaatgaaaccacgcagatcactgtcctgctttcctaaagtaagctcttccagaatttactttctggtctagagtccttcttcagatcctttgaatatttggcttttctccaaggattaggacttctcaatgctaattttggaagaagcacattaaagaaaaaaattggtgggaagataggagtgccaaaaccttgacatccat

SEQ ID NO: 111335 - DNA, 1700 bp, Homo sapiens
agaaattattctagatcattcgttgagtggcgcgtcactctataggtaagtgaacttggtcaatagactgtgtcctatgagatcctggtgttatgacatagatgcttggatgctcatcttattaaaataagcccggagggaccatgctgagcgtacttgatgcttaattcctacgcatggacgttctggaggtcatatatcgtcgcttctaatctatcaggagtccaacgccggaactcataatattacagattgtgactgctcccgctcgcgtggttagttgttcctatgtgtggcttggagccatggccacttggcttcctagattgtgtcccatgaattcaagcataaggagctcccagtctgctgcacctggcctcccttgtccttcacatccctgcagcatactgtagcaaactttcaagttagctttttattgcattccaccccctgccagggagcaaacttaaactcatgcaactcaaaatgaccatgctgggtctgttctaagtttgaatttggaccttgatccagccttcacatactttctcttatgaattcctcttaatgctagttaataaaaatataatggctttcatgtcccttctcataataacattgccagctttgggggttctttgaaaactttgcttgagaagtccatggcaaaaaaaaaacaaagatatttggctttaaaatatggtctttgcttaccaaactcctctctctgaggaagggagagaaagagttgaaggtttctgggaaaggggcatagaagcaactcttaactctggccatgtggatctgcagacaaaattagggcaaatgtagtgctacagatcccatccccgggcctcacattgtggccagccatatggagtcagatttggagactttttggagatggggaagccactggactcttaggcatctggtgtaaagagagactttttctttgctactttttttttttttttttgagatggagtcttgctcttttgcccaggctgcagggcactggcgtgatcttggcttactgcagcctccgcctcccaggttcaatagattctcctgcctcagactcctgagtagctgggattacaggcacctgctaccatgcctgactagtttttgtatttttagtagagacagggtttgaccatattggccaggttggtcttggactcctgacaagtgatccgccctcctcagactcccgaagtgctagggttacaggtgtgaaccaccatgcctaactatcgttgctactttctattggaagagaaggcagccctgatttagtctgtttacagtctgcattatgtggagaatagagagccatcatagtccctaaaactttccttgccagttaacccagcaggacaacctgtctttgtctcttgacaactgttaactgagaacagggcccttgctcctctaggtgtgcacattaaggactttgcacagtgtggatgtagctcatgctgctctgccgtctagtacatgctgcttgaattttcatcatcatcctccactccttccacctccaagaaaaaaaaaagcgtgcaggaagtagcatttcagatccttctccaccacctctgcttcccttctcccttcttttcctccttgcagcattccctttagtaccagggagggatggtggttgaaaatggggggaatgatgttgctcagaaaaa

SEQ ID NO: 111336 - DNA, 2731 bp, Homo sapiens
agcggagaaccttcaactgtcaagcaccgagctagccaccagcatgctgtactccccagggccgagtcttccggagtcagcagagagcctggatggatcacaggaggataagcctcggggctcatgtgcggagcccacttttactgatacgggaatggtggctcacataaacaacagccggctcaaggccaagggcgtgggccagcacgacaacgcccagaactttggtaaccagagctttgaggagctgcgagcagcctgtctaagaaagggggagctcttcgaggaccccttattccctgctgaacccagctcactgggcttcaaggacctgggccccaactccaaaaatgtgcagaacatctcctggcagcggcccaaggatatcataaacaaccctctattcatcatggatgggatttctccaacagacatctgccaggggatcctcggggactgctggctgctggctgccatcggctcccttaccacctgccccaaactgctataccgcgtggtgcccagaggacagagcttcaagaaaaactatgctggcatcttccattttcagatttggcagtttggacagtgggtgaacgtggtggtagatgaccggctgcccacaaagaatgacaagctggtgtttgtgcactcaaccgaacgcagtgagttctggagtgccctgctggagaaggcgtatgccaagctgagtgggtcctatgaagcattgtcagggggcagtaccatggagggccttgaggacttcacaggaggcgtggcccagagcttccaactccagaggccccctcagaacctgctcaggctccttaggaaggccgtggagcgatcctccctcatgggttgctccattgaagtcaccagtgatagtgaactggaatccatgactgacaagatgctggtgagagggcacgcttactctgtgactggccttcaggatgtccactacagaggcaaaatggaaacactgattcgggtccggaatccctggggccggattgagtggaatggagcttggagtgacagtgccagggagtgggaagaggtggcctcagacatccagatgcagctgctgcacaagacggaggacggggagttctggatgtcctaccaagatttcctgaacaacttcacgctcctggagatctgcaacctcacgcctgatacactctctggggactacaagagctactggcacaccaccttctacgagggcagctggcgcagaggcagctccgcagggggctgcaggaaccaccctggcacgttctggaccaacccccagtttaagatctctcttcctgagggggatgacccagaggatgacgcagagggcaatgttgtggtctgcacctgcctggtggccctaatgcagaagaactggcggcatgcacggcagcagggagcccagctgcagaccattggctttgtcctctacgcggtcccaaaagagtttcagaacattcaggatgtccacttgaagaaggaattcttcacgaagtatcaggaccacggcttctcagagatcttcaccaactcacgggaggtgagcagccaactccggctgcctccgggggaatatatcattattccctccacctttgagccacacagagatgctgacttcctgcttcgggtcttcaccgagaagcacagcgagtcatgggaattggatgaagtcaactatgctgagcaactccaagaggaaaaggtctctgaggatgacatggaccaggacttcctacatttgtttaagatagtggcaggagagggcaaggagataggggtgtatgagctccagaggctgctcaacaggatggccatcaaattcaaaagcttcaagaccaagggctttggcctggatgcttgccgctgcatgatcaacctcatggataaagatggctctggcaagctggggcttctagagttcaagatcctgtggaaaaaactcaagaaatggatggacatcttcagagagtgtgaccaggaccattcaggcaccttgaactcctatgagatgcgcctggttattgagaaagcaggcatcaagctgaacaacaaggtaatgcaggtcctggtggccaggtatgcagatgatgacctgatcatagactttgacagcttcatcagctgtttcctgaggctaaagaccatgttcacattctttctaaccatggaccccaagaatactggccatatttgcttgagcctggaacagtggctgcagatgaccatgtggggatagaggcgctgtaggagcctggtcatctctaccagcagcagcagcagcgaggttctagcccaggagggtggggtgcttcttgtagccctcagctctccggtctctgctgatgaaatgggctccaggtggcagtgcccgggtcccaggtgccgtgtttactgcagcagtgggacctccgtgcccactcccccagctcagaggctttctcttttttccccaacccggcttctgatggctggctttcccccaccatcgctctctcagagtatattttactaaagagtagttgatgcttccccagggtccccctggctggggaggccaagaatagggaagggacttgtagcccgtttcttaccctccatgcttgctgtcctgctcacacctacctgctgaccacccatcctggcacagcctctgttttcctccccatctgtggatactattctaataaatagcacatgccattgg

SEQ ID NO: 111337 - DNA, 151 bp, Homo sapiens
gtcttatttgctcttaacacataaaagcaactttgttttcttgcatttcttcacattgctatgcttgtcgtctcagggtgaatacaaatgccagatgacagataagaactttatagttaagtttctaagaccaagattgaaatttggagct

SEQ ID NO: 111338 - DNA, 340 bp, Homo sapiens
gagttaagagagcaaaggtttgggggactcccagggagccttatgtggtgagtcatcaatggagtacagcaggaggtgaccagagccgttcctgagggaactaaggttcacagagaaggttgctgtttaaggtcacaggtctaggaactgacaaagctggagtttgacccaagtctttggactccaggtccaacatactaaaactgcctcaaataactattttattcttgccatttgatttacagtaatatttctgaaagtgtaactaaaggaatagcagcattggaccctctggtcagcttgttgaaaatcaagattcctgagtcccacttcagatata

SEQ ID NO: 111339 - DNA, 397 bp, Homo sapiens
tgatactcatcatgtacttgtagactaatgggtgcaaaatacagattctaccctcaaaaagtgcaaccttgagatagggtgatgtttcagatccatcagtgcgaaatttaggaagtagaactggtatggtttggctctgtgttcccaccaaaatctcatgttgaattgtaatccccaatactggggaagggacctggtaggaggtgattggatcacaggggcagattccccccttgctgttctcatgatagtgagtgagttctcaccaaatctgatggtttaaaagtgtgtgacacttctcccttcgttcgctgtctttctcctgccgccatgtgaaggcatgcttgcttcccctttcctttctgccatgattgtaagtttcctgaggcctcccagc

SEQ ID NO: 111340 - DNA, 683 bp, Homo sapiens
gacacaactccatgttcctaaacttcatgtgttgctaaaatcttctcagatacaacttcatgttcctaaacttcctcttcccaggcataacttcatgttcgaaaactcttcccagacacaactccacagggttctgcacagattttctgactcgtgctgagggagacctgagtattcttcagctcagctgtctacaggagaagaaactgatgcaagcctttcctttttataagtaccctaaatattgattagtgactctgacagatgtcaacaaccaatttagtttggggagtttgagagagaaaaagaacatccaccaatcttgtctctcctgtacttctccccaggtcctttcattagttttcagtgggtgaaaggaaaagggtgattgttgtggtaggacttattctgccctttgatatgcacatgtgacagtttctgacctagattttagatgactcaatagagctggattactttgtacattgactcaactttgggctatatgaagagaacttatgtatattatacatgagatacaagtattattcgtgggacaacaaagggggaaatgacaactttttctgaagatatttaggaagacactatgattcctcccttacctacacccttgcttctcatagcactttgctcaaggttagagctcaacataagtttccttg

SEQ ID NO: 111341 - DNA, 409 bp, Homo sapiens
acccattagtagttaatccccataccccctcaccccctcactcaccccatctactgcccttcacaagaccctggcaaccactaatctgctttctgtctctatggatttgccaactcttgatgtttcatataaatggaatcacacaatatgtgaccttttatgtctggcttctttcacttaacatcatgtttttaaggttcatccatgttgtagcatggatcagtactttgttcctttttgtagctgagtaatattacattgtatgtatataccatattttgttgatgtactcattagttgactgtttttctaaatttttgaattatgaaaatatccattcaaaaattaaactttaaaaaatagaaacaaaatgaaaaagcccttctcataaaaaacagaaaaatgtaaa

SEQ ID NO: 111342 - DNA, 579 bp, Homo sapiens
agttggccagaccaactccatcaacagagcttgacagctaaggattcaaaattcacattctaagattttacaatgcagtcaactcagtccagacatttcaccatgcacaccttgcatttaagcacagcataggcgtaaatattcagaccattcaccattttcccacaaacaatataaactcaacccaataacctctttatgtgagatttcaatgtgtacagtgacaggcaccctcatatccatgaggggaatcaattaaaacagattaaatggcttcagctttgatttaataaccaattactggcaatcctcattgcaaatactaaatactcactccccataggacaggataatcctaaaattttaacaaagcttcagagggtctacacaacagagctttttactggaagctattagggtcttctagggcaccttcaaagagaaacataaagactcctggtatatccagcacaagaaagagattctagtgttctgtgaaactgaagcaaacacttggggtttcaacacagattatgaggaagcaaagaaatcctttctgaagtctctttggtattcagc

SEQ ID NO: 111343 - DNA, 825 bp, Homo sapiens
caccaggcatgtagagaaatcaacgtttttcagagtttgagctgatttgccaagttgctcttgtccttgtcttgcaggtgttttaagatgtgttgcttctcccgtgcgtgtcgtttgtgtcatttgtgtcactctcagtattgctctgaaggctttggagcagcctccaccttagcattgcaagcggtgtttatgcgcagtctgagttgtgcatgtggtgtctttaggagcatggacattgctcagttattaaggattagggctgctttcaagggcttttaggcatcagcagataagtacaataagacctgagtttactgtaattattgtttaattaaattttcaggtaaatttagggtttgccaggaagtcctgttggtttcaaactgttttctcaatgtgtgaattctttctggacccaccatgtgtgttggggacgttttcccagacacccagacacgcattctttgggggatgtcaaattgtaaagcatcccgcgaagatgttggaaatcatcttgtctccagctgctaggaaggaggacactgaggtcgggaagggatccagatctgcccagttgatccggccgggcagtgaggggcagggcctgagctggtgccatggcctcttcctcccgggacagccatcttgtcttgtggcactgcgtctcagggtgtgcctgcccaggggaggtgggtgggcgccacaggactgaccctgagggaatcctgtaaaccaggctttcctgtgggggtcagtataagcccattttgtgatctgtgggtcacagtgggatggggggtgcctactggcaagactgtggtt

SEQ ID NO: 111344 - DNA, 236 bp, Homo sapiens
ccatatcagacattttgtcagataatttccatatcttttagatagttttcaccttgattccttaaggtaagcagtagaaatattattatctcattgatagatgagaaaattgatacctactggctcaaaagtaagatactagaagaaccattatctcagcctcgtcttttgacatctaaacaatggactttttattatacagtgtgtcttactctcttacaacccacatgctattt

SEQ ID NO: 111345 - DNA, 455 bp, Homo sapiens
ctgggttcaagtgattctcgagcctcccgagtagctgagattacaggtgcgcaccaccatgcccagctaattttctgtatttttagtagagacggggtttcactgtgttgcccaggctggtctcaaactcctgggctcaagtgatccactcaacctcgccctcccaaagtgctgggattacaggcaagagccaccacacccgcccagctatggtgacttctaacagtgtgtgagctgtagatggttacttagtttatgaatggaagccacttgattctcccttaaatatagagctatatatgaccacatagtacccaaccatagtattttgttttggctgcctttctgttgtgcctccttgaaacatttttctttttacatgagtagctgccaacacaatcctccctccaattttcagatgaggctgtaggaaattacatgacacctccctcccc

SEQ ID NO: 111346 - DNA, 321 bp, Homo sapiens
agtcacccttgggagaggcagtgaatgggtggcttcagggaaaccatgctactccaaataaacacagagtcaattaaacatgtgcctttgatgtggaaagcccaggacctccacactactcttctgagtttaggtcagaggtaaagatgcagatggatgcctccttccctgaggaccctgcctataacagcagtgattgcaacggtcctttccccacggcccatgctgggctctggcaggcggtgttgcatgcttcctttgcaatgtggatccactacagcacacaggattaggatgggataaagtcttaaaaaccatgtc

SEQ ID NO: 111347 - DNA, 931 bp, Homo sapiens
gccaggccctgggagccccctccaggagctccgggcaagcagcccctcatggtccatggtggaactgcaccctcagcactggtgagggtgtcgcaggagcctgcgaggaaggtggggtctcagtgcttttgcacagggcgagtggagctggaaatgcagcccccagtggtttcagttattccagacatctcacaaatccttaaggaggaggctgtgtccctagagtcctgtagtcgagacatttgagaatttgggacccagttggaagtggttgcgtatttccattgtgtgggaatatgtaaaaggcccaagcctcaccaagaagggaagaccaggctgctctcatctcaagggccagttgcttcacacaccggagtgggcctaatgttcaaggagcttctttctccatttctccccacagtgcttaacgtctcaggccacgggctgccagcactcacctgccgaggccgccctgcggcctccctgttctgaggcccctgcctctccctgatgaaacttcctccgtgctaacttggcaagaaaaggcaaacgctgctgtgcttccctttgcccttgaaaagaatgaggtttaggggaggctctgcacagtcctgtgctgtccgggatagctgagcagaagctgttgaagccggcctgctggactgagcttggtccagcagcctatccacgtgagagccctggctatctggaggcacagggagctgctgggcctgcagcgtcccacctggagggaaagaacgcaccgccaaggaggcgtgggccctgcagcccgtgctgggccgcgaatctggtagccacgcttctccggcggaacgcggcgccccctggcggcagaacgcttgtggccgccgttacactcgtgtggaaacagcgccatctgccgaatgctccatctcattgctgattggcc

SEQ ID NO: 111348 - DNA, 634 bp, Homo sapiens
caagctgcaacaaatttgtaatgatcacagtggaaaccagcagcctgtcagccactggaaaggtagaatgttactggggctccttcaaaaccccatccccagggaatggtcattatttaacctgtctcataggtccctggaagaccccaattgcaaggttgtcattgtttgacttgagttggagctcatgcagtgaaaagagccttttctctatgggggtttattaaaaacaattagaggcaattgtttaacatcatggctgccggatgcaatcacctttgtaaagattatgacagcaaaagaagtctagcatagctgactccatcttgtttcaagcctcacaggctggctgtcctcacttattcctaggtgtgggtcaagctaaccatgggagacatttagtttatagtttaactttgcatcaaggatgataatagtacctccctaaaactgacctcctccttaaaactgaaaccacctttttaagactaatgaaaggccacaagattaggattatggtgaggggcagagctgatttctgctaaaatgtaggtacagttaaatgataaccagccatttgttccctagcttgcttttctataatgcattactgctcaagagtcatgtggccaga

SEQ ID NO: 111349 - DNA, 691 bp, Homo sapiens
cgcggtggctcacgcctataatcccagcactttgggaggccgaggcaggcggatcgagaccatcctgactaaaaaggtgaaaccccgtctctactaaaaatacaaaaaaaatagctgggtgtggcggtgggcacctgtagtcccagctattcgggaggctgaggcaggagaatggtgtgaacccgggaggtggagcttgcagtgagccgagatcacgccactgcactccagcctgggtgacagagcgagactccgtctcaaaaaaaagaaaacaataactaaaattcaccatatcaatagactaaagagaaaccatatgatgtcaataaatggagaaaaagcatttgacaaaattcaatatccattcatgagaaaaactcagcaaattaggaaggagagggaatgtctttaatctgataaaaagcatgtacacaaatgcctatagctcacatcataattaatggtgaaagactgaatgtttctgccctaagactgggaatgaggcaaggtagacatttctcaccactcatactcaatgttgtactggaggacctagttagtgctgtagagcaagaaaaaaaaaagaaataaaaagcacagattagaaagtaagtaaaactgtctctattcacagatgacgtgattttctacatagaaaatcccaagggattgaactcctcgactaatgaat

SEQ ID NO: 111350 - DNA, 413 bp, Homo sapiens
attaaatagaagtaaatggataaacattgggagaattttagaaattggagagttcatgttatcaaatagcatttccatactttaatgatatgcaaggagcaggactgttcagaaatgaccctggtgttgactgagactagggctctctcctcccagcaagatgcagcacccaaactgaacttcccataagactggtagtgcttcctacctctggcacagaaaactgtaatttcccatagattccagatgctgaacagctggtgttatgtaaagagctagcatcaagtctatactctgtctggtgcctttttcctgaaaaagttctttccctgattgccctctaagaaggaggaacaacaagtgggtagggtcttttcattgaatctccgacccatactgtgtgtccacagagc

SEQ ID NO: 111351 - DNA, 243 bp, Homo sapiens
ctatatgcttcctaacaagaccagaacaactgactcctccacccactccaagtacccactaggcttgcaccataactagcttgcaccataacggaagttcttatcctaaggaagtaatcagtcagaccaaagagctgaatttaagaatggtcagatagatacagaggttgaaatatgtcaagaaaaatctctctttctaatgtttctttccattttccaacatgggggtttcatcctcaagag

SEQ ID NO: 111352 - DNA, 491 bp, Homo sapiens
tgcagccaggcagccaagtgcaggtgtctcgggaggtggcgggggacattctttggtctcaggggccacactggtggccacaggccttatgatggccccgcagatgcagcagtggagaaagatcccgccgaagacaaggaaggtacccctccagcccaggttctccagaaggtattctgagagcagagggaatggtccgaagttggagatggattcgtcagtggtagagattgctgagggccagtgagttccagtggggtgaggagagtcttgtaggaaagtagtcggagagagaagtgtggggctaggggaggctctgtctgcatggattttagatgggaatactgagagggcagcgcccataaaggggaagagaggagagatcttttgtaaaatgcgtattcagggccaaagatgtgccaaggagaggcaggtgatgggcagtgaataagagatgccaacttgccttggtgagaggaatgttacctatg

SEQ ID NO: 111353 - DNA, 139 bp, Homo sapiens
gtgggcaacacggcgaaggacacacagctgggaaagagcaaaagtgaactctgagtccagctcagtgagactccgctgcctggggctctcctgttcttactgaggttgagggaccaagggatgtcccagccagaacctt

SEQ ID NO: 111354 - DNA, 317 bp, Homo sapiens
tatatataggcctgagccactactcctggccccaagaattattttctctgatttgattaaatccctaactctgagtgtgtttgctggtctggcctggttagaggaaagtttcctgactcaatctgggactttgagaataagtggctgacattagtagctttttgccctagtgtatcttctgtgaccttcaagtatttggtacctattaagatgaaggatatatggaaacgttttagaagatacctgttcctgccctcatagacaaagtctagataaatttcataccgatgacacatccaaataacacagttacacat

SEQ ID NO: 111355 - DNA, 316 bp, Homo sapiens
ctattaacagtcattcccaattgcctccctccccatctcctagaaaccatttatctcttttctatctctatggatttcctgttctaaacatttcatataagtgggatcatacaatatgtgatctttcgtggcttctttcactcagcataatgtttttaaggtttatccatgttgcagcatgaatctgtacttcactccttcttgtggctgaattgtatggatggaccacatactggtttttgtttttgttttgttttgttttttgagacaaagtttcgctcttattgaccaggttggagtgcaatggcatgatctc

SEQ ID NO: 111356 - DNA, 323 bp, Homo sapiens
tactgcttcattgggtttaagttcctataacaggtaagtgtattgcaaagaactctagaaaacctttcaatcaaggatatatttcaagttattattcttaaatgtataataaggataatgattagtacgtgtaccctcactactagtcacattattaggtggtttaatgaggtggaaatgtattgagattaataatgcatatgtgattattttaaagaccttactgctcattgtactactgtattaaagcttaatgcaaaacaaaaggcactgtctattttatattgggacacaatcatctgtaagatttggaatatgggtga

SEQ ID NO: 111357 - DNA, 576 bp, Homo sapiens
gggttgagaactaagtcaaatggctaaatatgtacatatattcttttaaaaaacatattttcaccccccataactacagatacactgcttttccccttagaccacaaggggctgctgctgttcatatcggattttgcttcccttagaaacttgtgtaccccaattaactctatctttagtctctttttttttttttgcccccagatcttttaaaatatagctggaaagaagaaaaagaggcttagttagtatcttaataatcagcataaaaatgtattattgtaaatgttttctataatacattccaaggcatttatatttctctacatcaacttaaagcttgtagtcattgaaggcaaattgtgaataataactttttatttcctgttttagtgtatgaataacattcagaatcataccattgtagagatatagtatggagatgaggttaaaaatgcagtccgaggctgggttgcagtggctcacgcctgtaatcccagcactttgggaggccaaatgggcagattgcctgaggtcaggagttcgagaccagcctggccaacatggtgaaaccct

SEQ ID NO: 111358 - DNA, 767 bp, Homo sapiens
ggctctaaataactaatgacacacatttaaatcagttatggtgtagctgctgcaattcctgtgaatacccgaaacctgctgttataactcagagtccatatttgttattgcagtgcaactaaagagcatctatgtgccttcatcaagaagcccatgttttgagattttgctcatgaaccatctgcaacttgcttcatcataagaataatttataacttgaccttcaaagagattagagcatttgtttcatcttacagttggagttcaatgtaacattttaaatgcaatttattatttcagaaatttcccatgaaactaaaaatagaaaataagatatacaagttaattcggtacttggataaatcatttctgcattgttgttccagagaatttgctgagaaatcaaagccatggtcatctggtgatgaagagaaaagtttaatctaaatgatatgtgcatttcctcatttaaaaaatccaattggattattcttaatatatacatgtaatatgaaaattgagattgaagcactaattccaaaattatggctgaatatactaaataacagaaaagttacagataagaatttatttctactgaactctatagttagtgtaatataattcatatttttatgatattggcacactgagaaattcattttgtagagctatggataaggcttgtatgatttgcactattagtacagtatagttaagaaaggaaagctgaacaatataaaattattaacatatttccgaatatg

SEQ ID NO: 111359 - DNA, 354 bp, Homo sapiens
tgaactattgatacaggcaatgaaatgattacatctcaaaatcattatgctaagtgaaagaagccacacacgagagtaccgtctgcaagatatgtttccttttacataaaattctaggaaatccacactaatgtctagaaactgaaagtagttcagtggttcctgggtctggagacaggaaggaagaggagctggaggcagggattgcaaggctcccgaggaaactttgggggtgaagaatatattcattatcttgattgaggacggtttcataggcatatacatatgataaaacatcaagttatatgatttaatatgtacagtttattgtagctcaggtatatctcattaaag

SEQ ID NO: 111360 - DNA, 199 bp, Homo sapiens
aggacatggtaagagcacataaaagagtgtttcacctaactgaggtcaggaggtagtcaaggaaaacttcctcaaagtaatgaagtatatgccagaaggaaaacaaaaatccaatcacagagagcctgtacccaacccttactaggtccagtcagagcttctctcacatctctccctttttatcccatcctcactgata

SEQ ID NO: 111361 - DNA, 383 bp, Homo sapiens
attttatacaaggtgcctcacctgctgtaaccatagattcaaagttgctccatgaaagtaataaatgaaaaatggtgattttttagcatgtaaattttaggaaatttccccagttacgcttaatggcttgatttagtgtgtatgttatttttgaaaacatatgttgggatgtcacaaatggacttagcctacagagatttatattcaacttttgaccagagagttccattttaatgtgacactgagagtaaaaaactatcttttcctccttacctatttctcttcctacattctcggccaggaggaaggcactgctacacacccagtcttccccagcagagcctgagcagctctgttttccttctacttcccctcttctttca

SEQ ID NO: 111362 - DNA, 153 bp, Homo sapiens
tcagggttcgagaccagtctgaacctcatctctcttctgaaaaaaattgtttaaaaagaaaaaataataattagccaggcatggtggtatgtgcctgtagtcctagctactcaggcagctgaggtaggaagatcacctgagcatgggaggtca

SEQ ID NO: 111363 - DNA, 361 bp, Homo sapiens
gatgtacacctcctaactgaacaatgctggaccggctctttgagatgatagcaaagactatgaaacaaataaaactgaaattaataatggactccaggtagactcagcctgagagacattcctttcaaatctctcttgttcaaatgtggctaaaggttttgccactgacttctagctgctaatcacttccctccactgtgggacaagaccagcaaccgcaggacaccacatcccagcaccaacaagggacaatcaaaacctaacaatagaataattgatcagtgattctttcaaagaaagaccttggtaaaaaggggacaatgagaaagttatcagaattaaaatggagtcacttctgtta

SEQ ID NO: 111364 - DNA, 784 bp, Homo sapiens
ggttagagatttgatgggtaagaaagaacacctaacggtaatcctggagggaaaaaaataaagtgtttgctggagagaatgagttggattgctggacttcaatgtgtgtggattcagtttgtgacttaaaaatgaaaccagtctattgcttgtgtggcttttctcaaaatactgttattccattacctatctcttaccccaagagtagtcacattcttatttctggttattttaattcctggtggtatttttatgtgattaatgagatagtactttttaatttgatgatattctagaaacctggtaagtactatgtaccttgtcttaagttttggttacttaattggtaaaattatagcatgcaccattgaattacctaattcaaaatatattcttttattgtttgacatttgtcttgtttttctttaaaatgttatctttgtggagtaaacatttttctttatgctgtttagcatcttcatcagattagttcagggtattgctgaatgtggttgtttggaagtaaaatgctttagttttagttatatagattttaataagatactactttctatataatttatcaggtactttaggcattttaatttgcaaatttaggacaatttgctttaacgtttcttcacttttgtccattggatgtaatttccataaagtattcatttccctaagtaaaaaccaaaaccaaaccgacaactaatggtcactgaagaaagagtgattaaatgcttagattataatggtatttgcattttaatgttaccag

SEQ ID NO: 111365 - DNA, 541 bp, Homo sapiens
tgcctggcccacccatagtttcttcgtatgggaatgttgagtgattacaagggataggaggaaagaagttgagaagtaaaagattaggaaggactactaaagtaggtgttcaggaagagactcttctttctgtaacttctgagaatcgagctctgttgttttgtcgtttgttataaagcattagagtgcaggggtggcatttggcaggatcaacctggtatagggaagtgggcagcactgatcgtggtggtacagctctcccttgaaatctggacccaagctaatgttgtgcagctggctttgggcagggcctaacactgttcactgcatgttttgtctgaaaggaaggaatctcttctatttttcttcctatctagcattgatgtttatgatcgttcttttaaaatccgtattttccactcttcataaaaatgccacagggctgcctgacaaatttgcattaaggaattttgacataattagcacctggctttagttgtaaattatagtcagataaatatataaagagaaggagcattta

SEQ ID NO: 111366 - DNA, 325 bp, Homo sapiens
tggaattgcagtgaagtggtatagatcaagatttgagtatgtggagaatagcattccataaataaagacaatataagatgaatcacagatataagaaagtccaaacgtaacaatgactgtgactaaaggagaggaataggagaaaatgatccaaagatagagctagacaatgttacagctttgatgttagacaaaatctagactttattctagattgcttttgtaagcagtagagagttgttgatggttttggggtaaaaggttgatgcgatattatctatgctttagcaaattaggctggcaggatgtgtaaaatgggtttcag

SEQ ID NO: 111367 - DNA, 729 bp, Homo sapiens
aaatggattaatttctttggattcatgtgagaagtcctggctctgtcagctgatcttcaactagcatctttcaaagcatgactgatgggaaaatgaggactgccctcaaaagcttctccaagatcatgggaggctgccaattggaaggtaccagaaaccaacacaactaaattgctcagcaccctgaacctctttccccacccacactactgatttttcatatactttccagccttctattcatccgtctcttcagccaggcaggcaggcaggcaggcatcctcactgagtgcctcccaggtgccaggtctgtattgggctgaggaggtacaatggcaagttacacctaacccctggctccatggaggttacagtgcacacagcaactacctcctagtgggggtttagtacatatttgttaaataaataacatggaaacatatgaataactacaatatggatttataaaccatatctcctgtcctctccacttatacagattatttatatagagttgcaggatacatcagtagaaaaacctcactggctcttaaggttgtctgtttttctcattttttaaaggtaatgagtatgtagcaatttggaggtgggagcaaatacaatccaatagataacatttgcattttaaaaggcatctgaaataaataacatttaggcagaaaagacaacctaaacagatagcacatgaggaaaaaaatccaaataaat

SEQ ID NO: 111368 - DNA, 228 bp, Homo sapiens
ccgccccccgatgtttttaaggttacattggactagggtgatgcattgtaggggaaaaaaaggtagtattttaaatactagacctttgtatttttcccatcgtttgacaaaaccttgaacacaatgtgttcaagtcatttgttagtcctcaaagtaggttaaaggattctctttctttggaaaagtaagttttgtttctggggcccaaaaatagttgctaaaattttt

SEQ ID NO: 111369 - DNA, 360 bp, Homo sapiens
agttacctgcaatgcagggtagcaattttaattagtgtatgactataaataagggaggtagtacaggacaatggctaaggaggtgggttctagatcagactagccagatttcaaagatcagctgtaccacttactggctgtgtgaccttgggcaagttacttaacctctctgagcctggtttcctgatctgaaaaatggaattgtaaggtacttgtgaagattcagtaacgtagtgcctgcaaagtgttttgaaagtgcacccaatacatatcagctgtgcttattgtcagtgtgatttactaacattcttatttgagcctccttgctaaggactgggagaataaaacatggtcgtacct

SEQ ID NO: 111370 - DNA, 328 bp, Homo sapiens
ggcattttggaagggatgggcagatacccttatatggacaggtgtaatccatcctgtcaggcgctagaacactcaggtccctgagagtgtgacgctaaactgcagcggggaagaaaaatggtctgtcctctgatgctctccctggtcttccaggaaaagagatctaggcctgctgagaatggggaggaggagggggaggggaagagttaaaggcctcctttgtatcttgacctgatgggagaaaaatgacagaagccagttctcacagcagcggtggctgcagagcaacacagtccaggacagggagagaactgagtaggaaacatac

SEQ ID NO: 111371 - DNA, 402 bp, Homo sapiens
ccaacagccagattggaaaaccacataatttagaagacatcagacatttttttttttaggattctaagaagaatcttccctcagtggtgggtaagatttaatcctagaggttgggcacggtgattcacgcctgtaatcccagcactttgtgaggccaaggtgggtggctcacctgaagtcaggagttcaagaccagcctggccaatacggtgaaactccgtctctactaaaaacacaaaattagctaggtgtgatggcacacacttgtagtcccagctactcaggaggcagagacaggaggatcactagaacccaggaggtgaaggctgcagtgagctgagatcatgccactgctcttcagcctgggcaagacagagcaagactctgtctcaaaaaaaaaaa

SEQ ID NO: 111372 - DNA, 451 bp, Homo sapiens
cctgcatttatttgtttatttgggtctgagaagtccaaagtgaagctgtgagaaggggcgcctttgagttttaatacgggatgcaccatcatataaggacactttggtcaacagcagactgcgtatgtgacgttggtcccataagattataatgccatcttttgactgtaccttttccacgtgtaaacacacaaatactgaccatttcattactgtcgactgcagtactcggtacaggaccatgcggtacaggtgtgtagcccaggagtgacaggcgacaccctatcgcctaggtgtgggggaggcgagaccgtctgggtttgtgtaagtcaactccaagacgttcacacagtgacaaaatcgcctcgtcatgcatttctcagagtgtgtccctgtcgctaagcgatgtgtgactgtttatatctgtggtactttgtaggcgttgggggca

SEQ ID NO: 111373 - DNA, 241 bp, Homo sapiens
aagaaaagcaggacagagctttaaaattcttgtttgaaaatgatcatatgcccatatacctcactatgatgttctgtgagagtctaagatcagaaaagaatgaattaaaacagcccttaatcacaccctcggggatggtgtgaccatggttttattttaccctgctacattgtaaagtctgtattttaataagtagaattctatatacccatagccctctaacatggctgcatgaacacca

SEQ ID NO: 111374 - DNA, 391 bp, Homo sapiens
aaatcctgttatatatatttttaaagaacttaaaactttcacaaactcctcttgatcggaacaaaaataaattatactttcagtgtgctttacaagaatcaaaattcacaagatgcaagatttttcatgcttatttaatatagaaattaatcaaatttctataaacaaatgccatacaggacccatgattatattcttagaaattctctttttgataaatagaggagaagtgtagggtaagtgttggaaggtcccaagtgatagtctttctctgcttgcttaaatggtagagaaagttaaatactacttaaaaaatggtatcagctgttcctcaaatttatttttctctcatatacaagctgggtagtcatatactttaaaatgttccttg

SEQ ID NO: 111375 - DNA, 197 bp, Homo sapiens
ttttttgtatttttagtagagacggggttttgcagtattggccaggctggtcttgaactcctgacctcaggtgattcacctgcctcagcctcccgaagttctgggattacaaggcataagtcaccacgcctggcaaggcagatgctttctgggtcagtaagtaccatgtgaagaaaccccagagacttggaagtatg

SEQ ID NO: 111376 - DNA, 424 bp, Homo sapiens
ccagaaagacctgatcccagagtcccattctctgatatgtggtagtacctctgtgtggtctggagcaggtaacccactctctgagtttcttcagcttgttcatttcaaaaatgggaaaaacagtaagacctatgtcatagattgttaaacaagacaacatatataaggagcatagcacattgcttgaaggtgttgagaaatcctgcagtacagaggcctgtcagctctgttgaacccctttctcagtcctatttcaccaggtactacctgttaacatctcaggaacctagagagctttacagcacacatatttagaaacactgttgtagtacttactgttcaatttcctctgggttctggggcttctctggccaaattttttgactcctggctagttgtggagactccaaagtagtgatgattg

SEQ ID NO: 111377 - DNA, 686 bp, Homo sapiens
tccactccttaaagtgtcaaggtccttatgatttgggaccaagagagaaaacatgaggctgactcttcatataaaagtttgaggtaatatggcacatagcttaggattaaatttatacactaggtcaaaattcttgcccccccttaacagaccaaacaatacacacactcttgcatccacacaccagatataattttgctcaattctctaagtgcttcagggagtgttcccattactgcttgattctgggagctttccagtgtcagcagcctgaacaccaacatgagtgggcgatatcttcctccatgcttctggggaagcagtaagcatcctgaatcaaacctgaatatttagggttttttatttgtctttggcaaagctctaaaattccagatttgcaagttgtcggcccaggagccctggcacattatttgagataactcatcttctttgactcttctctgtagctcctgaccatgaaagtctgtagttaagtgcaacaaacacttatttatgggatatccatgccttattgtttaaatcttttataatgaggttataaaagctcctgattctgtagggtaaaatcactaatttggatttcttaagcagctttggatagcatatagagacgacaaaactgttgaatttacaaaagcgagggatgaaggaaaacacctgtctag

SEQ ID NO: 111378 - DNA, 552 bp, Homo sapiens
cttttccccaaggccagccataaaacctgaaaatattcctctaactttccccaaacctttctctgtaagagctggccataaagaaattatctgacctaccttgtgtggtagtagatcataagacccccattccagaaagagtcctgccccaaacccaggaggagggactgctgcacacagagatcgggaacaccctggacagacaggcattgctgagtttctctacctcagtctactagcattatgtcacagtctttgtccaattatatttctacatggctgtccactcttgattggacctaagcatacaagtggatagctgtatctttgggtcttcattgtgagggcttgtcatgtaaaaaaatttttaaaaatttaataaatttgttatgcttttcttttgttaacctgtcttttgttataggagtgtctaccgtgatccttacgatggggaagaaagggatcacctttctgcccctacagttccagccttcttcacttggtggaaagctccagagtgggtttgaaaccttttcctgtgggaattaagac

SEQ ID NO: 111379 - DNA, 302 bp, Homo sapiens
aaggatgtgtgggtatttgtataccttgtaaaaagagttgagctaaattatagctccccatttaaaaaacagtggtagtctaaagctgcagagtgcaaaattcagagattgccatagtaactctgcttttcccaggaagtaattgaaaaaaggcacattttataaaaatagaatattgatgttcatatctataaaggaattaatttactgactgatagaggggaaagaagaaagatgagccattgagctgcattttaatgtgattgcgattatccccagggtggcaagcagcttaaactcgt

SEQ ID NO: 111380 - DNA, 478 bp, Homo sapiens
ccagaggatcccgatagagcatacccctcaaaccttttaacccagtccgacacccagcagcgacttagacaattgcattagagcctctggaaaaccaagagtttaatcgtccagcctttacccctctcgggggcccagagatactaccacttcctaactttcccagaaacttgcccccaagcccttgaagtcccaagcctgctcctctgggtctccaggatcccaagcaccagacttgggctcttcttcaaaacccaaaggtccaattccccagcctctcccctccaatatccagggctctgtcctcctagggagcccaggcatggtgcttcccaggccctgggaaaacaaactggcttcttccagccttttggggatccagggatccaacctctcagactttacccactcccagcccccttcctcccttaggcccaggaatccgggtctccattcccaactcccttagccccagaag

SEQ ID NO: 111381 - DNA, 525 bp, Homo sapiens
gagcaatatatatgcttgggatgcaacagaaacacagagggagtttgcctaatcgctgaaaggactgaaagatgaaaatgacccagaaaggtttataagaagaggtggtagttaggcaaatactgttagttgtgtatttaatatttactcttgtccttattaacatgatggcaatttttattcagtgtggcaatatgctcagctgagagattatatttttcagcctaatgaacatatgactacggttttgactagtgagaggtaaatgggcattttgatgagttttccatgaaggctccttacagggagaaacagacagaactctttctttttcctttcctttcttcttccttcctacctggaatatgggtgtgatagctggagccccagcagccgtgttggatgataggtgagcttgagaataggatccaaggactaaggatggcaaagcaggaaaacataaggaatctgacttcctaatgatcatggtgcccataatacagttctagattgcctctcaactcc

SEQ ID NO: 111382 - DNA, 696 bp, Homo sapiens
taattagagttttcctgatactcagtttcagaatctgaatgcctctcatgtaaaagttgctgataaagcactcaaatatgaaattattatgaagcatacacatttttaagataaaatgtgacatgccataaattttttctttgaggagagctgcaaagggaacagtattaagatgcttttaatcttttgagagggaacgaatggaacattatttctccacatatatctagactgttgagtggatctggtacactgtcccctttgctgtgatatatttggctccatttcatttttgtgtggagctgaagaatgtggaagaagtggtaggaatgtgtaattcaggcacaccctacagactttctcagatttgccctctgaaggtttgctaaataatacatttaagtgataattgactaaatatggtagctgcctatttgttagagctgttggcagcccaagcaatattttcaagtcttttcaaggtaagcttagaggtgagagccaccttattaaaaatagcactgcatttaaaacagtcatgctaaccaactgaattgcttaaaatattagtggactggataaagcacttcaatcggatgcgctttaaacctgtgaaattctaaagggtttgatttcttctctttctaacatatcctaaattctgactgttttaacatgcctttgattgtgggtggg

SEQ ID NO: 111383 - DNA, 365 bp, Homo sapiens
atttaatttacatttaaatttaaaaactgaggtattatgaaaagttttaggccagctgtgagagttagccaactacagactaagagagcatagtctccaagatcacccctcactctgctgtcacctacaagttcaggaaattcccaaaaccggttcagtttgataaatagctagaaggattcacaaaattcactgaaagctaatatactcccggtttggtttaatacaggtaaaggatacagattaaaatcagccagggaaggaagtgcagagtccaggagaagtacgaaatgcagaacttttgttgtcctttccatgtggatacaagatatgttacactcctggtattgatgtgttacattgtg

SEQ ID NO: 111384 - DNA, 321 bp, Homo sapiens
aaaactatgacaagaaaacgattgtccaggcccagttagggagaggcctttagaagcatggagtggaccagtaaccctgtcttacaagtgattgacggagaagttttcttgttcatgaatgaaggctatgagcatttttagtgaagtaagtgtcttttgaaactttctttatctagaaggaatacaggtgatagtatgcctctctttgaaattggtgtcattgctactttattagtcaatcagttgatagtgctgcagttttggcatatctgatgcataccatctgaatgaaaggcatttaattagggttttaatatctct

SEQ ID NO: 111385 - DNA, 306 bp, Homo sapiens
ggagcttgaagacactccacaaatttgatggcttgtatgtgtggttgctatataggtacagatgttatgcagagagcagcagtgaggtgaatggggtgagaattcgtatccccattttatagatgaggaaactgaggctcagagagtttcttctgtagctttctcaaacagtcctccgatttgtctctgtgtattcacttgggaaaagttcttgtgtggggtgacctttgggtcccacgtcattattccgcaaagaaaagggaaaggctgtgaggtttttcatgtaggtaaccctggcaaggaagg

SEQ ID NO: 111386 - DNA, 1455 bp, Homo sapiens
  misc_feature (1455)..(1455): n is a, c, g, or t
aggggcccaggccccgccgtcgcgccagccccgcggccccagcgggccgggcactcgcaaccgcgctcgggcggcggacgctcgcgccggctcaccatgcactgccacgccgagctgaggctgagctcgcccggccagctcaaagcagccaggcggcgctacaagactttcatgatcgacgagatcctctccaaggagacctgcgattactttgagaaactttccctctactccgtgtgcccgtcgctggtcgtgcgacccaagcccctgcattcctgtacgggctccccttccctgcgggcatatccgctcctctcggtgatcacccgccagcccactgtcatctcccacctggtccctgccaccccgggaatcgcccaggcactgtcctgccaccaggtcaccgaggcggtctctgctgaggccccagggggcgaggccctagccagcagcgagtcagagacggaacagcccacgccccgacagaagaagccccgccggagtcgcaccatcttcaccgagctgcagctcatgggcctggagaagaaattccagaagcagaagtatttgtcaaccccagacaggttggacttggctcagtctctgggactcactcagctgcaggtgaagacctggtatcagaatcgcaggatgaaatggaagaaaatggttcttaaaggtggacaggaagcacccacaaaacccaaaggtcgccccaagaagaactccatccccacatcagaagagattgaagctgaagagaagatgaacagccaggcccagggtcaggagcagctggagccctctcaggggcaggaggagctctgtgaagcacaggaaccgaaagcacgtgatgtccccttagagatggcagagccaccagacccgccccaggagttgccaataccctcttcggaacccccaccattaagctaaagtaaaacccttttgagggaagagggagactggggagaagggaaaagagagaaggcagggagagtagggagagaaaaccttccagcagcccagtaaactgcgggcgaagagatctacccgtctccctccctcccacagttaccattggccttgtcatcgcaagcatttgacaaagacttgcttgtcttgggcctgtcacctcctgaaaggctgctttagctgtggatgcccttgattaagggagagagcgcctaggagctgcctgccccagctggggtgacggctgtagggctgggtctatgttgcaagccctatatcctagcatgcagtggaaagtgcttagctctctccctcctgacctctgggcagccagtcatcaaagcagagagacgtggcggcatgtgggcagcatgcccaggttccttgctgactcagcacttatttctgtagttttaaaaaagaatttaatgtttttggttgtatttttttgggggggtgagggtgggcaaaaacatgggn

SEQ ID NO: 111387 - DNA, 2148 bp, Homo sapiens
  misc_feature (1809)..(1809): n is a, c, g, or t
tcttaggcaactcacttaaccttcctggggcaatttactccctctgagatgagaaagttgaattaaataatccgaaagcatcctgtcaagctctgaaaaatgctatgcttcaaggtacacagacttctcaggaagaattcatagctacaagcatgtctttttataaagaccacaggtggttctcaggaagtttgcatattacaaatctatttcgggtttctgaaatatgtgtctctagcttttcctgactacttcttttcatctgcctggtcccatggaccaagaatttagggattccgaagggagagaggggaaagatctgcttaaaaccagaggacttgcaggaacctcttctgggccgtgggcttcatcttcccacaccgagcagagcagacctctgtgcctgccctgcagctgtaggtcttgagttacctctccttccccttcctccatctgtacctccttaagagcagggccctccctgtcagacagacctcagccagcggccctccgcaggtcctggcctgcttccccacaccgttccctgtggtgacctgcctccctgcttgttttccaggctccccttccctgcgggcatatccgctcctctcggtgatcacccgccagcccactgtcatctcccacctggtccctgccaccccgggaatcgcccaggcactgtcctgccaccaggtcaccgaggcggtctctgctgaggccccagggggcgaggccctagccagcagcgagtcagagacggaacagcccacgccccgacagaagaagccccgccggagtcgcaccatcttcaccgagctgcagctcatgggcctggagaagaaattccagaagcagaagtatttgtcaaccccagacaggtgaggacgcagggaagggactctccgcagtgaaggcccctgggaacgggagacttgctcccattgtgggccgtggagccacagcactggtacagtgaggcaggacactatggcggagtccactccttggctcaaatcatctcaaccttggttaacagaacccagcccacatgaatccaccacacggtccctggagcctgcctgcggctaaacttaactcaccactttatctccatatttgaacttaactatttcagtatcataaacaaggtccagtttagcaaatggttgctcaggcggtcagctgggaaacaggcttggtttttaagccactcactcttaggattggaggcagcaggactagatttggaattgggattcatgatcttctcaatcttctccacagcctccagctgattccccactgactcagtttgctggcctggctattgcttgggaaggactggagggatccagttgaggaggtcagacatgttagtgaatttgctggatgtcaagtcagaaccatttgactgagacccaggaggacctggctgagagccccttctttgaacccctctgagatccatgttggggaggctgtgacccttgctttcttggaggcctcaatgcctcacctccttttctttaatttactattttaactgaaacatatgccagagtgtgtgtctgggccgggtattgtggcccacacctgtaatctcagcagtttgggagactgaggcagtaggatcgtttgaggctaggagtttgagagcagcctgggcaacgttgtgagaccccgtctctacaaaaattaaaatatgagccaggtgtgatggcatgcacctgtagtcccagccactcaagaggctaagatgggaggatcacttgaacccaggactttgagactgcagtgaggtatgattgnatcagattgcatcgctgcactctaggcgagaccctgtctccttaaaaaaaaaaaaaaaatagccgggtgtgttggctcacgcctgtaatcccagcactttgggaggccgaggcaggtggatcacgaggtcaggagttcaggaccagcctggccaagatggtgaaaccgcgtctctactaaaaatacaaaaattagctgggtgtagtggcaggtacttgtaatcccagctacttgggaggctgagacagagaattgcttgaacccaggaggtggaggttgcagtgagccaaaatcatgccactacactccagcctgggcaacagagcgagactcagtctc

SEQ ID NO: 111388 - DNA, 242 bp, Homo sapiens
ataaattcacacatttacagccaactaattttggacaaaggcactaagattatacaataaagcacagttctttaataagtggtattgggtaaactagatgtccacatgaagaagaatgaaattagacctttctctctcatcataaacaaaaatcaactcaaagtggattaatgacttaaatgtaaaaccagaaattataaaactacttgaagaaaatataggggaaaagttccataacattg

SEQ ID NO: 111389 - DNA, 487 bp, Homo sapiens
atctaccagaataaatccaaagtctgcccgtgcatggcttacaaagtcctttgctctctggtcaccttgctgacttctctcactgcctcccctcgctccctttatttttatttatttatttatttatttattgagacggagtctcgctctgtcgcccaggctggagtgcagtggtacaatctcggctcactgcagtctccatcttctgggttcaagtgattctcctgcctcagcctcccgagtagctgggattacaggcacccaccaccatgcccagctaatttttgcatctttagtagagatgggtttcaccatgttggctaggctggttttgaactcctgacctcaggtgatccacctgcctcggccacctaaagtgccggaattataggcgtgagccaccgcacctgccctcactccctttattaaagccacagggcctcatggctgttcttcctgcagcccaggacctctgcactccgcctcc

SEQ ID NO: 111390 - DNA, 316 bp, Homo sapiens
tagccataactccaggacttcatattcctatgacagcctccagctcccactgcccaggccctgcctctggccagggtttcctagttcctgctcattgccaccaggtcaattttctcaaatcaccaatttgcacacaggactctcaacaaatcaagctccacaggccttgtctgtgaatctcacactcctcacatgtggctcccgtagcatctgcccatggtccaggaccctcaaccctgagctggccagacaggccttcggcacaaagcttgtctcatgtatggccacggtgattcctgatgtgtgtgtgtctctg

SEQ ID NO: 111391 - DNA, 555 bp, Homo sapiens
accagtatttctaataatatgaggatagctacagttgtttgtctgacctgtttcatcaggatctatctaattagctgactgagggaataaagctctgagtactttaatctcaataactatgttctttggttagctccatggccaagaatctgatattctctcccttgcaatctgttgatttagattcagtagccctattttcagcagaagcctgacaatgttttctgtgaattgtttattttttacaatttcaacttttattttggacacagggggtacatgtgcaggtttgttacagggtatatagtgtgatgctgaagcttgggatacaaatgatcccatcacccaaatagtgagcatagtacccaataatttttcaactcctacccctctttctctttccccatctctattagtccctagtatctattgctcacacctttatgttcataagtacctaatgtttagctcccgcttataagtgagaacatgcagtatttggttttctgtttctgcattaatttgcttagaataatggcctccagctgcatccat

SEQ ID NO: 111392 - DNA, 383 bp, Homo sapiens
ctcgcctgctgcggggcgccctcccagcccccatcacgggcccaccgcctgacactcgcctgctgcggggtgcccacccggcccccatcacggccaccatctctgctcaccaagaagccagtttcccaaatccatgggcaacggtgcctgctgtccagacacacacagggcaatcgaccatccaaacaccggaagtccccagctcagtggcacggctctggaggagagcttggagtgcgattttcacacagcaaaaggcgatatgaaaattgctctgcagtccccgaacaaacaccaagtgtgtctgtgtctgtccctgccagctcccagcaagagccaggagccagcctgctgggacagatcccactgacaggtacggtggg

SEQ ID NO: 111393 - DNA, 210 bp, Homo sapiens
cgagctgatcacctgaggtcaggagttcgagaccagcctgctcaacatggcgaaacccacttcaacttcttttctttctgtaattagaaaactattccattttcattaggttattttacaaaccacataaggaatttttttttttttcagacagtctcgctctgtcacccaggctagcatgcactggcatggtctcggctcgctgcaacc

SEQ ID NO: 111394 - DNA, 244 bp, Homo sapiens
ctgctttcaggtttaaggcagacactatgtatattttttcattgcctactacttacacatgatggtggggtgatgttacttgtaacaaatttctgggaaataaggaactaagtgtaaaaatagcattagctttacttgtattttctataaacaggatggaaatttaaagtactgtagatgtgcacattttttagaagaagcaagttcctggaaaccctgttcagatttggcttgtgaatcatag

SEQ ID NO: 111395 - DNA, 346 bp, Homo sapiens
gatgagacactacccgctttccaagactgctgtccccctgcagtcaagtatgactggcaccaaatccttgggttcagcagctgagcatcttgctattactccttccactggccaagggaaccacagaagagtccattcctcacccacaagacaggactagggatatctgagggtaaggctcacagtcctcttcactctctgcctccaagctgggcatgctccaatctgtcaagcatgatagaggattcaggtcattttcgggccaccttgctaaccctcctccagacacatcccagtgagtctgtctgggttattcagtcagtcaacaaacacacactacagtctg

SEQ ID NO: 111396 - DNA, 731 bp, Homo sapiens
gtttgggtttcttcgcggctgctcaagatgaaccgactcttcgggaaagcgaaacccaggctccgccgcccagcctgactgactgcattggcacggtggacagtagagcagaatccattgacaagaagatttctcgattggatgctgagctagtgaagtataaggatcagatcaagaagatgagagagggtcctgcaaagaatatggtcaagcagaaagccttgcgagttttaaagcaaaagaggatgtatgagcagcagcgggacaatcttgcccaacagtcattcaacatggaacaagccaattataccatccagtctttgaaggacaccaagaccacggttgatgctatgaaactgggagtaaaggaaatgaagaaggcatacaagcaagtgaagatcgaccagattgaggatttacaagaccagctagaggatatgatggaagatgcaaatgaaatccaagaagcactgagtcgcagttatggcaccccagaactggatgaagatgatttagaaagcagagttggatgcactaggtgatgagcttctggctgatgaagacagttcttatttggatgaggcagcatctgcacctgcaattccagaaggtgttcccactgatacaaaaaacaggatggagttctggtggatgaatttggattgccacagatccctgcttcatagatttgcatcattcaagcatatcttgtaaaacaaacacatattatg

SEQ ID NO: 111397 - DNA, 570 bp, Homo sapiens
attaaatcttttaaccgaatccatttcctctagcatagagaccattgagcttcagatgactgtgcaacaaggtttcagccagttccaggtgaaggcaccacccctggccatcaggaagccaccctgcctccactagacagagtaaggacagatgggaaactggctgttctaacaacaaatcagactgattgcgggttaaatattcatttgcaactttgtaacttcactccacaacctatcagactgactgcaggccgagtcttcgtttgcatggaagtagaactttgtaatttcatcctagcctctgattggttgctttgtgcaaccaatcagatgtttgcacaggagtgtgacctttgtaacttcacttcagcctgtggttcatgctgtccgcatccaatctgagacatgaggtgaacataaagtggccaataggaaacttctagggggtatttggacccaagaagattctgtatccgagcccttgagcccctgcttgggtctgctcccacacagcggagtgtacttttgttttcaataaatccctgcttttgtccttttgttgcttca

SEQ ID NO: 111398 - DNA, 159 bp, Homo sapiens
tgttctgacctccgtgacgtttattaccagctgatgtcccgtacactgatttcacggtgtcacccgcaccagaatgtaagctccttaaggacagggggccgggcattgtggctcagggcctgtcatcccagcactttgggaggctggggcgggctgatc

SEQ ID NO: 111399 - DNA, 274 bp, Homo sapiens
gcagaaagaaaatacattttattaagtgggcgtttttccaaagcatgttccccctgaaggagaatcataccttcagcatttcaaagatttctcaaatagcacaaaggtcaaaaagtttgagcaacagaaatgcagtgggtgaaatctccaagctattctttcagcagctgtggctggtgaagctgactccccggtaaagagatatcagctctgcttcagactagtcgataatgtaatcagaatagcacaaacctggaaaagacagagggggatc

SEQ ID NO: 111400 - DNA, 254 bp, Homo sapiens
tatgaatcaggcattctcttatgacaatagtcttctaaactgtttgtctcaggaggttttgggtgctgatgtgcactcaggcatggcccttctttattttaatccctttcccccaaggccttcagagatttaaagctactctcatgtaatagccctttgcaccacaggtcagtctcccactagagaaaacagcagcactcaagaggagtttgctccacaggtacttggagttgatatccatctccaactcagta

SEQ ID NO: 111401 - DNA, 190 bp, Homo sapiens
gagattgtgtccctggactccagactgggcaatagagcgagactatgtctccagaaaaaaaaaaaaaaaaaaaaaaaatttatatagaaaacagaaagcaaaactacctcttgatttgcttttcttgatcttgcatctcagaggtaacactgggaagggttgggttatacctctccccacctttttcttt

SEQ ID NO: 111402 - DNA, 356 bp, Homo sapiens
cagcctgaagcagcgggaattcacagtctaggctctggaggccggagtctcagatgaaggcgcaggcaagggccctcaggtgcggacgcctcctccctgccaggtgccttgcctgcctccctgtgctctgcacagcaatggccctgcaagtcttctgcatcagctttctcttctgcggactcctgctcctctgggtcagggcccacgcctgctgcttctgagagcccctgtttgttaaggatgctctctgaggtgctggggtcttcagtccattgttttttggggggcacagttcaacctgtaacggcccaaggggttcttcctgcccgctgcacacattcagaccgtggattgca

SEQ ID NO: 111403 - DNA, 214 bp, Homo sapiens
ctccatgttagccaggatggtctcgatctcctgacctcgtggtctgcctgcctcggcctcccaaaagtgctgggattacaggcgtgagcgaccatgcccggccaactttattcttttagatgtggatgtctagttgttccagaagtatctgttaaaaatgttactctttctccattggattattttggcaaccttataaacaatcaattgacca

SEQ ID NO: 111404 - DNA, 321 bp, Homo sapiens
taagagacagggtcgtccaggttagagtgcaatgacgtgatcatagctcactcactgtaacactgaactcctgggctcaagcaatcctcctgcctcagcttcccaagtagttaacactagaggcacaaaccaccatgcctcactaatattttttatttttttattttttggagagacagggtctcactttgttgcccaggttggtctctaactcctggccttaagtctaaaatcatcctacctcagcctccccaaagtgctgggattacaggtgtgaaccactgtatccagtctagaatacaatttttacaaaagccttgg

SEQ ID NO: 111405 - DNA, 577 bp, Homo sapiens
aaaccctgcctcctgttgtgggagctagttttcttttcttttttttccttttcattacacagtttcattttgacataacagtagattcacatgcaattttaataaattgtacagagaggtctcatgaatctgttacccacttccccctatggtaacattctgtgaaagcctagcctaatgtcacaatcagaatgttgacttcatacagaatcccttgtggtgcccttttataactacactcacttccctcctgcccccaccccttccttgacccttggcaatactagtctgttctccattcttacagttttgtcatttcaggaatgttctataaatggaattatgcagtgtgtaaccttttgtgattggctgttttcactcagcacagttccctggaaattcatccaagttattgtatgtgtatcagtgttgtttttttttactaagtaggtaaaacaagggacacagacctgttctcctggcatccctccctggttagcaagagattcagcaggccgctgccactctggccttgctgatagctagtgtgtgtgcaggcagcagctcccgctgtctg

SEQ ID NO: 111406 - DNA, 395 bp, Homo sapiens
taaacccacttatatcattataaacaatgagagtttcatttcccccctctctaatccttatattacatattagtttgcttgcttgcttgtttttgttttactacatcatcaagttgagacttgaaaagaatgttgttcctgggtaccttgttttgttttttttttaaaagagaaggcattcaatattttccaattagatataatatatgttatagatattttggtgtattttatatatggattttataatatagatttttaaatatattttttaacccatgataagggaattcttttctatttttaactttgcatgcaaatttcttaatgaaaatttactgaattttatcaatgcttttctgtatctactgcaatgctcatgtgatattttccac

SEQ ID NO: 111407 - DNA, 204 bp, Homo sapiens
acaaaaccccaaaacccataatgtacatgactggagaaaatttagagaaaaggatgagcaaaaggaaggaacaacatataacaatcccatgctgagaaaaaaactctgacaacattatggtatttgtctttctattgatcaaagtggaattttaatgtggtccccaaccatgctagcagaactggagcaaaagttgtcttattc

SEQ ID NO: 111408 - DNA, 287 bp, Homo sapiens
tcctgtccctggaggagattctggccgaggggactgacctggcggagacagccccgccccccttgtgcgccagccgcaacagcaaggccaaactgagggccctgagggaggccatgtatcacagcgctgagcatggctacgtggatgtcacaattgatatcaggagcataggcgtcccgtggactctgcacacgtggctggagtctttgcggatcgccttccagcagcaccgcaggcctctcatccagtgcttgttaaaggagtttaagaccattcaggaggaggaa

SEQ ID NO: 111409 - DNA, 632 bp, Homo sapiens
ctcgaacttaactacttaaaaacaaactaataatttttactctattgctactttgagttttattggatactgttttttaagttatttatttagcaatgagtccaggttttctctctgaatatttatgactttatagactttcagagacatttttctaagcttttatctctccagagtagttctcatgaaattttgtcctatttaaaatgaaatacacctaataattttaattgtctaaatgatttcctttttagctctcttgtgtttattaaatgtagttgagtatatgaagttttctagtttatgagtatataattgtatatgagaataagatatttttgtatggaacatgtattactttaaaaccttacacagaacatatgtctaatatttttacaaagaacttgagctttgtatatccccaaatctaattatcaaatttccaattgataatttagtaagactagattaacaaatagctgaaacatttgatatttcagctataattatcttaatgttttctctaaaatattaatatagaaattagataatttgcatcacttagaaatttcactggtgaaaattattgaaagataagtcaaattcatatacttcaaatattttgttgcttg

SEQ ID NO: 111410 - DNA, 504 bp, Homo sapiens
tgaagttgtaatgagattcaaggtgagtcagtttctatcttctccttctttctctttatctcctttcttccacccccacccccatttagagacatacacctctgcaacattggtctgttttatatgtgtgtatgtgtgtgtgtgtgtgtgtgtgtatgtataacaggaatattttatatatataaaaaatatttgtagtctgagtttgaaaattgtagaatatagaatttgaaaagcaccaaattttaagaatatttaacattataccagcagttaaaaaatatagctaaggaacatctttcagtatctgacatttcaggagtctgaaattgtgctactaaagtatcacagtcagaatgattctctttgccaacaaacttaaagtaaattcaaaaaggagggaaaaattgtgaagactcttgagtttatattaacaaagaagggcaaatttaggcaaggcaaggaaaagatacatatgaaagtcaaagattattactacatcag

SEQ ID NO: 111411 - DNA, 458 bp, Homo sapiens
  misc_feature (42)..(42): n is a, c, g, or t
aacatacataatttttttttaataggatctcgttctgtcacncaggctggaggacagtggtgcaatcatagctcactgtaaccttaaactcctgacctcaggtgatcctcccacctcagcctcccaaagtgctgggattacagacgtgagccaccgcatctgacctgtagatgaacctttctaaacagggcccgcactgggctgtgggacatcctgccttctgcaggtttggtggggcagatacctttctccaccctaggactgtatttgttttcaagtagtctggccaaagcaatattccctaaactttaggcattcttggatccctttatgagttttgctattttggcatgctacatgtaagttttgcttaatgtttttatgtaaagcatcttcctccttttacttcttttattgtgataaaactcatataaaattgaccgttttgaagtgtaaaa

SEQ ID NO: 111412 - DNA, 309 bp, Homo sapiens
ctgaagggtaggaagactttgcaaaggttatcataattcacattttttccttatttaaaaagaaaatcccaatgtgctgttggtagttttcctctttttcttctgaatctgattctgctttgacttgagttttgttggtagaacagttgcagatttgactcttacaagtcaaacatatgaccgtgtgattagtagacttcctcaggtgcacagtaggttattcaggccatcttacactcctaggactggtctccaggagaaacaaagtgagatacaaaaagaaaataaatctgtcgcattattaaattt

SEQ ID NO: 111413 - DNA, 588 bp, Homo sapiens
aggggacactttcccacaagcggggcaactgattcctcgtacgagaaaacacaaacaagacggttcccgggggctgccggggctcaaagtgagggtctgggaccaccagaacggtgtattcaatgcactgcgggcagccctgcagcgggcagggattgagtgaggggtggggcctgcctggctcctggcaagcacccgtctggcgggcggggcccagtgagcctcctccctttgccgggtcctcctgtagtggggcaggaacctctagcatcccacccttgctgccctttttctgccccgctcaccacccacatcaacttgtcaccagcaagggcatgggacaaagcaggacatgccccgggtggccagcgtgagctagctgtgcccaggagcattgcccatgctgtcccccaggcactgtcctgaagccctgctgggttctgagtcctccaggctccgcggccccttctcgccctgcccagagtctctggccaccaccgctgcttggggccctgcaccagcctgtgcgcccgcaaggttgccagggcccctctgcaggtgcagcgtgagctgtgtcctgggcccaca

SEQ ID NO: 111414 - DNA, 436 bp, Homo sapiens
tttttttacttacttttccctcgcttctatgccactctgctttgtggaacaacctttgtgtgtctggccattctagctgtgttctctggtaagaacagattcaaagtcctggctgggcatgctggctcatgcctgtaattccagtgctttgggaggttgaagtgggaggatcgcttgagcccaggagttggaagccagcctgggcaacacagcaagacctcatctctaccaaaaagaaaaatatactagccggacatactgccacatgtctgtggtcccagctaatcaggaggctgacagcggaggattgcttgagcccaggagttagagggtgcagtgagctatgatcatgccactgcagagggagttttaggggattccttatatgagtcagtcttagtatttagctacatcgtcggttacccagctactaaaa

SEQ ID NO: 111415 - DNA, 585 bp, Homo sapiens
accctttttctcttatagttagtgaagagagtagaatatctccagttttggctgacatctctacaacctgaacaattggcttaaacttcacttgggattcccggttgcttgttttagcatggcaaaatttggcgttcacagaatccttcttctggctatttctctgacaaagtgtctggagagtacaaaactgctggcagaccttaaaaaatgtggtgacttggaatgtgaagctttaataaacagagtctcagccatgagagattatagaggacctgactgccgatacctgaacttcactaagggagaagagatatctgtttatgttaaacttgcaggagaaagggaagatttgtgggcaggaagtaaaggaaaggagtttggatattttcccagagatgcagtccagattgaagaggtgttcatatctgaggaaattcagatgtcaacgaaagaatctgactttctttgtcttcttggagtaagttacacatttgacaatgaagatagtgaattaaacggtgattatggtgaaaatatatatccttatgaagaagataaagatgaaaaatctagtatatatga

SEQ ID NO: 111416 - DNA, 647 bp, Homo sapiens
gccagaccctaggccccggccagggagagcacgggctgcccaagtgctgcgcagatcccagcagtactccacagggctgtcagctcagcggcaactcctgggaggtccttgcttgaagggaggtttgagtggtgggcctcctggctgccaagaagaaagctacagtaaacgtgtgtgtaggctgcgcaggtctctatctgtggacagaggcattcaggcctcctgggggtatacctgagtgcaactgccaggtcacagagcagttatgtatttaaggttctcaggcaccgcctttccaaagcgattgtgccgtgttgcactccagtcacagggtggagttccagcagctgcgcgtcctcgctcatgctgatattgttgtattaatgtcccagggctgctgtaacaattgaccacaaacttggtggcttcacacaaatgtattgtcttgcagatctgtgggttagaagtccagcatgggctggaaccagtgtcagcagagccctcctttctggaggcttgaggtgaacccatgtccttgcatttcctagactctagggcctgtccacattttttggcttgtggccttattctaccatcttcaaagccagcaaccttgcatatgcggctgtccctccatccttccacct

SEQ ID NO: 111417 - DNA, 338 bp, Homo sapiens
gataaaatgccatttctacctcagtacttgataagaatcacacagtctagctggcctttgtgttttcactaaaaatatcctgaattatcagtcagttatgtttgactatgagaaattgcagaaaagttaaaagtatttcgcatccaaaagtttgtaatctagtgtaataaataggacagatactcaaagtgtatgaatggtatgacaataaatttagaaaatcatacaggcacacacactgctatagacatgtaaagatacatacatgtattggagctcagcagattcccattcatgaagaatggtgcctgtgtaacagtataaatggatcacttcta

SEQ ID NO: 111418 - DNA, 219 bp, Homo sapiens
aatacgaggaggagatctggctgcttattctaggtgcataacaatcacgttcactttagaagactgagactcttcagatcgatgcacttggtcttttcttctgggaaccttttggagcatttatcttgtaggtctcatgacgtttctggcaagctgtagcctcagagagaagaaatatggagctgacaaaaagaatgcagatgtgcagagagtatcagt

SEQ ID NO: 111419 - DNA, 1093 bp, Homo sapiens
  misc_feature (124)..(124): n is a, c, g, or t
cgtgggtgcaggctgcagtggctggcgccgtcctcgcccggccaggccatgaaggtagagtttgcaccgctcaacatccagctggcgcggcggctgcagacggtggccgtgctgcagtgggtcntttcttttcttacagggccgatgtccattggaatcactgtgatgctgatcatacacaactatttgttcctttacatcccttatttgatgtggctttactttgactggcataccccagagcgaggaggcaggagatccagctggatcaaaaattggactctttggaaacactttaaggactattttccaattcatcttatcaaaactcaagatttggatccaagtcacaactatatatttgggtttcacccccatggaataatggcagttggagcctttgggaatttttctgtaaattattctgacttcaaggacctgtttcctggctttacttcatatcttcacgtgctgccactttggttctggtgtcctgtctttcgagaatatgtgatgagtgttgggctggtttcagtttccaagaaaagtgtgtcctacatggtaagcaaggagggaggtggaaacatctctgtcattgtccttgggggtgcaaaagaatcactggatgctcatcctggaaagttcactctgttcatccgccagcggaaaggatttgttaaaattgctttgacccatggcgcctctctggtcccagtggtttcttttggtgaaaatgaactgtttaaacaaactgacaaccctgaaggatcatggattagaactgttcagaataaactgcagaagatcatggggtttgctttgcccctgtttcatgccaggggagtttttcagtacaattttggcctaatgacctataggaaagccatccacactgttgttggccgcccgatccctgttcgtcagactctgaacccgacccaggagcagattgaggagttacatcagacctatatggaggaacttaggaaattgtttgaggaacacaaaggaaagtatggcattccagagcacgagactcttgttttaaaatgacttgactataaaaaaaaattaaaaaataaaaataaatgac

SEQ ID NO: 111420 - DNA, 886 bp, Homo sapiens
  misc_feature (124)..(124): n is a, c, g, or t
cgtgggtgcaggctgcagtggctggcgccgtcctcgcccggccaggccatgaaggtagagtttgcaccgctcaacatccagctggcgcggcggctgcagacggtggccgtgctgcagtgggtcntttcttttcttacagggccgatgtccattggaatcactgtgatgctgatcatacacaactatttgttcctttacatcccttatttgatgtggctttactttgactggcataccccagagcgaggaggcaggagatccagctggatcaaaaattggactctttggaaacactttaaggactattttccaattcatcttatcaaaactcaagatttggatccaagtcacaactatatatttgggtttcacccccatggaataatggcagttggagcctttgggaatttttctgtaaattattctgacttcaaggacctgtttcctggctttacttcatatcttcacgtgctgccactttggttctggtgtcctgtctttcgagaatatgtgatgagtgttggtaagtgatggcagatcactgtttccacagtgctttggggtagcaggagcacacagaacattccctcccaggcccatgtgtgtttatggtctcttagagtaaaacctgttttatcctcatctggcacttcctatggtgtctgggtgtttcctgccctcccccactggactgtaagtggcagaaacacaaactgtgtcttcttttctgttccatcccaagtatccagcatggtgcctggaacatagaaatgttcaatgaatattaacacaatgatcaaataaagtaatgaatgcagtttgtgtattcagatgtagaaaaagaaatcagggatcaagtaagtgacaaatcacacccttggagagg

SEQ ID NO: 111421 - DNA, 462 bp, Homo sapiens
ggtttcaccatgttgcccaggctggttttgaactcctaagcttgagcaatcctcctgcctcggtctcccaaagtgctgggattaaaggtgtgatgtggctggccttattttgcttttgattgctttcgttcttttttctgctggtggacaaagggagtgcacaaagcactagggagagagcaggtcctcgtgtctaggatagcagtacctgaactatacttggagttacagcatcacccttctaagtaatcagtgatagtgacttaatgctgtgtgaaatagaattgatggtcagactaccagggtaaacctcaagattgtagggggattcctggggggtaggtgtaattggttgtcacctattaacaggacttttcctcaataaaagttgggtttctaggtcataaaaatattttacagaaatttgaagcagagaaaataaaataatgggtaaacttgaac

SEQ ID NO: 111422 - DNA, 602 bp, Homo sapiens
ttagcatcatctttctattcatactttgatcttcttggaaatagttgcttgcattatgtgctcaatcattatgaaaatatgaggatgttggaaacaagcaagtccagctagtgataattatggataaaaacagctgcaatttgcttttcaaaagctataagaacctggatgaaacagggtatgaaaaaactatatgttccaggagaaacaagtcattaagaaacctcacataattttattttaaattcatgacagaaagatttttttaatgagggaaattgttgaaatacctccagctaatacgcttttataaaattccaaattaatatttgcagaatattccaccattattccaaatgaaagtttggcagagtttttgaagtaccgtcttcaaatttgaataagaactctgtgaaggcgggaatcattttgtctcattgctcagtatgttgcctgatacgaagtcagtgctcaataaatatttgttggataaatttaatgaaaatatatgaatgagatttagcaatgaatgttttaagtaacccccattcctagtactgtctttcatacatggtgggcctttcttgagggaaatttagcag

SEQ ID NO: 111423 - DNA, 257 bp, Homo sapiens
ccacaatgggatgtcttcacaagtctggggtgaagacacagacccatggggcctttggactgcgggacgccttccttgcagacaggagccgggcctggccgctgccacatgtcctgacatctcatgagctgacgctgcccgtgattcttggcagcccatagagaccccatggtctctgggagcctgagatggtttgaagacagcagtcctgcttgtgtgcaaccagaaaccaacccataccctaagccctgccttat

SEQ ID NO: 111424 - DNA, 658 bp, Homo sapiens
cttagggccaactgttggtacatactattgtttggtatttccttgttttttgaaatgtggaggctcactctgttacctagctgagatcatgccactgcactccagcctgggcgacagagcgagactctgtctcagaaaaaaataagaaaaagaaaaaaaatatgaaagctagaactggaaacaacaaaatgtggaagttaggactagaaagcttctagaagcaaacatgggaaattaacactacaaacttggggtagacaaagatttcttacataaaatcaaaaaaggggccgagcacggtggctcatgcctgcagtcccagcactttgggaggtcaaggtgggtggatcacctgaggtcaagagttccagaccagcctgaccaatatggggaaaccccgtctctactaaaaatacaaaaatcagccgggcgtggtggcgcacacctgtagtcccagctactcaggaggctgagacaggagaatcgcttgaacctgggaggcagaggttgcagtgagccgagatcacaccactgcactccagcctgggtgacagagcaagactccgtctcaaaaggaaaaaaaaaaaggaattattggtgaattggacatcaccaaaaaacattgctaggaaaatggtaatacaggccacagactggg

SEQ ID NO: 111425 - DNA, 111 bp, Homo sapiens
gtttgtgttaaggtaattctcacatgtggataaaaactgattagtgccaaaagtttacaataaaatataacagtctcctatcctaccctgggttctccagaagcggcaact

SEQ ID NO: 111426 - DNA, 116 bp, Homo sapiens
atgattcaaggatggggacatattccaggaaattgcacaatcttcccctggcagcttcagaggacgagtgaaaatagtgcagtatagtcaaagaagcaatgaatttaggatgagga

SEQ ID NO: 111427 - DNA, 365 bp, Homo sapiens
taaagggttattttctttaaaaagaagacacaatgcagagaactagagtgaactgcattcaccttctgccccgttctggaaaagaggttgccacccctggtccggacaggtaaactgaagcacggggtggggagaaactgccgttcagtggtgacaaggacagcactggggacctggggggtgaggatccccgggacacagaggggcccagcctctggctccagcccgcttgatgacgtggtcccaaagaaagacaggagtcagctggcccggccctctcgcccacacacactggggcctgctgcaggcagggccggaggtccccaaggccagagcccaccgtccagtctcctgtggcgggagca

SEQ ID NO: 111428 - DNA, 488 bp, Homo sapiens
tcatcctgctcattgacactcttctcttgacctctctcattgctctctctgcttttcttccgcccatgtggccagttttgcccactcatcatgcagtccggttggtaatgctcagggttacaggttcaccttctccccctcttctcctttccctgtttctctcagatttgctctctctgtgtcttcccttctcccctttgcggaactcttttaccagtacccttcgcttctaacgtcacttatgtatgaacccaggcctgacccaagcccatataaaaggctgcaatacgttaaatgcagcatgacccaagctgaactctataccaccttttcattttttcctccaaacctccccttcttactgtctcattggatggtacctacattcatgcatttgaccaactcagagagtctatgactcagttctgtcccttcttccccattccctctatggctgccccattttctcccgcaactgtaatagcctc

SEQ ID NO: 111429 - DNA, 369 bp, Homo sapiens
ctgggccccgctgtacagttgcgcggatagacctactgcattgacacgaggcactctacgacatctgtttccgcaccctcaagctgaccacccctcacctacggggatcttcaaccacctggatgtcggccacctatgagcgtggtcaccatctgcctgacgacttcactcggtccagctgaactgccgacctgcgcaaactgaccgtcaacatggtcccctttcctcgtctccccttcttactgtctcattggatggtacctacattcatgcatttgaccaactcagagagtctatgactcagttctgtcccttcttccccattccctctatggctgccccattttctcccgcaactgtaatagcctc

SEQ ID NO: 111430 - DNA, 344 bp, Homo sapiens
ttcagagtcatcccctgcctaccgagatagatgcatatctgattgccttctttggaagggctaatcagaaactcaaaataatgcaaccatttttctcacctggaagcccccctccctactccaagttgtcccgcctttctggactgagccagtatacatcttgattgatgtctcaagtctccctaaaatgtataaaagcaagctgtgccccaaccaccttgggcacatgtcgtcaggacctcatgaggccgtgtcctgggcgtatgtcttcaaccttggcaaaataaactttctaaattaactgagacctgtctcagatattcggggttcacatttagaatgta

SEQ ID NO: 111431 - DNA, 445 bp, Homo sapiens
ctcccactgcctcccagccttttccacttgaacattcccaaggcattctaaacccaatgtgtgcaaaacccagcccagggtcttccctcattcccacactcagacttgttaggaataacattcaaaatcctaaggaaattgaacactcgaacaaaggagtcttagcaaagcaattttacttctgcgcagaggggtgcctccttggccagtcgccatgagagcacacctgaacaaaggggcacgagagcctttattcctgacacaagtcctgcccctgtaccctttccccattggctggggttgggtcgtacaatctaaatgaatcccggttggctaaacatttgatttttttagataaggtgggcatgtaaaagaaagcagagaagaaaggggaaggggtgtctgtaatgagctagaaagttagtcctctttccgaataaggaga

SEQ ID NO: 111432 - DNA, 296 bp, Homo sapiens
gaaagccttccctgactaccctgcccagcagtcccctctcacccaagggtgctaatcacaatcagacattcctgctgatctgtttgcctgttaactgcctggcccccacaacggacacaccatgaaagcaggggctgtcagcctgggaccccccacagctgaaccctggtaccctcatcagccttcccccgtggcccagtacacaccctcggaatgtgctcatgcaggccaggcgcagtggctcacacctgtaatcccagcactctgggaggcagaggcaggcggagcacttgagg

SEQ ID NO: 111433 - DNA, 216 bp, Homo sapiens
tcacttttaacaggagcaagaagagacagctcttccttatagtagaatttaaattatcaaagtgtaagaaatgatagaaggagaaaatcaccgctaggcaaacatcacagtaataattgttacaggtaaaaattatcaatgaatgttaaaactaatgcgtgagaaaacatgatgagaaataggattttggcatagtttcttttttttttttttttt

SEQ ID NO: 111434 - DNA, 181 bp, Homo sapiens
ccccagccaaactccacgtcattccactggttgatggcctgctgatgtgctctggacatcctctcagcatccagccacttgtgtgttcctctgctgatgtgtttctctcgacgtccagccgcttgtgtgcctgcctgctagggtcttgggggatttttataggcacaggatgggggtgtgg

SEQ ID NO: 111435 - DNA, 265 bp, Homo sapiens
ccgcaacctccacctcccgggttcaagtgattctcctgcctctgcctcccgagtagctgggattacaggcgtgtgccaccatgcccggctaattttgtatttttagtagagacagggtttctccatgttggtcacgctggtctcaaactcctaatctcaggtgatctgcccaactcagatcaaaagttttatgtgaattgactgcccaacctttgcattgttcaagggtccactgtgcttcaaatgggtcatctcacccacttca

SEQ ID NO: 111436 - DNA, 265 bp, Homo sapiens
aagcccatggtcctatagatgttcttaatattcagctctaacattcgaatatcctttagattgatagcatttaggggcatttagtttgagttcaatgaggttagaattacagaaaaaacataaaatttttactcactaatcaattcagaaactgcatattttagatccctctggagaattaattaaatattcagttattttgaaactgaattggtgaaggggtaatttgattaaataacacttttgctgtaagagacactctaaa

SEQ ID NO: 111437 - DNA, 304 bp, Homo sapiens
atgaactgtaccctccacatttgtgtgttgaagccctggcccccacctcagcacgggactgtgttttggaaacagggtctttgtggacactggggtgtcctgatccagcctgactggtgtctttgtaggcagagatgaggccacggacgcgcacagagggagcagcatgcgaggacccgaggaggagaagaccacctgcaggccaaggagaggggccatgggggaacccaccctgcctacgccctgatccccgacttccagcctccagaattgtgtgacaataaatgtctgttgtcgaaggccc

SEQ ID NO: 111438 - DNA, 406 bp, Homo sapiens
gtatggtgatgtgtgcctataatcccaggtacttgggaggctgagacaggagaattgcttgcaccaggaggcggaccaagtacatcaaggctgacagctcctggcgatgcgtggggtgtaccatatatagtgacgctgatgcagattatgcatattttataattgaagtgttttttataattgaagtggaattgacataagagaaaattaatcattttaaagtgagtaattcagtgacatttagtgcattcataatgtggggtaatgaccacctctaccaattcaaaacctagttgcagtgagccgagattgtggcactgcactccagcctgggcgaccgagtgaggctccatctcaaaaaataaaaaaataaaataatatattctgtacctgccccttagacagt

SEQ ID NO: 111439 - DNA, 892 bp, Homo sapiens
tagaaatccacccagaacctccaccctctgacaccatggtcagctcctgttgtggctctgtcagctctgagcagagctgtggcctggagaactgctgctgccccagctgctgccagaccacctgctgcaggaccacctgctgccgccccagctgctgcaagccccagtgctgccagtctgtgtgctaccagcccacctgctgccaccctagctgctgcatctccagctgctgccgcccctattgctgtgaatccagctgctgccgcccctgctgctgccgccccagctgctgccagaccacctgctgcaggaccacctgctgcaggaccacctgctgctgccccagctgctgtgtgtccagctgctgcagaccccagtgctgccagtctgtgtgctgccagcccacttgctgccgtcccagctactgcatctccagctgctgccacccctcttgctgtgaatccagctgctgccgcccctgctgctgcgtgcgtccagtctgtggccgagtctcctgccacaccacttgctatcgcccaacctgtgtcatctccacctgcccccgccccttgtgctgtgcctcctcttgctgctaatgtctccttgtgatatttgtcatactatgaatgtcttcattagtcatttaaaatgcactgtagccagccagtcactggaaaaatgaacacttccctgccagtttgtctcatgtggcattcagagtggacattcagctcttctaggaaatgacagacaatcacattcattaaaatatgttatgccaggccccaatgcagttatttttagatgagcagtgtcttcattcgaaggggacactaactgtgatgatctcatataatattgttttcatgtattaataaacagccacttccct

SEQ ID NO: 111440 - DNA, 512 bp, Homo sapiens
  misc_feature (496)..(496): n is a, c, g, or t
  misc_feature (508)..(510): n is a, c, g, or t
aaaacatttaacctagcctttcactaggtttcgagtaatacaaaatagagtagtataatatgatctatgctaaattcatcatttttaaagtagcctaagactattagctgttttgttggcagcctatacactgttaagttatgaagtgcactgttaagtacttagtatgaacgttgatgtcaaggtcttgggctacttttaattcatgccttgccctcgctctacttttacagtaactagctccaagtataggacaagtccaagtccgtctgtgcttgctccagtccagctactttttctaccctaccagtgtctttgtggacttgagttgattcattcactattcatatgcaactctgataaactaaccgtgtaaaaataaaacattggcctggaatctcaacactttgggaggccaaggcaggagaattgcttgaacctgggaggcagaggttgcagtgagctgatcacaccactgcactaaaggaaataaatnaagatgtaaaannnaa

SEQ ID NO: 111441 - DNA, 524 bp, Homo sapiens
  misc_feature (424)..(424): n is a, c, g, or t
  misc_feature (431)..(433): n is a, c, g, or t
  misc_feature (465)..(465): n is a, c, g, or t
  misc_feature (469)..(472): n is a, c, g, or t
  misc_feature (481)..(481): n is a, c, g, or t
  misc_feature (487)..(487): n is a, c, g, or t
  misc_feature (493)..(494): n is a, c, g, or t
  misc_feature (501)..(502): n is a, c, g, or t
  misc_feature (505)..(505): n is a, c, g, or t
aaaacatttaacctagcctttcactaggtttcgagtaatacaaaatagagtagtataatatgatctatgctaaattcatcatttttaaagtagcctaagactattagctgttttgttggcagcctatacactgttaagttatgaagtgcactgttaagtacttagtatgaacgttgatgtcaaggtcttgggctacttttaattcatgccttgccctcgctctacttttacagtaactagctccaagtataggacaagtccaagtccgtctgtgcttgctccagtccagctactttttctaccctaccagtgtctttgtggacttgagttgattcattcactattcatatgcaactctgataaactaaccgtgtaaaaataaaacattggcctggaatctcaacactttgggaggccaaggcangagaatnnnttgaacctgggaggcagaggttgcagtgagcngatnnnnccactgcantccagnctgggnnacaaagnnagnctctgtctcaaaaaaaaaa

SEQ ID NO: 111442 - DNA, 661 bp, Homo sapiens
aaaacatttaacctagcctttcactaggtttcgagtaatacaaaatagagtagtataatatgatctatgctaaattcatcatttttaaagtagcctaagactattagctgttttgttggcagcctatacactgttaagttatgaagtgcactgttaagtacttagtatgaacgttgatgtcaaggtcttgggctacttttaattcatgccttgccctcgctctacttttacagtaactagctccaagtataggacaagtccaagtccgtctgtgcttgctccagtccagctactttttctaccctaccagtgtctttgtggacttgagttgattcattcactattcatatgcaactctgataaactaaccgtgtaaaaataaaacattggcctggaatctcaacactttgggaggccaaggcgggaggattgattgggcccaggagttcgagattagcctggacaacacagggagaccccatctctacaaaatataaaaaattagctgggtgcggtggtatacatccctgtagtcctatttacatgggaagctgaggtgggaggattgcttgagcctgggaagttgaggctacagtgagctacgatcgcatcactgcactgcagcctaagccagagtgagatgtctcaagaaaaaaaaaaa

SEQ ID NO: 111443 - DNA, 912 bp, Homo sapiens
tttttttttttaaatctatgacatgaagttccactttaaccttcctgcagtagaaaaacacattgaggcttccggccatgtctgtgtatatctgtttttcctgaatgactttgagctggcccctcgttagctgggctcctctccgtcctgcccttgtgctgaaaggctcagggagagagcaggcatctcgggtgtgagtggcacctcctctgaaggaggaagcccagatcctacaaataaactgtgatgacattgcctgcttctcctcgggtcaccttatgtatccagagaatctaacaccagcacagggaggaaaataaaattccacctcgaggaaagtccactttgtagagcagagagcatctcatcaatgggccacagagttcatgagtcttacaaaaaagccagctatactcttgccctctcagttctgctgaacaaagcccaggtgccacctgccaagtccttctcttttcaagcctacaagaagccccttcctattctaacggcacttctttttcacccgcagaggataaaaaggagacttttttttcccaagaaagcctttgtccccccagatgacaaaaagttcccacaggcccctgaccctcgtgagatacaagaaaccccagctcaaatgcagaggtcactgcagtaccgcccagcatgggagcagtcctcagggttggaatgtgattacctccagcaataagtagaaaaagttgcatagagctgtaactatcggctaagaaaaagcaatgtggtcacatcattgattcacttacatagctgctcggtcattactccttgggtctttttcctcccttatcaccatatccctagcaaatattagagagcacacaatgggtagccaaacatcgctgattccttcaaccaatacttactacttga

SEQ ID NO: 111444 - DNA, 296 bp, Homo sapiens
ccaataaatttgaaaatttaataaaataaatctgcagaaaaaaaagcttactataacagcctgacttctaagaaatgagaatgtatgaataatttttttttttttgaaacagtctcactctgccgccaggctggagtgcagtggcgtgatcttgattcactgcaatctctgcctcccgagttcaagtgattctcctgcctcagcctcccgagtagctgggactacaagcatacgccaccacgaccagctaatttttgtatttttagtagagatgggttttcaccatgttggccagg

SEQ ID NO: 111445 - DNA, 313 bp, Homo sapiens
tgaagacttactaaatgtgggtttcattcatacgaagttttgctttttatgacatttgaagagagactatcattttaagcaatcaggttaattagcaaaagcattaggaaaggtttaattgccatctgcttctcatagacaaacaacgtggctgtccctcccaaatagtaagaaggcatgtgaactgaaaatttcataccatgtatcaaatgtctcagatattatcagagaactcatatgctgactgacccagtaattatatttctctaattatttcctcaaaacaattttctaaatgtgaacaaagatttat

SEQ ID NO: 111446 - DNA, 260 bp, Homo sapiens
ttcccctgtgttgtctatttcttgagcatgtgtttagtctccccttttagtttttgttagaggcttttctcactttctggtgatccttaagtgttagctggatttaagatggaagaactgaaaagttcatgggaaactttgtacacatgggtgtctaagtcatttcaggctgctataacaaagtatcctaggctgaatggcttaggaagaacagaaatttctggagactgaaatccaagatcagggtgccagcatagtca

SEQ ID NO: 111447 - DNA, 230 bp, Homo sapiens
ccccccaaatgacaaaccagtggagacttagcagtcctcctttgaactgacttccttggcttctgaaaacacctaggatctgccttctaattctctgaccattcttttatagaatcttagatgattatgtaacaagaagaaattgttttaaaaaattcataagtacatgaaaagaatctcagacgaattccctccttctatatgtcctttaaatatggtgtttcaggtgt

SEQ ID NO: 111448 - DNA, 595 bp, Homo sapiens
gagacgtccctgcctccaggaacagcaagaccaggggcccagacagtgactacaacgctttatccctctgtcttcatctctgagctcttcgttctcaggcaggctcacccacatggcgggaagacagcagctggcagcccctgactcacatcgaccatgttagcatccttccatcgcatcgataaaaaggttccagggaggcctctgattggctctgcctggtcacgtgctcaccacttgcctggggtgagggttgaggtcagcacaggcacaacgaaaaccttttgacaagcgtttcccaccgggaaggaggggaaggcatctaggtagagcagaacaaccagagtccactagaggaaaaggagaatgcaagcagagggagggagaaggacctgctacagaaatggtcagatatttttcagccattcagacagagaacttgagacggagaagaaggggcccttagggtgagaatattgggatcgtgtttggtggagtgaggatttaggtttgtgggccgtgacagttttggttttggaagaggataattatgtgcaagcccttgttgaggagagactgtggggtggcagggggg

SEQ ID NO: 111449 - DNA, 344 bp, Homo sapiens
attttaaaaatgtttttatcaatctggagaatgtaaagcatctcctttttatttacagttctgaatatttttttcaaatctttgtaggcagcttgtgtttttcctcttttccttctttctttttaagacatggagtctcgctctgttgcccaggctggagtgtagtggcgtgatctcggctcactgcaacctccaccttccaggttcaagcgattctcccacctcagcctccaaaatagctgggattataggcacccgtcatcatgcccggctaatttttgcatttttgtagagataggatttcaccatattggccagcctggtcttgaactgctgacctcagg

SEQ ID NO: 111450 - DNA, 127 bp, Homo sapiens
attctgctggtgatgcgggatcatgattttgggtctccagcaccatgtcaaagaaaatcccttatttatatttggaataagtagagaaacaggcagagcatggtggctgacacctgtaattccagca

SEQ ID NO: 111451 - DNA, 350 bp, Homo sapiens
ctttctttctttcttatctatcaaactttctttctttctttcttactatcttttctctctctctctctttctttctttcttttcttcagagtcatgctctattgcccaggctggagtgcagcagcgtgatctcggctcactgcaacctctgcctcctggattcaagtgattctcctgcctcagtctcccaaagtgctgggattataggcgtgagctaccacacctggccccttcctgagtaattttgtgggtgaataagaaacagatggattggttatttataaaaataaaaatatatatttagggtagattcctgaggaggtactgttagagttgactccatttgacaa

SEQ ID NO: 111452 - DNA, 477 bp, Homo sapiens
tcttatcctcacacttagccccaaaataaaaagtcatgcacattaaacattaaaaccagaagagccaggattcctgtccacctgtgttggagggacctcttaggtcatacgttgctttgcttctaatgttgtaccttcataccagaggagttctcaacaatacagaggtactggagggaaaatgtggtctaggtgtgagaagtcctcaactctagacccagtgttagaattaggggaggattttctagtctttgaccccaagctttaatgtacataaaatatagaagttaatttatctctctagtgtatcccagctcatctatgctattgttctatagtttcagtctgtctttcttcctccaaggatcctatatgagaaaagcaatacattaaattaggaatgccttctacttccagggagaaactcaaataatgacacaagtgtatttcgacaaaacatgggcacacattatggag

SEQ ID NO: 111453 - DNA, 152 bp, Homo sapiens
gatttatattgatttatccatatcctttagctcaaactactttgagattaataataaacatctgtaaggtggtggccaggattagaaatatagtttctcatcatggaagacagtaatgctaactggtcaatatatggaaataatgctaagtg

SEQ ID NO: 111454 - DNA, 418 bp, Homo sapiens
ggatcaagtgaaactctttatcattaagttcaaggccctcttcagtcaggctcccacctcatgtccaactccagccccacacctacatctagtgtaccagaactccagtcccactaaaataagggacacactcacatacaaccccacattaccatgcctttttaaaacctttgcgcatgttatcccctcttctgaaaatgctcttctctcctcatcctgctccttttctgtctggtaaagttttaagatccagttttaatgttacttcttcaaagctctcccaaatgtaaccagacataattcaccactcctatatctgtgtccttttagcacatgactgtctttcttgcaaaaacttaagctcctcaagggaaagcaaatatgttttactcatctacacaaccgtagtcactaacac

SEQ ID NO: 111455 - DNA, 112 bp, Homo sapiens
ttcatgtatccgtgtgtgtacgtacccgagtgtgtgtatgtgcctgtgtgtacgtacttgagtttgtgcccatgtacgtgtacccgagtgtgtgtacgtgcctgagtgtgtg

SEQ ID NO: 111456 - DNA, 474 bp, Homo sapiens
tgccactgtactcctgactgaacaacagagtgagaccctgtctctaaaaagcaaaacaaaacagaaaacccaaaaccctcaaaactaatgttacacttagtatttaaagaatgctttctctgtaagaagaggagcaaggacaggataaaacattcttgccagttctgttcaacagtgtactggaagtatctgtgacattaattgcattgcaacacggtctctcatgagagaccgtgttgcaatgacaaggggggcaaatgaaatccatgcaagatttgttaataatgggcagacagaaaaatgtaaaaccacacaaaacggactgctgatattattttaaaatatacttatttgtcttctttttgcattgtgaaaaaaacaaaataaattttgtgtgataattctgatgatgaaaggtggaagttctacctagatttgaatgagtgttttttttaagggaatgagaatgtcctg

SEQ ID NO: 111457 - DNA, 359 bp, Homo sapiens
gaaagctggccctgaaattgtcttcatggtccagctggaggactgaggggctctgggcaccaaaggcaggacggtgggaggatgggtcagggtgaagagctgcctcttaaagggaccctgtttgtgcccagacatgtaccctcacccactgcattccagctctgtggaaatcccccagggctggggcacaggagctctcagcgacaaggaacctggttggtttctgcagctcccaggtagtgtgccaccaaacagatgtcagtctaaagcctggagtagcacagcctgctgaggacaagtgtgaggcacaaggccttaactccaacagagcccagccagtgccaatccagtgagagcca

SEQ ID NO: 111458 - DNA, 483 bp, Homo sapiens
gggtgatgggcgcagaccaaggacgtgctcgcggggccattgtgcacagagatgtggaggggtggctggcaggggacacagtcggaacgaccgagtatcacgctctgcacggctcagtgatgtacaacaagttcgggaacgaatatcccatgtaatgaatgctcggtagcgactccagacttgatctttagagttgcctagtggccattctagttgtctacgacatgcatggcttagggttcgacttcgctgctaaacgatgatccgcgaatagggcacggacatgcttgtatagtcgacttggctagtatctcagtgctccgagcaatagactgtccgatacaagcaggcacccggaagcaggaatcagtggttcggtggggagttggtggggagctggggaagtatgtaactggtgcctctgtggtgtgtgtgagagatgaggattgggatttaggaaactcatgggcagctggctggatg

SEQ ID NO: 111459 - DNA, 203 bp, Homo sapiens
ctttgagtcagaaatgggagtgttggtctaaaaactgggctttttgggctgggcgcagtggtgcacgcctgtaatcccagcacttgggaggccaaggcaggcggatcacctgaggtcaggagttcgagaccagcctggccaacatggtgaaaccccgtctctactaaaaataccaaaattagccgggtgtggtggcgagtacc

SEQ ID NO: 111460 - DNA, 440 bp, Homo sapiens
ataccttccagtggtgaagcgtaagtgaatgtgtagccagaggcattgccttactggctgtatttgtgtccaggaaatactcaaaatatgtaactactggtaggttaagagtactaaccaatcagaatggattcctagaggcctcctgttgtgccaggcattaaccttttggtcactgagtcacagagaggttctagaaggcacagggaagggtcagggtagctgtcggagttgggactagaacagctgttctttaccaaaggtacatagtattgtaatagtttaacaaccagtaaagatatactggtgcctgttggctgcatatcaattttgtttatgtttagatcgtcatcttagtgactacaggggcaaaaatcttgtgccacatcttttttgcttatcccagcaggtcacctgaccaaagcccttacctctaaagc

SEQ ID NO: 111461 - DNA, 233 bp, Homo sapiens
tacagggctgcaagagggatcgggaggaccagctgaggagaccacagtgtctgaggcctctatgtaactctgctagagttactgataagttggaaaaagaatggggagaaattaaggaaaaaagttaacaaaagaggccgggctgagaatacaaatgaaaagattttgtgatagaaggtgaccaggatctgctgggggtagttgttcccaccctaggccaatggatgatgtac

SEQ ID NO: 111462 - DNA, 431 bp, Homo sapiens
gacatcgacactaacgttctaggagggcgggatgaaggatcagaggcaatggaactggagatcatggacatcacaacagatcatgtcaagctataatgaacgcaacaaagaaaggcaggaactacaagacaacactgtgttcttctgtacgctgtaggcaatctctaccagcaaactagagaaatcttgttctccctgggtgagtgaccccaggaattgttaatttccagctgtccagctataaagtttcatgaacattcctttagctgcacttagaaataggcactccacgggttccgcgcagtggctcacgcctgtaattccagcactttgagaggctgaggctggcagatcacttgaggtcaggagtttgaaatcagcctggccaagacagggaaaccctgtctctacaaaacatgtacacacgtgcg

SEQ ID NO: 111463 - DNA, 567 bp, Homo sapiens
aactcctgacctcgggtgatccgcccgcctcggcctcccaaagtgctgggattacgggcatgagccaaatgttaagggaacgcatcctattttacataccgattttcccacaagtcaccgggaggatgtcactgtgcatagctgaccgtcgtcctgtgccgagggtctgctcaagggacagaggaggacggtgctgtcctggggcttcgtctggcttcctgtgcctgtcctcggaggctcgctgttacctttctgagcctcagcttctagcgcaggggctgggaagggagctcagaaggggccggagccgcgcggccccctgagcgttctcggtaaacgctcggggtccccactccaagcccggccttccgcatgccgcttcctcggctacccttgagaagcaaagcccccttttcccttgcccaccacgccagtgctggcgctcaggtgctgcctcccctgtaacccacagcccggttctgggtgcaggcgtgtgtgttagcgcgaggggcgttttcacatcccgcgcgcccttaatcgtgggctcctctgcgccccagcggcctc

SEQ ID NO: 111464 - DNA, 434 bp, Homo sapiens
tgacacacatttttggatagccttctgatgcaaggcacatggaattcccgaagatctcaaaatgtcagcctttatataaaaggaagccatagtctagaaagggcagtaccataccaaaaaggaatatgagggataggcatcatatcccgaaatcttggatgaggcaaaggagatcaagggggaaagtggtacttgagtttatcatttaaaaaatgacgaaatttggatctccaaggaaagggaagtaggaagcataatccctggatcacagaagaatgagaatgaaattaccagtggtgtaggcacatgaaagaccccaccatccaaattgagaatttgggatttcgtgtttgttggcaattggttgaggtcatcagggctgttctgacttgacaggtaggaggctctgaacaggaaagcaaaagacagaaagg

SEQ ID NO: 111465 - DNA, 470 bp, Homo sapiens
aattaaagatcttagaaatgattcaaaattatgtaaattaagaactcttgtcctggaaacctatgctggggaaagcaccaataggatttggcaaggacttgtcatgattaactgaatagatgaagaaaaaagatattgatgggatgttaaggactgacaaggaaaaaggaagagaaaagagaagattatgaaatgcaaatgtgtatatttagcaacaaatcagatggccagagtaaatgacaaataccaataaaaaatggctgagatttcattctttggaaagtcagtctcagatgaggaagctgtaagtattcacaaagttcatggaaaacactaaatttctttaggtcatcaaaaaaatatgagaagatactccttcaaacatgaaattattctcacattcataggagtattctaatttaaaagtattcttatatttttaaaaattaaaaaaattaaaagcatgaatt

SEQ ID NO: 111466 - DNA, 377 bp, Homo sapiens
atctaggttcagacccacttattaattgtgtggtcttcggtcagataataacttctccaatctcctttcctacctgtaaaataatagtagtactggtagtaataatgcataacgttaatttttctaccaaccttactaataataagaatcaaaagtagtatggaagtaaaagcactttgtaattgtaaagtgctgtgcaactgctagttgttattatcttagttattattctcattcaagtcgatgcatgaatataacagataataaatgtaacttaaatctgttgggttgcttttttctggccttagtgatttcaaagacttgcttgcatgtggttaaattcaccagttagtgacttattcatatctctttgccca

SEQ ID NO: 111467 - DNA, 591 bp, Homo sapiens
gcaattacttttgcaccaacctaagtacctaaagtatgctttactttcataaagcagaacaaatgtggatttctttaagaagaaaaagaactattagaaaaaaatgtgagtatagcattgatacatatacacacatacatgcacacacacacccgtgtgtgaaaatccaagaatatgaaaaaaaattataatgacttatagacgaccttctctatgcaaagcactttcccaggcaatgaacctacaaaatctttagttctcactaaaacccggcaaggcattcacattttacaaatgagaaaactgaaattgagagagtgttagtaagttggatattgcacatgtaattttttgtatagccaggattccaacctagtgtttgtgatttaaaaatttacagtttttagtatttttttcagtgcatgtaaattagattgagaggattgaatgcagcctcgttacctttgtgtgagcgatttatcccagctaaaggatactgataagtacctttttcatatatttcacaaaattaggaaaagaggaatgaccaaaaattgtggaagactttaattctatagatattagccatgg

SEQ ID NO: 111468 - DNA, 434 bp, Homo sapiens
cacttgtccttcctcaaattctgaagtctctagccattctgtcttcttccttccagctttcagagttcttttattgttatctgatgaataatttttagattacctagttgttttataggagatgaacagggaaaagtgagcctacacaatcctgttctagaactggaggtattcaacctcttttatcctgcaggtggaacacatgtattacgtaatgctcacacatgatatatagcaccatcgtggaagttcaacaatagtttttacataaatggagatgagtttaggattaagctaaacttagctgtgaactaattgtaactctaccccctcccactgctccataacctacagagaatggcgctaaacttaattgatgttacagtgaaatgtatgcgggacaagcttttgcctcaagaattattaaatcatgt

SEQ ID NO: 111469 - DNA, 184 bp, Homo sapiens
atagtggtaccagatatgcagagaacctctggaaatttagtgttgcagtccaatcactgccccaagcagagcccacatgctaaggtgtctacgcagtttgagaataccatttgcagtatccactggcccagggccagaggactgaatctgcgtagacaccttagcatgtgggctctgcttgggg

SEQ ID NO: 111470 - DNA, 826 bp, Homo sapiens
gtactgcggcagggcagccttccaccctttggcacagagtttggtgttccaaaggtcatgaggggttttagaccctggacccaggacatgttccaagactcttttacattatgtcagaaaaacgagccctgcctcagctcttctgccaacatgtctcccttttttgtcctgcaaaaccgccacagctatcattgcttgttcttggcagcggctttctctccagaagcggcttccgcatctgtagattaaaaggagacagcacaagcacataattattagaacaaaatttacaagtgtagagtttccagtggtcttaatccatttaagagaattgattgcagacaacccattggctgcctcgctgaaaatatcagttccagggagcagggttaagtgagcctgagaggcttcaaaaacctgctcttttacttttacaatatcaagggtgagattttcctctctgcccactagatggcatttaatttcccattggtgttctgtttcattctaactatgaggagtaacgcaaaaatcggatgtattccagtcacattgcatttgaattctagtttctaaacttatgatgcaatcccccatccaaattactgtctgagggagatcattaatttgactaactatattttgatctgtttgggcctgagagctccataatttcatagaattctttttccatttatcaacaaatttgacagtttgcacagatgagtgtaaagccacactagctactgcagcagtggtggtaactgcagtgaggccaattatagcaaatataagagcaactataaatctttttgaacgggataag

SEQ ID NO: 111471 - DNA, 232 bp, Homo sapiens
agcttcctgccttgctccatctggcagactcttactcattccatagcacgcagcttaggtaggcatcacccccttcctagctcaggtggagtgggtgctcccgctgagtgctcccatgcactttgtggtttccccttctgtacatttaccacagcatactgatagatttgtttgtgtctgctttcccagagaggccaaaagaccttcaagggaccccttttttttttttttt

SEQ ID NO: 111472 - DNA, 286 bp, Homo sapiens
ctacagagaggaataaaaaactcagaaagggtaaatatctcgaaaatataaaaagtctattaaaaatatctatccacggccaggcacagtggctcacgcctgtaatcccagcactttgggaggccaaggcagatggatcacctgaggctgggagttcaagaccagcctgggtaacatagtgagaccccatttctacaaaaagaaaaagaaaaaaaagttgaacgtggtgtgtgcctatagtcccagctactcaggaggcttagtgggagaattgtttgaggcaaca

SEQ ID NO: 111473 - DNA, 134 bp, Homo sapiens
acagtctgtaactcagccacagacagccgtagccaggatctcacccctgagaaggacatctgctgcagccacatgctggccccaaagaaaactggctctaaattggcctctagacagttctagactgcatctca

SEQ ID NO: 111474 - DNA, 305 bp, Homo sapiens
gtggaaaggacacgctaggcttggggcatggtctgtgcaaaggcagggaggcggaaacactctgggctcctgtggtgaccaggagaagttcatggttgctgaaatagaacccgtgtgggctggagggctgagcgcgaaaggagagatggggagagagaggctcggccctgagcgacctgcacgcgcacaagcttcgggtggacccggtcaacttcaagctcctaagccactgcctgctggtgaccctggccgcccacctccccgccgagttcacccctgcggtgcacgcctccctgggacaagtt

SEQ ID NO: 111475 - DNA, 263 bp, Homo sapiens
cactcctatcagctttccctgccccttgatgacatctcagatagccggctcacctgtttgcaggcatttttagtcaagaaaaaggctgcttcttgtgagaatgactcacttttatgtattaaagagtcaatttgaacttgacatccatgtcaaactccccctcccacagcccccagcacaggctgggctggtgtctgggccaggggtagggaaggggcaacacgtgttcttttcctagttctccctttccctctctcttctca

SEQ ID NO: 111476 - DNA, 475 bp, Homo sapiens
cacagagtggtgaagaatgtgtgagcgagtgcatggtccggccaccgtgcacagccaggtgtgctggctgtggcagggcaggcagctccaggcactggcacaggtgctggctctgtatgagactaaggctggaacaggcatactgcaagtggcttcaatgatgggcaccgggaaatgcagtggcgacaagaagctggtagacaccaggaaccacagagccccaaagagagtatcacaaccatggctcagggagcccctaggtctgggctccctgaagggccccagctcttctcttcctctctccttctctcttctctccttcttatctcccacaacatggcaagcaggggccatgtttcagccctgtttgtgttaacagctctttcggtcatccagactaatgtccagcccttagcagagaggagacccataagaagtgtggctgagtcaggttattttatgggctcagacggga

SEQ ID NO: 111477 - DNA, 815 bp, Homo sapiens
aagctgatatttgtgggttaacctttctgtggtactacagataactgtgttccctcattgaggaatggagtcacaacaggttggtgtgtgcagtatgtgtagcagacaaggaaggcacatggggaggagttgaatcagttgtgtaagtttcaaaattgaaccacactgaatttccttgtaggtatatggcaagaaagaaaagggacaaaaaggaccaggcaggatatatttatatctgtagattttgtattttcttagtactttctggcaatggctgttcctgtgtcctcactgcaaacattagcatcttattaaattctcagtgtcatttgtgtatttaaacaagctcatgatcagtgctggtaggcctgagttacgggcaaataaaaactgtagaatgactgtaaaaactaagactaaagcaaggggtaggcttgagcaaaagaataaaagagactgaaaaaaaagtgaacagcacataaagtgaataaaaagaaagcaaaaaatattagggtttgtatgatagcagggaagtattcctgttcaacagttcatgtgcttaacagagtcaatattagaaatgttctgggatgtctcttccccactcagtacttactgagattgcagaccttgaagctaatacattgccaagagaaaatctgatatgaaagaaaattgctaattatttactttatcttcatatacccaatatatggtagataaccactaacttttggttgaataatggatacatgcctacataaatatcaaattgaaggtgacccaggatatgtaaattccttagaaacaatcag

SEQ ID NO: 111478 - DNA, 243 bp, Homo sapiens
caatctccctgcataggagatctgcccaacacacatttgcattttcagaaagagcagagcagaaaggaagcagaaagccaagtctgtggtggggaaaaaggaaagtgggtttcccatgagattcaggtagctccccaggaccgaaggatcagctgggcacgtgtgcttcctatctgggtagtgctggtcatttctgtttgctgtggccacagtgtggccatcctatcggcacctctacccaag

SEQ ID NO: 111479 - DNA, 265 bp, Homo sapiens
ttcttttcagttcagtgctgagcttggagtctggcaaatcacaggtttttatcaataaatgtccagctgggtacattcctccctctcctaaacacaactcctgccggtcaggcactgtgtcctagaacctttgccatgacgctgatggccatgctttcacttctagatcaccatttctgccacttatgtgctttgacaggtccctgaatccttttggaattcccagaagcacctggaaagtttactgctaaattgttaagaccgg

SEQ ID NO: 111480 - DNA, 483 bp, Homo sapiens
agaatgtaagcctcatgtgaagttatcaatgactgataaacagcttagtggctaaccctcctgccactgtgagtaagcggatgagtggaaccagctcggaacggcccaccccaaggggccttgtaaagagattacggaggaagccagcagttctttctgtaatccacccccagcagagggatcaaaggagaggagcagagaaagagctgagagtccttgtgggcagagagtgatgtgtctcaaggccacagaggccctcgtggggcgtgccgtggtcaccctagtgcttcttcctctagtgtcctcatggaaataactgggcctcctggttatttaaatcagggtttttgtgtcgggtttcaataaattgagatccaggctaacttgttaaataatctggggagagaaaaagagtgaacgtgcgaagctgatggctaagtctgaccatggtggagatcagtggctttcaatacctgtggcacg

SEQ ID NO: 111481 - DNA, 391 bp, Homo sapiens
agtagaaacgggatttcatcatgttggtcaggctggtctcgaattcctgacctcaggtgatccacccacctcggcctcccaaagtacagtttttaagtggtgtgcgtgtgtttaattaagaaagggataaagggccaggcacagtggctaacacctgtaaacccagcactttgggggccgaggcaggcagatcacaaggtcaggacatcaagaccatcctggccaacatggtgaaaccccgtctctactaaaatacaaaaattagctgggcatggtggtgcatgcctgtagtcccagctactcagaagactgaagcaggggaatcacttgaacctggaaggcggaagttgcagtaagccaagatcgcaccactgcactccagcctggcaac

SEQ ID NO: 111482 - DNA, 680 bp, Homo sapiens
ataaaacataaaagagcataagacataaatacaacacacatgaaagatctaacatgatataaatatggtttgagaaagagaaaattaggaagaagcaatatgttaagagataaagaccaaaacttttctgaatctaacaaaagacatcatactataaattcaataagctcagcaaacccaaaacaaaatatagacaaagtgctgggattacaggtgtaagccactgctcctggctggtggtgaccacttctgagctagaagtacaggaggagaggcaggtttgggaggaaggagaagcagggtctagcttccgtcgtgtggatctgaacagcctgaggccatccaagaagagatgtctggggacagctggagatgtaggtctggaattcaggtgagaggtcagagctggaggttgacatttggaaaagatcagcctttggagtgaaattgaaaccatgggaatggatgaacacactcagggagagggtgcagggtgagaaaggaagggaaccagaacagacccctgagaatagtcatggtttcgaagaagcagaaggaagagaagccagcacactggaagcagagacagagaccaaagaggtaggagaaaggcaggaggggtctttgggacaaaatattcccccggcagataaaacaggagagcactgaaagaaggagag

SEQ ID NO: 111483 - DNA, 354 bp, Homo sapiens
ttttttaagtttatgggaatttagattgtttccttatttttactattttgaaccatgttgtaaaaatctttatatatactggataaacttttgtgagtttatcggtagtgtgaattcttacaaagatgaagtgtcaaactgtcaatacatttcattattttaccatttatctatctgcatgtgtttggccaagagaaatttcaaaacaggagagaaactagtgcttcaaaactagtcatgctacccaaaaagtatatgccatgtaaaatttaaaaaaattttactatgaaatgctgttagagatattggtgtgggctaccctgaggcacttcagcttgtgtatactgaagttga

SEQ ID NO: 111484 - DNA, 349 bp, Homo sapiens
aatgaccgtgggcaagagctgggttggaggggtggtctcagatgtgtcctgacttgctgggatggctggaaagctgagacacacatggttctcagctgacgtgggcctgcttgaggtcttgatggagagccggacacttggctaggtatgtcccccgacagctgcatgctctggaggagggaaaactctgctcccagagcactaggcacagccattctgtggtggccctgaccagggggaccccgggacagagccctaggctttcaaacaatgtcaaagttcaacttgctttcgagtccgcatttctgcagcctggagcgctgggcctgctgagtcgcaagctgcctct

SEQ ID NO: 111485 - DNA, 343 bp, Homo sapiens
catataatatatgaaggcatatgttcatggatagcaccttcacgtctggagtcccatcccatacatgctcacattcctttcccgccccacacctagtccccctatgccttctactgcttggggagaaagtacatttagcacaagagctcaccttctccgttttctggccagggaataaaacccgattgccttttccaattggatgttctttctttgcgaccaatactgagtggggaaagaagtgtttaccagggacactgagacacaattatgctcctatagtcaaggcctacagttcatttaaaaatgctctcaggggctgggcgcgatggctcacacctgt

SEQ ID NO: 111486 - DNA, 133 bp, Homo sapiens
tagatggaaattgtgttcatatgtttttcttcatcaagaaaaacaaggaaattttcataaatatttttaaagtctctcagaatctgataagaaagggccaagaggatgaaaatgagaggactggggaaaaata

SEQ ID NO: 111487 - DNA, 624 bp, Homo sapiens
gtagctgggattacaggcatgtgctgccatgcccggctaattttgtatttttagtagaggcagggtttctccatgttggtcaggctggtcatgaactcctgacctcaggtgatcctcctgcctcggcctctgtgctgggattacaggcatgagccaccatgcccggccatattttatttctttagacaagtgtttaagtacatatatggtctctgcgtttaagtaaaatttttatatggagataccaccaggggtggggggagagaagcggagcctgtgtgagccccagccccaagtaatactactgcccttgcgtcattttggagacccccttcccaactaagtgcctctttgcatagcaatggctcccgtccccatgctctctggtatcacaacagctggacgggtagtggcgggtcggcaaggcacagcacacgacctggtggaccagccactgggaacaatgagtctatggtggccaaatccagccttgtcctccactttgtcaagggacaatttcaagagtaccaggagagcataatcagagcagccttccttacacagactgtctgcttagacgacacaatagtcaagtttgagatctggggcagcgctggacaggag

SEQ ID NO: 111488 - DNA, 303 bp, Homo sapiens
cctgctactcaggagggtgagacaggaaaatcacttgagcccaggaggtcaagttatagtaagcaataatcacttcattgcactccagcctggatgacagaataagactccatctccaaaggggggaaaaaaattccaactttagattaaatgtctactgaaaaagttatgttactaattgatttcgtacctatatactcatagtatctaaaaagctctggaaacatgtagttttattaaacggttcactgcagaataacagtattaagaaagattctcagccgggtacagcataccccaaca

SEQ ID NO: 111489 - DNA, 480 bp, Homo sapiens
cctcagcctccagagaagcttggattacaggcactcgccaccatgcctggctaatttttgtatttttagtagagatggggtttcaccatgttggccagaatggtctcaatctcttgaccttgtgatccacccacctcggcctcccaaagtgctgggattacaggcataagtcaccgtgcccggccctaaatcagcaccttctgctctcatctccccttacacctgctcccccttctcctgcactccctttgtcagtgcatgcccttagccataagcctaggaggatgacttaaccccctgagaactctttataacccttccaattctaccctctgaatatattttgaatctgttccttctgctaaatactacctgcaaccaatgtttctctcacctgaataatttcaaaagcatcctcaccaattcccatatctctagtttgtctccttcaaactattccattacgtcgacctttctaat

SEQ ID NO: 111490 - DNA, 643 bp, Homo sapiens
cagggtcttgctctgttgcccaggctggagtgcagtgatgtggtcatggctcactgcagcttcaacctcccaggctcaagcaatcctctcacctcagcctcctgagtagctgagactacaggcacgtgccaccatgctcggctaattttgtgtttttttgtagagactgagtttcgccttttttgcccaggcttgtcttgaactcatggcttaagtgatctgtccgcctcggcttcccaaagtactggaattacaggtgtgagccactttgcccaaccagcaaattctttaatgctcaaattgacttgcccagagtcttgatattttttttttaaagctttcctattttggggggaaatcttcagctagcatacttaatgtttaaacaaaatagagaaattttcattcatacatacaaaagtagtgggaactacccagcttaaacaatttgtcaacacatagtcaatcttatttcatccccatcccaatttactactcctgacccaaccttcattatttgaaggaaatctgacgtcaagtaagttcattcataaataagtattcaatatgctatttgagaagatgtaacttgtgaaaatttctaccagtgcagaactcagtgtttcaaagctagaatgaggcc

SEQ ID NO: 111491 - DNA, 300 bp, Homo sapiens
tttccctcttcctttctgatctcaaaagctgccaaggtctaagccatatttgggatttcactccctgcgggattttatttcgatcaaattcaatcagtatatattgtattcataggttggtgtcaatgctgagattcttcagttttgttatccattatgcatggttatacatttttgctattactttaccatccaacccccatctttataggcttaattctggaggatttggtaaacatcatattagaatgataaaattgtatattaaatggtcctgttgtaaaaagacttccaacagat

SEQ ID NO: 111492 - DNA, 477 bp, Homo sapiens
cttacaggataatgtttagttctcattatcagagaaaaaggtgattcaggtaatttcttcatttgttcgtttctctatccctctaccccagtgtcttgaaaaaatatttagctagaatgctcaaaaatggtgtgttagcattcattttcttccattaggtgatttttgttgactatcattaatagcaatatgtaagacttactattcatttgcctatttattcattctacaacatttattgtttttctactgccaggaacaatttgaagtgctggatatatttagtgggaattggttttcttaggcagattatcatctgtttgtgaagctttttcacagtgtacgtgcctggccccaaatctaggagattcttgtttggtatatttggtgtggtgtaagttcaggcatctgtatttttacagagcttttcaaatgactctaatgcacgtttgcttttgagtaccataggaataaaac

SEQ ID NO: 111493 - DNA, 824 bp, Homo sapiens
atgtgatccactttgtgttcatttttgggcatggtgtaagggaagagtctaaattcatcttttcatggaccgatttccatttgtccaagcaccatttgttgtagagtatcttttccccattgaattgctttgatacctttgtctaaatcaattgggcataaatataagggtttatttctaaactcttagttctgttccattgatctgtgcctgtccatgattgtgtgttattgatgactctggctttaaagtatttgtaagtcattaaatcaggtaatgtaacacctccaactttgttatttttcaaaattcttttgacttttctagatactttgcattcccatgtcacttttatgatcagattgtcagttactacagaaaagccttctgaggttttaaatatatattgtgtttaatttacagatcaagttgagaattgccatcttgacaatatgaagtcttccagtctgtgaacatggagtttgtgtccatttatttagatattccttgatttctcttagcaatattttgttattttcagtatatacatcttacactccttttgttaaaatgttcatattactttgctattacgaatggaattgcttgctgaattttgttttcagactttttggtgctagtatatagaaataccattgatttttgtttattgatcttatatcctgtgacctgtctaaattcaatctgttagttttatcattttttaaaaaaatgtccgtgtgtgtcttccttgagattttctacattatcatgtcatctgcaaataaagacatttacttctttctttaaaatctgtatgcctt

SEQ ID NO: 111494 - DNA, 344 bp, Homo sapiens
atactgtctatacctgtgtgcccagctctgctacttgactaaagggcttgctttcctcgaatctgaaacacactaatgcatagtttgcttcagaagcagaaggcttctgaaaaatgcttttatttccctattgctaagaaaacatttgacattagaactcctttgtgcaggctaggatgtttcctaagttttcttttgcagtgatctgcaaacacttttgcttatgtactcccaaaataactttggagaaccagcattattttattttttaaattaaattttattgtattttatgttttttagaagggatttcactctattgtgcaggctggagtgcagtggtg

SEQ ID NO: 111495 - DNA, 305 bp, Homo sapiens
aagcttctgaaaggcaaataatgggaaggcaatccacatgtaagggaaaacgggatttgtgtcagtaagaagtgatagcctggaaagttggtgatatttaactaaattaaaatacgataagggccatccacttttggaagggtagtaaaaatcaaggttgataagttcacacaaaatttaataagcaatagttgtgttttgttttggggggcaaggggtcagaggtgtgatcataactaaaataagactttaatcctggaaagctgggagagggacaatgctgttaagaacctgagaaatcaaga

SEQ ID NO: 111496 - DNA, 632 bp, Homo sapiens
aggtgggagaaaacctacatataagtggactcatgcagttcaaacccatgctgttcaagggtcacctgtacatataaacttgtatatgtaaacacacacatatgtaaacaaaggcaacaaacattacaaacatttatcaagtgggcacaatatgccagtactgccctgtggcctaggtattactaaggcacagagaagttaagtaacttgtcttagaatgcacagcttgtaggtagcaggactgtaattaaaactcaggcatttcagcacttgggaccgtcttcttcaccttcgtcttcagcctctataaagctgaaatcactgaaactttttcttccaaaaaagaagtatgtaaaaaaatataaaacaaaacaacaaaaaagagaaaaggatcttccagagtatgtcatagggtggtcctcagcattgaatgttacctatattatgggtaagaaaacatttcttctagagatttaataatctacagaaaaaataaatcagggactatatataagtgacaattcatttttttcctagaaaataaaccttaaattcgtaattcatgtacatctctgctcctgtaaggtaaaaattgtaattttcaccgttttttagtagtcttacatatatgt

SEQ ID NO: 111497 - DNA, 672 bp, Homo sapiens
ggacagttgcttccaactccaaacagttattaccttacagaggtgtgggcccaggattgcaagactagatttttcggtgaaagccgccagtgtgacactttttgagttttcagtgttggcagataattcactgttttaaaacatgcagataaaactcaactgtagttggatgtactttacgggttgctagtttgcacacacttatatacataatgcagaacataagtgggaatattctaaataatagacagtgtggaaacttttcttaataatagtaagaaactgagccccaaacaactattaatatgtttagatgtttccctttgggtctttatttactgcatatacattttatatacatgttttaaaatagttgtaatcataggagcctgtgatttttcacttactgttagaagcagtttctttatatgatttataatggctactggatattccatgtagaggatgtattacaatatgcaaaatcatttccttattgttggacctttaagttgcttttgatttaacatagttataagtaatgctgcaattacatatttgcttataccgctttctcctttttttggattagatccttagaatctaaaaggaagattactaagtcaaaagatatgaacgtttttatggcttttggtacatattaccagattg

SEQ ID NO: 111498 - DNA, 738 bp, Homo sapiens
tggaagactcatatttttttttatttcagaatttactagaaaacaacagtaatcaagactgtttggtaccagcatacaggtagacagacatataggacctgggtgcggtggctcatgcctgtaatcccagcagtttgggaggccaaggtaggaggatcacttgagcccaggatgttcaggaacagcctggtcaacctagtgagacacctcatctctacaaaatattttaaaattaggtagctatgttgatgtgggcctgtgatcccagctgttcgggaggatcacttttgcctgggatttagaggctgcagtgagctatgattttgtcactgccctccagcctgggtgaccgagtaaatcttaagtgacttcgggttgggcagctatttcttagatatgacacctgaagcagacaacagaaaacaaattagatagaccagagtttatctaattaattagacaaattagataaaacagagttgcaaattttgtgcatcaaagcatgccatcaagaaagtacagcccacagaatgggagaaaatatttgcatatcatatgactgataagagattagcatctagaatacataaataattattacaacccagtaatgaaaaagacaacccttaaaaatgggcaatggatttgaatagacatttctccaaagaagacacacaaatgaccactaaacatatgaaaggatgctcaacatccttagttattaaggaaaggcgtatc

SEQ ID NO: 111499 - DNA, 379 bp, Homo sapiens
ctttgaacatacacaaatgtccagaaaccatcccatcttcccagcaggggctgtgtttcatgaattcacaggtgactacatacccctgtaacttttattatgagttgaaattcttgactccatcaggaggaacatgtggagataatttaatccctcccctctagcccaagcttgaatgttaacctcactcatccctcactcagtaataatccctgctccttctcccaccaccttctttgtctgggatagggcgggaaagcagtagacacacacacagacacaaatacagacagtcacttgtaacatacacacatatacttgcaaaggccaactatcttggaagactagggaaaaagacagaagtgcctgggactgagct

SEQ ID NO: 111500 - DNA, 214 bp, Homo sapiens
gacatatgagttgtcacagctgtggggagcatgggggaaagttgtccaatgtgtagaggccagagatgctactaagtatcctacagaacacaggacagccctgtgcaacccaggaataggactatttcacagaaaacctgtcttgagaactttaaaggctttgagcccagaagctctctcaaactcattctaagtgcttggtgaaaactgtggt

SEQ ID NO: 111501 - DNA, 276 bp, Homo sapiens
aaagacaaggccacacagccttctcatgcctctccctctcccagaattccaggagcgtgatgacaagtatttctctgtaagggtctttggggtctatacttctcccctaacccagaggccggtttaaactctctctgggaaaaattcccatttaatcggcttgaaggtagatcacagaattctgagattctattatttcagagtaatagaaacgagtcagatggacagttttgaaatagaaaatggtctcaagagttaacaattgatatcaaagtt

SEQ ID NO: 111502 - DNA, 463 bp, Homo sapiens
aggggcacatctgtccatctcagcaaggcttcagtgaacgtgccttcaggacgtggaagcagacaccgcactgtgtcgggggcctgaacacgaagtcggtagaggagcaggtctccaggcacggctccggcaacaccaacaggaagcgggccaccttggagagcgctcttccactgctggagttcctggtcaatacggcatcgtctgcgtggagggtctgatgcatgagatctacgctgctggaaaacacttcaaagaagcagactacctcctgtgggctgaagttctcttctccaccaggtgaaatgaagaaaaagcccactcgttttgtagaaggtaggggtgctggcagccaggaagaccagaccagcaggctttctagcagaatgaactcaggtctacatcattatttttgtaatctggtaagttaataaatggtgactgcctttgaatttaaaagaaa

SEQ ID NO: 111503 - DNA, 301 bp, Homo sapiens
tcaatggtaaaaatagcagcttacatttatcaagcacgcttccctgtatcatcgtactgcccagatcattatatatcttaccttgtttaatctcccaactctagaaacaggtactgccattatccccattttacagatttaggaaactgaagcttagcagagccgacactcaaacccagatagatatacctgactccagaagcaggaactgaactattcacctccactcgtacctgtttctttaaaatgcaaaggtaatatagtataatatcaatggtaggatgcatgctttaaactatta

SEQ ID NO: 111504 - DNA, 510 bp, Homo sapiens
agagagagagagagagagagatgaggatgggggtgggaaggcaggcatgtggtagaccactctgcaaggagctaaaatgctctaggcaacgagatggtttataggataaagcctctgctgtactctcctgcttcctaattgtgcagataacaaatgataataatattctcccaccactaagggtctcactgttagttctaaattatattcgataacaagaagatcaatagctaaggcaagtctaaacagtggctaccccaaacacctttccaacatgtgctggaacgctttcgatgttagtgagagcaagtcttagctccctgaatataactgtcacaggctaatattaaagtcggtttgattccctgagcacattccaaactgtggaaaaggacttgacccatttgactgactactgggtagctcagagagggcagtctaggatccaaatttgctacgaaaagctcaccccacagatactccacatactgtgtccatctcactgcagct

SEQ ID NO: 111505 - DNA, 443 bp, Homo sapiens
tgaatatatggatagaaaattatttgacaaacatttgaaattgaagtcatcaagttcaatacatctggaatcaaacccatcaccttcccctgcctcactccacttctccagccagctcactggatgcccatctcggttcagggcagtctcacagtcctggtcacccagactagaccatgatgtaccaagtggcctcgccctgttctttgccttcagtctctaattcagtagttcccaaacttgtgacatcaggatcactggagggcttattaaagcaccactaggctccacctccagcatgtgcattgctcccaagttcctaagtgttgctgacgggaacatcctttgagaacactgctttactgacatgggggggcgggaaaaaaaaaaaagcaatggaccctttcctgaaaagtgcacacacacatgcatgcacaggtaat

SEQ ID NO: 111506 - DNA, 289 bp, Homo sapiens
taattagaaaacaatccaaaattcagattgcttttctttttttctttttcaaactctgcatgtggcattcaactaattcagattctacaatagaaaggcagagtcttccagctcacctgcctgcacagaaagcctccagcatttggttgtagcagctgagtggtggtgacatctaggtccatttgaagcctgcagagtgggagaagccatcagcatccagtcagagacagtgcaccgggagcctgcagcttcttttcccccaaaacacaaagcagcagtaacacgggct

SEQ ID NO: 111507 - DNA, 697 bp, Homo sapiens
aagcaaattaagtgggcaggggcggtcagtgttggtagaaaggggaggcaacgcctgtcttcgttgatggttaaggaagttcagacccatctgcatctattgaggggtccctagtggagaagtgagaggctacagttcctgacgggattcctgcccctttgggaaagcaacttggcaggtgttttgagaggtttttttggactgggaacaaatcccaagggagaatccaaaggaggagggggcctcagatgtgccaggctattcctgacagcaagaggctgcaattggccatcgggccacagacatggccctggcaagcctgaagagctgccttaaagccatcttttgaggccatcgcctggagcggctccccatgtggagtcaaactgtgtctgtgctgagattaggatctagtgtacttccccagatagatggacaggtgccaagggcatcccagaaacagggcaagggcaggtggtctgtgggggcagtcgctaagggggatagaagacaggttgtgaaggagccaccttgggtcttttgggtctgtttttcctcccggtgtccttacccatggcctctcccctgccgcagggctttggtgctgtctggccagctccctgcccatccttctccagctcttttctgctttccagcatggaagtcggtctccagcccaggtggacacagctcgttc

SEQ ID NO: 111508 - DNA, 561 bp, Homo sapiens
tgattacactcatgatgtttctctcctgtatgaatttttagatgttgaacataagatgaatgtgtactaaaagctttcccacatttaatacactcatagggtttttctctagtgtgaattttacaatgctgaataaagtatgagtgaacactgaaagatttgccacaatcctcacatgtgtagagtttcttaccagtgtggattctctgatgtttactgaggatagagggccaactgaaagcttttccacattcattgtgctcataggtcttctctccactatgaaatctctggtgctggttaaaagctctgttctgattgtaagtttttccacacccagtactctcaaaccatctctctggattattcatcctctgattctcactaagaactgagctctgtctgggcactttcactaacacatctgtctgataggctctttctcctaattggaaactctggaggttaatgaggtcctcatgttgttgcaagttttctacacttgacacacttggatggagactctcctctctagaccctctaaaatgtttggcaggattt

SEQ ID NO: 111509 - DNA, 491 bp, Homo sapiens
gccaaattatcaagtgcagtgtgtgactatttgagggaaatgataatttttaacatattttttaaaacccttattatcgatgctggctatgagaacatagctatactgctaacgtttctccacaaggtggcattgccctacgctttaaaaagtggggctatttttatgtccccccccccacccccatattttcctttcacaaaacaatacaaaccaggtgatgacatacttgttttatcatgtctttttgaaagggtaaaaatatctttaaaacccatcttatcattttatttttatttatttattttttgagttggagtttcgctcttgttgcccaggctggagtgcaatggcatgatcttggctcaccgcaacctctgcctcccaggttcaagggattctcctgcctcagcctcccgagtagctgggattacaggcatgtgccatcacgcccagctaattttgtacttttagtagagatggggtttctc

SEQ ID NO: 111510 - DNA, 404 bp, Homo sapiens
ctcacacctggggcagcgtctgtcacccacctcacagctgaagaaactgaggcacgggcaggtggaggcaccctacccagcagtgggaagcccaggccaggccaagccccccagccctcgcttgggacagatgctgcccctgacctgctgcctgccacgcctgatctctcgccctcctcatggggccttggggaaaagctgccacccccaccagccagacaggaggcagccgagggagagggtggggcaggagggcccggaggccctaggaggggggcgtcaagggcagcccccagaagcaggagcccttttctcagaggccagaggtgctggggggagggacaacgaccggccacccacccaaggtccacccagaattcccatggctccggagagcattgcag

SEQ ID NO: 111511 - DNA, 247 bp, Homo sapiens
tgctcagcagagcccagcccatattgccaagctataagcagataaatggtggttgttttaagccactaaattttggaatggtttgttaatatagcaatagatatctgataaaaccagcttctcatttccttgatttcttcctctccagtgagaaagatgatcccaccctaaaccttgttgctaccaatagcttcacacactccatcatctctattttaagtatcacactttcctattaccaactcct

SEQ ID NO: 111512 - DNA, 945 bp, Homo sapiens
ggtaaatgagcattggcttcaacttcaagtccccagctgcactggcccttaacaagagggttagcctgtcctttgatgctttggaaacagacattgacttctctttagctgcgaaagtcctagatgatatcttccaacagcaggctgtttcatctacactgaaaatctgttgtttagtgtggctaccctcatcagtgatagctggatcttctggataactaacttcctgcagtttctccatcagcagttgctgcttcaccttccacttttatgttatggagatggcttctttgcttaaacctcatgaactaatcactactagcttcacacgtcttctgcagcttcctcacctctctcagccttcacagaattgaagaaagttagggccttgttctgggttaagctttggtttaagggaatgttttggctggtttgatctatccagaccactcaaacttactccctatcagcagtaaggccgtttcacttatcattcatgtgttcactggaatagcatttgtaattttcttcaagaattttttctttgcattctactgtttgttttaatgggcctgcctttcagcctgtcttgattttctacatgccttcctcactaagcttaatcatttctagcttttgatttaaagtgtgagacagctgactcctcttttcatttgaacacttaagaggccattgtagggttattaattggcctaatttcaatattttgtgtctcagggaatagggaggcctgaggggtaagagagagagagctgccattcagtggctgggcagtcagaacacatgtgtaccacatttatcgattatgtttgccatcttatgtgcgctttctgacaccccaaaacagtttcaatagtaacatcaaagatcactgatcggctgggcacagtggctcatgcctgtaatcccagcactttgggaggc

SEQ ID NO: 111513 - DNA, 252 bp, Homo sapiens
attctattttggtgcccataaatatgtactaatgctggccattgtttttgttgtagctaaattctcatttccaaaaattaccaccacttcaataagattttggctttttaaattatttaaggtagtatatcagtatgagtctgaacaataaattataatagaagattagttgtattttagatttgtcttaaatttatagcagagatatattattatccattattattgaatatgaatctagaccatgttttt

SEQ ID NO: 111514 - DNA, 507 bp, Homo sapiens
tcatagaagggatcacatatagtggagcacgaatgtccacaccatctatgttccgagcatcctctaaatgtcagatctggctgcttggaagctcggattcggctgtcagatctgcgatccggctggatcgtcttggatgagtcacctgcaaagtgcacctctaagaagctgaatgtgctgtctgtggttggggtaattaaatactgtggactaaagtgtccgagaatgcttgagagtgcaacctgactgtcatgttagcttggtagagaccgcacgcttaacaccgtcgagactggagcaaaacaaaaaccacaaatgttgagaacaaatgttacaatccacttgtctctagcataaaataaatgtagtattgcttctgcgaacatctgattctgcttttaactgcgtcctgatggatcttcttggatgagtcacctgcaaagtgcacctctaagaagctgaatgtgctgtctgtggttggggtaattaaatactgtggacttaaac

SEQ ID NO: 111515 - DNA, 275 bp, Homo sapiens
ttacatcttaaatacatctcgcaagtgactacaaattctttgagggcagagacaatatattttttttaccttttaatcccttaaagaccttctacctttcctttcacatggtggacttttattaatgtccgctgaatgaatataacatattcataatatagtcatgtctatacattgattaacatatttgttatcaactgcagagtaggcccagtctttctcttttactctctgtccttttaagaattttaagagctttttggggaaaataaagt

SEQ ID NO: 111516 - DNA, 148 bp, Homo sapiens
cctctctcactcctctagactcagtttaaaattcatgtattttcctgaagtcatctctaactagccccaccaaaaggcaatcacctttgagaggagctgactcatgaaggtcaatgggaaacctcagggggctaggattcccactgga

SEQ ID NO: 111517 - DNA, 624 bp, Homo sapiens
gtttcagaacatttcttatcaccctaaaagaaccccatatctcccaattcttccctatccctgtccccaggcaactactaatctactttctatctatggatttgcctgttctggatatgttatataaatggtaatatgtggccttttgtatttggcttctttcactttccttaatgtttctaagattcattgatgttgtagcttatattagtagttcttttttttttttttagacagagtcttgctctgtcgcccagattgtagtgcagtggctcagtaatggctcactatagcctcgacctcccatacttaagtggtcctcccactttagcctcctgagtaggaatcagtagtaaccttactccttatgtcaaaataactttcaaatggatcaaacatttaaacgtaaaaaaggaaaccatgcagatcactagaagaaatatttgtggtttttttttttatactattaaaatgggccaggcgcagtggctcacgcctgtaatccaagcacttaaggaggcagaggcaggcagatcacaaagtcaggagattgagaccatcctggtgaacacggtgaaaccccatctctactaaaaatacaaaaaaattagccgagcatggtgg

SEQ ID NO: 111518 - DNA, 359 bp, Homo sapiens
tgaggggacccaggggctcaggccctcccaccatgctcactcttgatggaggagtggaatcatcaccacagacactgcgtgggaactctcgctacacacccagcgcaacgctctggcccaaccagtcccacccatccagaggtcatcttgggctgccttctgtctgctcagctcacaaggcccaccaatgtctgaggtttccaaaatcgccttcccagtgggtgcttctgtcctctattagccttgctcctttcaacaagaaaatggccttgatgcaaaccagacttacagcgcagctccagagcactgagaatgaagcctagcccatttctgtggagggatgtccatgatttgatctg

SEQ ID NO: 111519 - DNA, 323 bp, Homo sapiens
catgccatgtggagcacaacagcgaggcttggttttgctcactgcttagagaagtgcctggcaggtagcaggcgctcagtgcatgtctatggaataaagcagcatcttctgaccaggcgtggtggctcatgcctgtaatcccagtgctttgggaggccgaggcagatggatcacctgaggtcaggagttcaaaaccaggctgaccaacatggtgagaccccatctctactaaaaatacaaaaattagccgggtgtggtggcgggtgcctgtagtcccagctactcaggaggctgacggaggagaatagcttgagcccgggagg

SEQ ID NO: 111520 - DNA, 215 bp, Homo sapiens
tcttaaagacacccagcgggcctgctgctgctgctgctgctgctctgcctgagctccaaatatcaacagccatagggctgcggccactgcacccccgggataggggcccacaggaggagcccttcttgacagctcctgtagggctccagccttatggctgggagggcccctgggagccgcccagcccacctcctccctggggaaggggcagagaa

SEQ ID NO: 111521 - DNA, 307 bp, Homo sapiens
gtttgaacatgattctttttttgtggaggtgggaggtggctggtcacatgtctatttctgaaccggctgctgtggccaggagaataccatgctctgatgggccaggccagggtcatgtgcctattccttgagttgaggttggggtggcttccacagaggaaactgaggaactgttacctcagaagggtaaataagatgtcaggaggcaatcagtgtttatatgggcagtgacttctaaatttaagccagaatttctgattctcagtcctgttgacatgtggggccggatcattttctgtcctgggag

SEQ ID NO: 111522 - DNA, 2907 bp, Homo sapiens
  misc_feature (358)..(358): n is a, c, g, or t
  misc_feature (597)..(597): n is a, c, g, or t
catgaagacctatggtttgagttgtctgatgagacgctttgtaactggatgatgtttgtacggccagcccagaatcacctggagcagaacctggtggcttaccagtatggccaccatgtgtattatacaaccataaaaaatgtggagcccaagcaggaactgaaggtgtggtatgccgcatcctatgctgagttcgtgaaccagaaaattcatgacatttctgaggaagaaaggaaagttcttcgagagcaagagaagaattggccctgctatgaatgtaaccgccgatttataagctcggagcagttgcaacagcatctcaattctcatgatgagaaactagatgtgtttagcagancaagaggcagaggaaggggacgaggcaagaggcgattcggtccaggtcgacggccggggcgtcctccaaaatttatccgcctggaaatcaccagcgaaaatggggaaaagagtgacgatgggacacaggacttgctacattttcccacaaaggagcaatttgatgaggctgaaccagccactctgaatgggctggatcaaccagaacagaccactatcccaatccctcagctgccacangaaacccagtcttccctggaacatgaaccagaaactcacaccctgcacctgcagccgcagcatgaagagagcgtggtgcccacccagagcacgctgacagccgacgacatgcgcagagccaagcgcatccgaaatgcagctcttcagcatctgtttattcggaagtccttccggccttttaaatgcttgcagtgtgggaaggccttccgggaaaaggacaaactggaccagcacttacgcttccatgggcgggaggggaactgcccactgacctgtgatctctgtaacaagggcttcatcagcagcacatccttggagagccacatgaagctccactcagaccagaagacttactcttgcattttttgcccagaatcctttgaccgccttgatttgttgaaagatcatgtggccattcatatcaatgatggctacttcacctgcccaacttgtaagaaacggttcccagattttatccaggtgaaaaaacacgtgcgcagcttccactcagaaaagatctaccagtgcacagagtgtgacaaggccttctgtcgccccgataaactgcgactccacatgctccggcattcggaccgcaaagacttcctgtgttccacctgtgggaagcaatttaagcgaaaagacaaactacgggaacacatgcagaggatgcataatcctgagagggaggccaagaaagccgaccgcatcagccgctccaagacgttcaagccccgcatcacgtccacagactacgacagcttcacgttcaagtgccgcctgtgcatgatgggcttccggcggcgcggcatgctggtaaatcacttatcgaagagacacccagacatgaagatagaagaggtgccagagttaactctacccatcataaaacccaatcgtgattacttttgtcagtattgcgataaggtttataaaagtgccagcaagcgcaaagcccacattctgaagaaccacccaggagcagagctcccaccgagcattcggaagctccgacccgctggtcctggagagccagaccccatgctgagcacacacacccagctgacgggcaccatcgccacccctcccgtctgctgtccccactgctccaagcagtacagcagcaagaccaagatggtccagcacattcgaaagaagcatccagagttcgcccagctctccaacaccatacacacaccactgacgacagctgtgatcagtgccaccccagcggttttgactacagacagcgccactggagagactgtggtgacgacggacctgctcacccaagcaatgacagaactgtcccagaccttaacgacagactaccgaacgccacaaggggattaccagagaattcagtacatccctgtgtcgcagtcggcgtctggcctccagcagcctcagcacatacagctgcaagtggttcaagtggcctcggccacttcccctcaccagtcacagcagtccactgtggatgttggccagctccatgatcctcagccctacccccagcacgccatccaggtgcagcacatccaggtcagcgagcctaccgcctcggccccgtcctccgcccaggtatctgggcagccgttgagtccctcagcccagcaggctcagcaggggctcagcccctcccacatccagggcagttcttccacacaggggcaggctctgcagcagcagcagcagcagcagcagaattcctctgtgcagcacacgtacctgcccagtgcttggaattccttccgtggctattcatctgagattcaaatgatgacgcttcctccgggtcagtttgtgattacagacagtggtgtggcaactccagttactactggccaggtgaaggcggttacttcgggtcattatgtgttatcagaaagtcaatcagaattggaagaaaagcaaacttctgccctctctggtggagtccaggtcgagccacctgcacacagtgactccctggacccccagaccaacagccaacagcagaccacacagtacatcatcaccgctgggtccaaagtgatccaaaacgaattcacggtgggggaggaatgtgagctggagacaatgacaggggagaaagtcaagacagtggttcagttggaaggtgacaataaactggtgacaactttcaaaaacatcaagtctgtgaccgaactcaacggcgacataatcaccaataccatgacattgggtgacattgtcttcaagagaatcagcaagagaatttaaacaagtctgcatttcatattattttagtgtgtaaaattaatgtaataaagtgaactttgtttt

SEQ ID NO: 111523 - DNA, 344 bp, Homo sapiens
atataaggttcattaagcagagattgagagaggactgaaaagctatgtaatctcagctccgcctataatagagttggagtgtttttcttaattttaaaaaggaagggcttaagattacttaaatattttaatagacactttctgcaacagacgaggggtaaacagagaccagatagttggcttccactttaaaaattctgaaagcagaaaaatggctggatagctagtttaatagctagagctaaaaaagaagctgcttttgttgtgtcaaagaatgcttgaatgcttgagtgttttctctggcccacatgtagatcaggaattagaataaatctaggagtact

SEQ ID NO: 111524 - DNA, 376 bp, Homo sapiens
tgttggccaggctggtctcgagctcctgacctcgtgatctgcctgcctctgcctcccaaagtgctggaattacaggcgtgagccaccgctcccagcccagaaatcttattttttatcacttttccatctgttcatccttccatccatccatccttacattatctatgcatccatcccaccatctagtcaacaaatatttattaagcatctaatatgtgctgtgtactgagtgtaggtactggggatacaacggtgaataggagagtcatggctgtacttgtatagccaatattcactggagaaacagacaaaacacaagtaaacagaccaattaattgtaagtttctatcagcaaagaaggtccaggtatgctggg

SEQ ID NO: 111525 - DNA, 169 bp, Homo sapiens
gcagtggcgcgatcttggctaaaggcattctcccacttccttcataagtagctgggactacaggcccgcaccaccacgcttggctcactttactatttttttgtagaaatggggttttgccatgttgctcaggctggtcttgaactcctagggtcaagcgacccaccca

SEQ ID NO: 111526 - DNA, 362 bp, Homo sapiens
agcccgctacttcagtgaaaaggaagaatcaaactccagcttctccctgcaaaaacgctcacggacgcagacaccgcccggccccatctcctgggagctgcaggtggaggcaccgtaatggtggacggagacggctgaggggaaaggtggggcgcgctcgcgtgcccctcccgcagtacccctaggtcccgacaagtcgctgccacggcaacctgaggccgcagggcgggggaccccctactcccagaccacgatgggtaccttcgagtactcctgagccagcttctggtacttcccctgcaactcagccgaggccatggcctcccccgccccgtacaggccaggccgcccaggcggctcag

SEQ ID NO: 111527 - DNA, 299 bp, Homo sapiens
gggaatacaggcgtgagccaccgtgcccggccgaaacatcctgacatgatcttgttggtattttcttctctgtgtagacgcataagcgtcttaagcattcacatgcccgagtgggaggtgtgtgtccctatgtttgtgtgtacatgtatggataggccattaagatctggcagggtgaggcccgacaacagtggcacaattggcaggaggatttggtcctctcggtcactgggtgggtagagtcaggttcaaagttctggaggttttcccttctctatgatcagcaccaaatagaaacg

SEQ ID NO: 111528 - DNA, 272 bp, Homo sapiens
attcagggttgtcaggagctggtactacttgttcccaaactagaagttcaccaaaggactgacggccttcaggaggtaaacaatagcgatccctggagataatatgtgtctgcattcacccaggggcttattaaaaaaaaacagctttcagagaaagaacatacagagaaaggctgtgttaactcctggttactcagaacttctatctcatatccctgcgagtgagtgtctggcgataactcaagtcccaccttctcaggagtttgtatcag

SEQ ID NO: 111529 - DNA, 779 bp, Homo sapiens
gtgtgtgtgtgtttgtattttgatccaaatgcaaaacacatttcagtgtagccacatgtaactttattcataaatttacttatccaataatgatatttttattatccgccatgtgctacacactggaatgttctttttcttttttaacaaaattatatacatatcatttctgctcattaataacattaatgcaagatcataacttaaaaccgtgtgtaagtttcatatgtggataaaaatattgacttcctgatagactcgtctatcaagaactggtcccttgcctataaccaaatctaaataaataaagccattaaaaattgactatcccagacacttcatactcaacaacactaaaatgtcagcaaattttgaaataagatgattagcaatacacatttatctacttacctgtggctttcaataagcagaataaacaaaaaccagaatctcttgagaatagtaaccttccagaaatctgctttaatgactctaaaggactcaaggcctagttatctaaatgctgccaaaattgtttgtatttgatcaagacttaccttttctttaaaaccttccctgctcctactcaggcagaataattgcttcttcctttggtctccactgctcccagtagtcacttcgtttatttcattcctcataccatattgcaatcacaaatttatttggccattcccctgaggttcaggattatgaactttgacttatttatttttgtatcctgtaccttagcactgttcttggcacagagtggacatttg

SEQ ID NO: 111530 - DNA, 200 bp, Homo sapiens
ggaactcttatacacttttggtgggaatctaaattagtacagcctctatggacaacagtaagcaggttcctcaaaaaactgaaaacagaactatcgtaagatcgggcaataccactgctgggtatatatccaaaagagaaaaaatcgtcaggtacagtggcccacgcctgtaatgtgagcactttgggaggccgaggcag

SEQ ID NO: 111531 - DNA, 272 bp, Homo sapiens
tttttttaattaactgggcgaagtggcatgtgcctgtaatcccagctactctggaggctgaggtgggaggatcacttaagcccaggagatccaggctgcagtgagctatgatcctgccactgtactccagcctgggtgaaggggtgagaccctgtctccaaagaaaaaaaataaaagaggcctaaaaataaggcaaatgtctaaagggaccgctctataaacaaagtgggccagaattttagattctgaaggcagacaaggaatatacgtga

SEQ ID NO: 111532 - DNA, 360 bp, Homo sapiens
cctcagcctccctagtagctggggctacaggcacccaccaccacgcccggctaatttgtttgtatttttaatagagacggggtttcaccgagttagtcaggatggtctcaatctcctggcctcgtgatccgcccgcctcggcctcccaaagtgctgggattacaggcgtgaggcaccgcgcccggcctgtttctgtgtttccttggatgctaggctgcttggttgtgatgtgacctcagctctctaattggctcaagaaaagttatacttttgtcacttatcttttattgttcttagaatgggattgatgcattctggccttctacattttaggcggaaatagaatccacacacacaaaa

SEQ ID NO: 111533 - DNA, 240 bp, Homo sapiens
gtaaaagcataaaataatttaatccagtatagatatctgatttgtggtttagagtgcaaaatcttttcataaattattcatagaaagcaaaatatccttttctcctaatggtattaaatagaatagttttctgctctgctaggaatgcatattccggactccgtttgtttccttaccatgttattgtcagaggctctttagggcatcatctcttttatatatttatttatatatatataa

SEQ ID NO: 111534 - DNA, 515 bp, Homo sapiens
tgctggaatatctggcttacacagatgctcccacctgagcccctgtgtgcccagaagtgacataggcattcaggaaagggactgagggaggaaagaaggagccattcctcttcccaggggcgcctgccctgggttcctgagggacgctccatgtttacatctccaaagcccagtcccaaacacgccagagtgcaatgccctccctcagacccagggccatcctcagagcagccgggaggcagcctgtccacccttaccacaggcaggtcgcccaggcagcctcctcttagagctcctgaattctggagcatgaaatagaaatgtgaaaaacaggctggcgtggtggctcacacctgtaatcccagcactttgggaggctgaggtgggcagatcatttgagatcaggagtttgagaccaacctggccaacacagtgagaccctgtctctactaaaatacaagtaaataagccaggcatggtggtccacacctgcagtcccagttacctgggaggct

SEQ ID NO: 111535 - DNA, 281 bp, Homo sapiens
ctgctcagggctgaatcccaggtgacctgctctgaaaaataacttaacctctgtctgcctgtgaaatagtgatgtagtggcacccacctcatagagtttagtgaggattagatgagcaaatgcaggcaaatcccctggacctgagcaggcaatgctggctgttagcattcttgtttgctatttacctgcctagatgatgaagatcaggtgggagttgaaggtggggggatgcagaggatgtgggaagatgggcttgaagggaaagggaggcagggttacaa

SEQ ID NO: 111536 - DNA, 673 bp, Homo sapiens
gatagacagatagatggatagacagacaaataaaagacccaggtgactaaaatcaggaatgaaagggagaacatcactactgaccttctagaataaaaggattataaaaagaatactatgaacagcagtatgccatcaaattagataacttagatgaacaaaatcctagaaagatgaaatgactgcagtttactcaagaagaaacagagaatccgaatagaccaaaaacagagatattaaatttaaaattttctgacaaagaaaaaccaagggtcatatgaattccctggtgaattctaccaaacatttaaagaataataacacaaaatattccagaaaatagaagaggagggaacatttcaattatatctatatacatgagcaataaacaatttgaaaatcaaattaagaaaacaattgcagttataaataatagcatcaagaagaatataatatttagggatacatttttaaaatgaagtttaagacttgtaaatggaaaactacagaaatattcttgaaagaagttaaagaagatctaaataaatgaaaagacatctcatgttgttggatcacaacacttaatattgttcagatggcagtactccccaaattgatctacagattcaacgtaatctttatcaaactatcatctggctttttaaaagaaatt

SEQ ID NO: 111537 - DNA, 943 bp, Homo sapiens
gcaggcgattctcctgcctcagtctcctgagtagctgggattataggagtgcaccaccatgcctggctaatttttgtgtttttggaggagacagggtttcaccatgttggccaggctggtctcgaattcctgacctcaagtcatccacccacctcggcctcccaaagtgctgggattacaggcatgagctaccgcacctggccaccagttgtatctttttgcattccccagctcagaccccttccccactggaaggctgccatggtctttctgctctataccctttcctggttcctcttctccctccctctccagctgctttctggagcctgtcagagttgcagtgaggacaggaaggagaatgaaggcacaggacatttcttaattggctgggtggctttatgtcctctgaacctggcaggtggttggagctggtgtctttgggtgggtctggtaggtgatgcaagtgaacttttttttattctgaggtggtttctggcatttgaaatttccttgctggacttgttgcttttatagtttcttttcctaggaagctgcatctctgctgtgggtagtcatatgggacagcttcccagcacctggcattttgcagaccacagccagcttctttctgcagaggtctctggtctctatgtcctcatggttactttggaatcttgatatctgtccttttagttccatctcaacattcagttctagaatggctctttggagggtcaccatttgccaggcctcttctgtgttggagaaacacagaaaaggaacaagtacagtccaacatgattatatcaccattgatgggatagcaaccttgaaagatttccttataccgccacccctggtcatcttgtactgggtatctcctaaggcttcatgagtgacatatctatgacccattctcaggagtagagatttctgctga

SEQ ID NO: 111538 - DNA, 279 bp, Homo sapiens
agtgttgtacctgagtgaggtggggagaaagtaaggatgtgtgagcatgcagctctttgcccgtttgccttgggaaatgagtactggcttaccgcgtcctatgcgacagccttcgaaaaacaactctgctatcccagtctcgtcgtgtgtgaccttggacttctgccaaggcgtgggcctcagtttccctttattaccaaatgccgagtacttgtatgttgtcacttctgctgcacccgagggtccacaggatcgtgaagtgtctgcagtaaatgacat

SEQ ID NO: 111539 - DNA, 293 bp, Homo sapiens
tcatggatttatggatgatacacctctctaaaagtttctatacctgaggtataaactatattggataatttacactaatagtaaagcaaaatatttaaagaacaaggcaggatacaaacttactctttccccaaggaagtttccccaagatgttgtaagcaagaattcttgacaaaaatagccaaaccatgtactttgaggtttcgttcttcacaaagaattgcttttgtgaatccacaggctttattaacaggtagttttggccgggcacggtggctcacgcctgtgatctc

SEQ ID NO: 111540 - DNA, 241 bp, Homo sapiens
taaatttgggtttctttgcccatttttaaataatgcttacaaaagaatggctttgaataatgttaagtgactttaccttcagtggtgatcgaaagaaaattagtaatattcaatccattcttagtaccttgtgtaatgaacacgcatgcttgtttcacctataattacgactaaacaggaagttaataccttgtcagtgatgcagtgagatactgtgcagtgcctactgttaatccttaag

SEQ ID NO: 111541 - DNA, 263 bp, Homo sapiens
cagaaccccaggaccctgtcccttgttcctccttttcaggtgcttatacttaagtatacatgaagagagtgacaggaagctatccagatgtgggcggggtttctgacctggctggcatgttttagggtgagagggtagggtgccagctgttacatcgcctcctctttcccacagtgttagaatgaggagtgctttacgttactccagcgcccctttattcatttattcaatatgtttttactgaacctctactttcagtggtt

SEQ ID NO: 111542 - DNA, 309 bp, Homo sapiens
tctcgaactcctgacctcaagtgatccacccacctcagcctcccaaagtgctgggattacaggcataagccaccatgcccggcccaaatgggctaatgttttaaacagatccttcttgtctgccctgtaggaggacaaattatcaggggcaggggtggaagctggagcccagaaaggaggggactgcaggtgggaagtgatggtggctggaccaggatggaggccactgaggggtatgaagcagtcggatttgaagctgtttaaaaggtggaggtgagaggatttcatgaaggagcacatgaggacaca

SEQ ID NO: 111543 - DNA, 397 bp, Homo sapiens
agtagagatggggctttaagcatgttggccaggctggtctcgaactcctgacctcaggtgatccacccacttccacctctcaaagtactaggattacaggcatgagccaccacaaccagcagaacagctttaattgatccttaattgtatcttcttcccattcactaaacaaattttttttttctttttttttttgaatgggagtctcactctgttacataggctggagtgcagtggtgcgatttcggctcactgcaatctccacctctcgggttcaagtgattctcctgcctcagccttccaagtagctggaatgacaggcatacgccactacgcctggctaatttttgtatttttagtagagacagggtttcgtcaagttggccaggctggtctt

SEQ ID NO: 111544 - DNA, 266 bp, Homo sapiens
gaggccagacccaccaggggccccgtgccctcacccacaaagctcagattgagatggagtcaagaatttcatggtggggaccgcagagcctggtgggccagcctgctagaggggcagctcacagccaccatgcatgtccggagctggcagcggctctgcagaagcttctagatagttcccactgtcctgttgggatacagctctgtctgcataaaccaggatcgtccatagagcggggcgaggctcctcctcccccagagcagtgg

SEQ ID NO: 111545 - DNA, 690 bp, Homo sapiens
tacatattgaactcaggaagggactataattcatgaatcctcatagcatttgtatgaggctgaagaggggaatttgtaactctctgtgtttgttagatttttaaaaattaaattaaaactgatttcatatagagatgtttcaattatgtaatttagcctctaagatctcaaatcattgccctgtgctgcatttaagcgaataagcaaccaaagtttttaaagtcttgtatacattagataatatcctttaaaatcattctttcagaacaagtgcattggctccacccataagcttcatggcagctgttatgcctactttcttgttggtatccatgttccagaatcacacccagctgcctgcatttgcatcattgcatcatttgcatcattgcatcatttgcatcattgagggtgatagatgtctgaccttcagataaaggatgacgtctctatattttttcttacattgcccagtaaaaaatccagctggaattaaatcataccagatatttactcctgaggcaaaagtattttggggccaggcacggtggcttacgcctgttcatcctggcactttgggaggctgacgtgggcagatcactggaggtcaggagttcaagaccagtgcagcctgcatagtgaaaccttgtctctactaaaactacaaaaattacctgggcatggtggtgg

SEQ ID NO: 111546 - DNA, 531 bp, Homo sapiens
ttaattatgaaggtcagctttcatttgctgtgaaaacaacacggataatttgggaccataatacgttctgaaatagttcaagacaagcatgttaaaaatgagggtttttttttttccccactgaaccttccctcaagattttattgtcttcataataaaagatgatgcttagaactagttaatttggctctttctcttcttttctcctcccggttcaaaatgcttgcttctcttaataggcagcattctcttagatttgcaactgggctcaaagcactgaagcctcatcacagtcttctttttggcagtagcctttttacagaattccaggatcatgaccctgcattccagcctgtctgaaacagtgagaccctgcctcaaacaaacaaacaaacaaattcatttggctgtgtcttccacctgaaatcagattgggatctcatagtactacagctctcatagcattcaggtagatggagctagaaataagcccaagtatgcattttccttcaggactttttaacactaagc

SEQ ID NO: 111547 - DNA, 728 bp, Homo sapiens
atatcagcattagtatattttatgtctttttaatttgaggtaattagattttttaatttttaaaaagaatggaataggaatcattaaaaacagactaaagtaacatgaaatcttaagatgctacatataaaatacatcactttaaatatgaaactaatttttaaagtcctgcagattaatctgttggagatatatattgaaacccactttcagagacattaaaatgcggggtaaaaagtgcattttagaactgataaactacttcatcaatgattttaatggttccttttctttagattttcaaattcgttgatattggcaaacagaattggctttcagttttcagtctctgtatatatatttgtatttctactcatagttttatttttaaaccactttattcctctaaattgatttgaaggagtcccattcattttacttgttttttttttaaaaaaaaccttatctgggttttcttcatgcttttgactatttttgtttgctttttctatttcaaaaatatatttcactattttctttttatttgtgtgtatttctgttgagtacatgtgcttggttaatatattttcagtctcttttaaattggaagcatttaaggctacaagatttcctttgaatattgctgtatctggggcccatggtttttttttcttcttgagatggagtctcgctctgtcaccaggctggagtgcagtggcgtgatctcg

SEQ ID NO: 111548 - DNA, 1020 bp, Homo sapiens
ttaattaaataagggttactggaacacaagcactgtgacactgtgacagtaaacctgatcaccaaggtggctatgaaagtgactaatgagtgggaatgtctacagtgtggagacactgggcaaagggaggactcatgtcctggggaggaaggagcgggacagtgagagatttcatcctgctgctcagaatggcatgcaacagaaaacttatgaattgtttatttctggaatttttccatttaatattttcagaccatatttgactgaaggtaactgaaggtaactgaagcctcagacagcaaaattgcggataaggggactactgtatacccatctccatttgcacctctggtaactgtgagatcagaatgtgcagcagaaggctgtgtgcctcacaataaccatggagttctgctcaatctgctgccttggcgactctggatctctcttccaatagtaaaatgtcacactgcaaactctgggcctggggtcccatgggacttcagtggttccaggactgatttcactgccatcacttatatatggttagatatggattcaacttgtttgctgtgaggttaagtgtctgaatgtctacatgtctatacatctttaaaactacacacaaaaattgctaaagacaagaaatttgggaatattaaatttacaatacaatttaggaaaccaaacagaaaggaggtatactaactgggttagaagattatagctgtaaattgttgggacttaagaaaaaccacacatttagacaaatagtttctcaatcttctttatgcagaaactcttactattcaacatatctcccctacacccacacccaaagagcagtcagtttagatacaagtttgagaaacagaaaggaggggacaaaggttggaggatgtcaaggccaaaggataggcctctcctctagttcagaggactctttgtctgcctcacaccctcttctccctggggactggctgtgtgctgactgtccccctgctgggatacatgaacagt

SEQ ID NO: 111549 - DNA, 2146 bp, Homo sapiens
ttaattaaataagggttactggaacacaagcactgtgacactgtgacagtaaacctgatcaccaaggtggctatgaaagtgactaatgagtgggaatgtctacagtgtggagacactgggcaaagggaggactcatgtcctggggaggaaggagcgggacagtgagagatttcatcctgctgctcagaatggcatgcaacagaaaacttatgaattgtttatttctggaatttttccatttaatattttcagaccatatttgactgaaggtaactgaaggtaactgaagcctcagacagcaaaattgcggataaggggactactgtatacccatctccatttgcacctctggtaactgtgagatcagaatgtgcagcagaaggctgtgtgcctcacaataaccatggagttctgctcaatctgctgccttggcgactctggatctctcttccaatagtaaaatgtcacactgcaaactctgggcctggggtcccatgggacttcagtggttccaggactgatttcactgccatcacttatatatgatgatgcagacttcaagcatcaaagtacacaaactgaagaaactttatcctttgtatataattatcttaaatatatgccatcatttcaaggggagcttatgctaagtgtgacttcataaacaaatcatttgtgaaagagaaaaaccacatccagggtaaagtcataaggtgaaaaagcctatttcagagagcacttcctgaaagagacaaagcagcaattaaagtcagcccagcaccaactccgacgccaagcgttacactggaaactactttttaaagcaacaaaagagtctaaaacaaaatacaacatttcttaaatacactgtttccagaaagagctattttaacagaagcaactcaaagatatcccttcgacagaagtggaagtgctgaaaaatgctcatctctcacacagacttttgatggacaggagtttctaagtatcatgcctaccaacaagctgtaaaatgatcaccctgaacaatcaagatcaacctgtcccttttaacagctcacatccagatgaatacaaaattgcagcccttgtcttctatagctgtatcttcataattggattatttgttaacatcactgcattatgggttttcagttgtaccaccaagaagagaaccacggtaaccatctatatgatgaatgtggcattagtggacttgatatttataatgactttaccctttcgaatgttttattatgcaaaagatgaatggccatttggagagtacttctgccagattcttggagctctcacagtgttttacccaagcattgctttatggcttcttgcctttattagtgctgacagatacatggccattgtacagccgaagtacgccaaagaacttaaaaacacgtgcaaagccgtgctggcgtgtgtgggagtctggataatgaccctgaccacgaccacccctctgctactgctctataaagacccagataaagactccactcccgccacctgcctcaagatttctgacatcatctatctaaaagctgtgaacgtgctgaacctcactcgactgacattttttttcttgattcctttgttcatcatgattgggtgctacttggtcattattcataatctccttcacggcaggacgtctaagctgaaacccaaagtcaaggagaagtccataaggatcatcatcacgctgctggtgcaggtgctcgtctgctttatgcccttccacatctgtttcgctttcctgatgctgggaacgggggagaacagttacaatccctggggagcctttaccaccttcctcatgaacctcagcacgtgtctggatgtgattctctactacatcgtttcaaaacaatttcaggctcgagtcattagtgtcatgctataccgtaattaccttcgaagcatgcgcagaaaaagtttccgatctggtagtctacggtcactaagcaatataaacagtgaaatgttatgaataataaggttctttcatttcaatcccatcaaaattcacttcactaactactctggcgtcaatggatattctgtataatactatcaagtcccttttctcttgaaaaaataaattcattatcttcattttaaaaactta

SEQ ID NO: 111550 - DNA, 2180 bp, Homo sapiens
ttaattaaataagggttactggaacacaagcactgtgacactgtgacagtaaacctgatcaccaaggtggctatgaaagtgactaatgagtgggaatgtctacagtgtggagacactgggcaaagggaggactcatgtcctggggaggaaggagcgggacagtgagagatttcatcctgctgctcagaatggcatgcaacagaaaacttatgaattgtttatttctggaatttttccatttaatattttcagaccatatttgactgaaggtaactgaaggtaactgaagcctcagacagcaaaattgcggataaggggactactgtatacccatctccatttgcacctctggtaactgtgagatcagaatgtgcagcagaaggctgtgtgcctcacaataaccatggagttctgctcaatctgctgccttggcgactctggatctctcttccaatagtaaaatgtcacactgcaaactctgggcctggggtcccatgggacttcagtggttccaggactgatttcactgccatcacttatatatgatgatgcagacttcaagcatcaaagtacacaaactgaagaaactttatcctttgtatataattatcttaaatatatgccatcatttcaaggggagcttatgctaagtgtgacttcataaacaaatcatttgtgaaagagaaaaaccacatccagggtaaagtcataaggtgaaaaagcctatttcagagagcacttcctgaaagagacaaagcagcaattaaagtcagcccagcaccaactccgacgccaagcgttacactggaaactactttttaaagcaacaaaagagtctaaaacaaaatacaacatttcttaaatacactgtttccagaaagagctattttaacagaagcaactcaaagatatcccttcgacagaagtggaagtgctgaaaaatgctcatctctcacacagacttttgatggacaggagtttctaagtatcatgcctaccaacaagctgtaaaatgatcaccctgaacaatcaagatcaacctgtcccttttaacagctcacatccagatgaatacaaaattgcagcccttgtcttctatagctgtatcttcataattggattatttgttaacatcactgcattatgggttttcagttgtaccaccaagaagagaaccacggtaaccatctatatgatgaatgtggcattagtggacttgatatttataatgactttaccctttcgaatgttttattatgcaaaagatgaatggccatttggagagtacttctgccagattcttggagctctcacagtgttttacccaagcattgctttatggcttcttgcctttattagtgctgacagatacatggccattgtacagccgaagtacgccaaagaacttaaaaacacgtgcaaagccgtgctggcgtgtgtgggagtctggataatgaccctgaccacgaccacccctctgctactgctctataaagacccagataaagactccactcccgccacctgcctcaagatttctgacatcatctatctaaaagctgtgaacgtgctgaacctcactcgactgacattttttttcttgattcctttgttcatcatgattgggtgctacttggtcattattcataatctccttcacggcaggacgtctaagctgaaacccaaagtcaaggagaagtccataaggatcatcatcacgctgctggtgcaggtgctcgtctgctttatgcccttccacatctgtttcgctttcctgatgctgggaacgggggagaacagttacaatccctggggagcctttaccaccttcctcatgaacctcagcacgtgtctggatgtgattctctactacatcgtttcaaaacaatttcaggctcgagtcattagtgtcatgctataccgtaattaccttcgaagcatgcgcagaaaaagtttccgatctggtagtctacggtcactaagcaatataaacagtgaaatgttatgaataataaggttctttcatttcaatcccatcaaaattcacttcactaactactctggcgtcaatggatattctgtataatactatcaagtcccttttctcttgaaaaaataaattcattatcttcattttaaaaacttatataaaacatttttgtgaattattcagagaaaag

SEQ ID NO: 111551 - DNA, 2177 bp, Homo sapiens
  misc_feature (1822)..(1822): n is a, c, g, or t
  misc_feature (1824)..(1824): n is a, c, g, or t
  misc_feature (1826)..(1826): n is a, c, g, or t
ttaattaaataagggttactggaacacaagcactgtgacactgtgacagtaaacctgatcaccaaggtggctatgaaagtgactaatgagtgggaatgtctacagtgtggagacactgggcaaagggaggactcatgtcctggggaggaaggagcgggacagtgagagatttcatcctgctgctcagaatggcatgcaacagaaaacttatgaattgtttatttctggaatttttccatttaatattttcagaccatatttgactgaaggtaactgaaggtaactgaagcctcagacagcaaaattgcggataaggggactactgtatacccatctccatttgcacctctggtaactgtgagatcagaatgtgcagcagaaggctgtgtgcctcacaataaccatggagttctgctcaatctgctgccttggcgactctggatctctcttccaatagtaaaatgtcacactgcaaactctgggcctggggtcccatgggacttcagtggttccaggactgatttcactgccatcacttatatatgatgatgcagacttcaagcatcaaagtacacaaactgaagaaactttatcctttgtatataattatcttaaatatatgccatcatttcaaggggagcttatgctaagtgtgacttcataaacaaatcatttgtgaaagagaaaaaccacatccagggtaaagtcataaggtgaaaaagcctatttcagagagcacttcctgaaagagacaaagcagcaattaaagtcagcccagcaccaactccgacgccaagcgttacactggaaactactttttaaagcaacaaaagagtctaaaacaaaatacaacatttcttaaatacactgtttccagaaagagctattttaacagaagcaactcaaagatatcccttcgacagaagtggaagtgctgaaaaatgctcatctctcacacagacttttgatggacaggagtttctaagtatcatgcctaccaacaagctgtaaaatgatcaccctgaacaatcaagatcaacctgtcccttttaacagctcacatccagatgaatacaaaattgcagcccttgtcttctatagctgtatcttcataattggattatttgttaacatcactgcattatgggttttcagttgtaccaccaagaagagaaccacggtaaccatctatatgatgaatgtggcattagtggacttgatatttataatgactttaccctttcgaatgttttattatgcaaaagatgaatggccatttggagagtacttctgccagattcttggagctctcacagtgttttacccaagcattgctttatggcttcttgcctttattagtgctgacagatacatggccattgtacagccgaagtacgccaaagaacttaaaaacacgtgcaaagccgtgctggcgtgtgtgggagtctggataatgaccctgaccacgaccacccctctgctactgctctataaagacccagataaagactccactcccgccacctgcctcaagatttctgacatcatctatctaaaagctgtgaacgtgctgaacctcactcgactgacattttttttcttgattcctttgttcatcatgattgggtgctacttggtcattattcataatctccttcacggcaggacgtctaagctgaaacccaaagtcaaggagaagtccataaggatcatcatcacgctgctggtgcaggtgctcgtctgctttatgcccttccacatctgtttcgctttcctgatgctgggaaccgcggggggggagaaaaaccaagttttttaaacnananttcccccctggggggggaggcccctttaccaccttcctcatgaacctcagcacgtgtctggatgtgattctctactacatcgtttcaaaacaatttcaggctcgagtcattagtgtcatgctataccgtaattaccttcgaagcatgcgcagaaaaagtttccgatctggtagtctacggtcactaagcaatataaacagtgaaatgttatgaataataaggttctttcatttcaatcccatcaaaattcacttcactaactactctggcgtcaatggatattctgtataatactatcaagtcccttttctcttgaaaaaataaattcattatcttcattttaaaaactta

SEQ ID NO: 111552 - DNA, 2338 bp, Homo sapiens
ttaattaaataagggttactggaacacaagcactgtgacactgtgacagtaaacctgatcaccaaggtggctatgaaagtgactaatgagtgggaatgtctacagtgtggagacactgggcaaagggaggactcatgtcctggggaggaaggagcgggacagtgagagatttcatcctgctgctcagaatggcatgcaacagaaaacttatgaattgtttatttctggaatttttccatttaatattttcagaccatatttgactgaaggtaactgaaggtaactgaagcctcagacagcaaaattgcggataaggggactactgtatacccatctccatttgcacctctggtaactgtgagatcagaatgtgcagcagaaggctgtgtgcctcacaataaccatggagttctgctcaatctgctgccttggcgactctggatctctcttccaatagtaaaatgtcacactgcaaactctgggcctggggtcccatgggacttcagtggttccaggactgatttcactgccatcacttatatatgatgatgcagacttcaagcatcaaagtacacaaactgaagaaactttatcctttgtatataattatcttaaatatatgccatcatttcaaggggagcttatgctaagtgtgacttcataaacaaatcatttgtgaaagagaaaaaccacatccagggtaaagtcataaggtgaaaaagcctatttcagagagcacttcctgaaagagacaaagcagcaattaaagtcagcccagcaccaactccgacgccaagcgttacactggaaactactttttaaagcaacaaaagagtctaaaacaaaatacaacatttcttaaatacactgtttccagaaagagctattttaacagaagcaactcaaagatatcccttcgacagaagtggaagtgctgaaaaatgctcatctctcacacagacttttgatggacaggaggtgctgctttctgtgaaccactgaagtagagcagctgaaatcacaaaacctggaagacttggctttacgtactcccaattgtgcactagaaaacagctcatctattgctctaacagtctagttcttgatctgctgaccatgacacaaaacattgctgtttctcgacctatgataatttaaagagaacataagtttctaagtatcatgcctaccaacaagctgtaaaatgatcaccctgaacaatcaagatcaacctgtcccttttaacagctcacatccagatgaatacaaaattgcagcccttgtcttctatagctgtatcttcataattggattatttgttaacatcactgcattatgggttttcagttgtaccaccaagaagagaaccacggtaaccatctatatgatgaatgtggcattagtggacttgatatttataatgactttaccctttcgaatgttttattatgcaaaagatgaatggccatttggagagtacttctgccagattcttggagctctcacagtgttttacccaagcattgctttatggcttcttgcctttattagtgctgacagatacatggccattgtacagccgaagtacgccaaagaacttaaaaacacgtgcaaagccgtgctggcgtgtgtgggagtctggataatgaccctgaccacgaccacccctctgctactgctctataaagacccagataaagactccactcccgccacctgcctcaagatttctgacatcatctatctaaaagctgtgaacgtgctgaacctcactcgactgacattttttttcttgattcctttgttcatcatgattgggtgctacttggtcattattcataatctccttcacggcaggacgtctaagctgaaacccaaagtcaaggagaagtccataaggatcatcatcacgctgctggtgcaggtgctcgtctgctttatgcccttccacatctgtttcgctttcctgatgctgggaacgggggagaacagttacaatccctggggagcctttaccaccttcctcatgaacctcagcacgtgtctggatgtgattctctactacatcgtttcaaaacaatttcaggctcgagtcattagtgtcatgctataccgtaattaccttcgaagcatgcgcagaaaaagtttccgatctggtagtctacggtcactaagcaatataaacagtgaaatgttatgaataataaggttctttcatttcaatcccatcaaaattcacttcactaactactctggcgtcaatggatattctgtataatactatcaagtcccttttctcttgaaaaaataaattcattatcttcattttaaaaactta

SEQ ID NO: 111553 - DNA, 1458 bp, Homo sapiens
ttactttgaaaattgttaaaatttaaataatattgaagcttctgaatctagatggaatgaggatatgaaagttactaacggcactagcttttttcaaggtgctgctttctgtgaaccactgaagtagagcagctgaaatcacaaaacctggaagacttggctttacgtactcccaattgtgcactagaaaacagctcatctattgctctaacagtctagttcttgatctgctgaccatgacacaaaacattgctgtttctcgacctatgataatttaaagagaacataagtttctaagtatcatgcctaccaacaagctgtaaaatgatcaccctgaacaatcaagatcaacctgtcccttttaacagctcacatccagatgaatacaaaattgcagcccttgtcttctatagctgtatcttcataattggattatttgttaacatcactgcattatgggttttcagttgtaccaccaagaagagaaccacggtaaccatctatatgatgaatgtggcattagtggacttgatatttataatgactttaccctttcgaatgttttattatgcaaaagatgaatggccatttggagagtacttctgccagattcttggagctctcacagtgttttacccaagcattgctttatggcttcttgcctttattagtgctgacagatacatggccattgtacagccgaagtacgccaaagaacttaaaaacacgtgcaaagccgtgctggcgtgtgtgggagtctggataatgaccctgaccacgaccacccctctgctactgctctataaagacccagataaagactccactcccgccacctgcctcaagatttctgacatcatctatctaaaagctgtgaacgtgctgaacctcactcgactgacattttttttcttgattcctttgttcatcatgattgggtgctacttggtcattattcataatctccttcacggcaggacgtctaagctgaaacccaaagtcaaggagaagtccataaggatcatcatcacgctgctggtgcaggtgctcgtctgctttatgcccttccacatctgtttcgctttcctgatgctgggaacgggggagaacagttacaatccctggggagcctttaccaccttcctcatgaacctcagcacgtgtctggatgtgattctctactacatcgtttcaaaacaatttcaggctcgagtcattagtgtcatgctataccgtaattaccttcgaagcatgcgcagaaaaagtttccgatctggtagtctacggtcactaagcaatataaacagtgaaatgttatgaataataaggttctttcatttcaatcccatcaaaattcacttcactaactactctggcgtcaatggatattctgtataatactatcaagtcccttttctcttgaaaaaataaattcattatcttcattttaaaaactta

SEQ ID NO: 111554 - DNA, 598 bp, Homo sapiens
ggtgatggaaatttataagtttctacatacacatcaagttactgaatgacttcttattaatatctacttgtcttagatactccttttttggatttactttgaaaattgttaaaatttaaataatattgaagcttctgaatctagatggaatgaggatatgaaagttactaacggcactagcttttttcaaggtgctgctttctgtgaaccactgaagtagagcagctgaaatcacaaaacctggaagacttggctttacgtactcccaattgtgcactagaaaacagctcatctattgctctaacagtctagttcttgatctgctgaccatgacacaaaacattgctgtttctcgacctatgataatttaaagagaacataaggtaataaatattatgaagtgtttccactttaaaaaaaacaaaaagtttaatagccagctacacaagtcttcattttcaaactagagaattacaaactagagttttttagcaaagtagagttgctgtgaatcatctcatcaaaagttccttcatttattcatcaattcagtaaatatttatttattgagtacctattacatgctcaatagacagtg

SEQ ID NO: 111555 - DNA, 216 bp, Homo sapiens
ataatcttctagagagtgactttactttttcacttccttaatggtgttttttgataaacagtggtgattaattttgatgcagtccgttttatggaccttttttcttattgttcattgtgccctgttataggaaccttcccctatcccgagggcataaagatattctcatgtttttttgagatggagtttcgcttttgttgcccaggcttgagtgcg

SEQ ID NO: 111556 - DNA, 396 bp, Homo sapiens
acacatacacacagtccacacatgcacatcagtccacatacattgcacacacttgcacatagtccacacacatgcatacatacaacacatcaacacacacatatacaaatgtgtgcacacatacagtccacacatatacatacacatacacacagtccacacacacatgctcacatgcacaaacatacacacatacacagacacacacacacacacgtgtattcatagaaatcctgaatccaaccttggattcctcaggggcatccagttaagacccagagagggccatgcactgtaggtaacagcacagcctctgaagtccttctgcccagggttcaattccagcttgcccactttttagccgtgtgacattgactgtgttcgtttacttctcta

SEQ ID NO: 111557 - DNA, 383 bp, Homo sapiens
tgacctcaggtgatctgcccacctcggtctcccaaagtgctgagattacaggcataagccactgggcccagccaaatttcacacctttctgaggagagcaatgaaatctcctgttgtctcataccatccgagagtagaagcatcctttgtccagctattcacgatgtctgtctacattcgctgactgtctgcactccctgcctgttagccactcaggagccctctgcgtatcaataattgtcgtagtctagtagtgcttgtgttcaaggagcccttattttacttcttaatgaccccaaagcccgagagtagtgatgccggcaattcggatgtgccaaaaagaagccgtcaagtgcttcctttaagtgagaaggtggaagttc

SEQ ID NO: 111558 - DNA, 659 bp, Homo sapiens
taatgtaagatgtgatatcttttcagcaggacctaaggagattttctcgaaagaaaaggggaaaatgccgctcttaagcaaaaaatctggaccatgttggcagacatacgtctttgaaacataccagcagagaattatttaatcatttgccccttagttttatcttgatcactcctagcgtgattttttccccctcttagttatgcagcagcctactggctgacatttaactattgattgttcatcctggggaatgaattactgtgatttatagtcaagggtacagatgtaaagagacagaaaggatcagatgtttctagtgccttttttcttcctctgatggcttctcccagaaacttgataaaagcaccaacactaaaacatgtttacaataagaaagctgtttattcatcttaagtagaaaattctataagtttatgtaaaattttgcccatgtgggaacaattagtcttttaatttgagttgtgtattgtaattccatggatggagatgggtggaggttgggccgaggggaagctgaggtaagaagccagaccagagaatttaaaatgatgtctttctttgaggatgccccctttgcccctcctgctgggcctcgcagccgtgggattggccacatcacttcctgtccaagttgg

SEQ ID NO: 111559 - DNA, 744 bp, Homo sapiens
atccaggatccggcatgcgaatgggatgcttaattttgggggatatattttgctctccagctctgcctgtttgttaggccctagaaactgcatgctttccctgccctatttctcaaagggctccaccctgatgccagtaatccaattaagaaactttaaaactggctaatggaaaaaccttacaactactggatcttcttctgtctatgtgttaatatgtgttatgtatgtgaggtttatataaaatagctctgattaattttactgaaaataataaatgcttaaatcaaatgtttttgtcagaaaaatagaactttaacactttttggttcatgtgactatagtaatctttgggaaataaagacagttttaaagattattgataaaataaaaatgtgaaaatttagacatctggtctaaattaagcaggtcagatactgtgttcactaaactacttaaactgcttttttgacttttgatagttgtgcgacttacctgctttggagccatttggttctaggtaaggcctggagaaatgtggagttagctatgcaccctggctatactggaaatagttagaccttacctgtacttctgtctggcatcctggactccacatctggtacataattaaaatcacctacttaccaggtttttcatcaaaaataaaagcttttaagagttaacactataatacatgtaattgagagtaccggagaaacagttttacgtgcaaggtgtgta

SEQ ID NO: 111560 - DNA, 710 bp, Homo sapiens
gtaaaaataaaaactaattttaaaataaatgagaagaaactaggctagaaaggggctaggatattggaagagaacatctacaaagataatggagtcaccaagaatacggcaggaattcgactgtattaacaggactatgggcaaggaacggaaatcttaatttaagaagaagaataaatgataacaaggcacgtgaagttcaaatggcgtaaacctcataaaaaatgcttacgagagagatttttgcaagacagaggaggccgtgttctaaaatagactttactgagatttaacagttctgtctaatacattttattctaatatataccaactactgtacaaacttcctatgtgcctgacagtgtgcttttaataaagaattaaatcatctgaaagtacattttataatatcatggacattaattttctgtgttgtgtttccattagtccaagagccttttctgtgagaaactaatgggaagacctataattcattctaagaaagtttattctctgttattctcttattcctagttaacttcttgaaaatataagcgtttatgacaaaaataattagttgaagttatggcaagatcagctaaagttttctgctatcataatgtgacaaaaccaattgaattttaagtttaggtttttccatttcttctaatgttgacttttagctactgaactagacagtgtgcctgttg

SEQ ID NO: 111561 - DNA, 1054 bp, Homo sapiens
  misc_feature (2)..(2): n is a, c, g, or t
  misc_feature (4)..(4): n is a, c, g, or t
  misc_feature (6)..(6): n is a, c, g, or t
  misc_feature (611)..(611): n is a, c, g, or t
tntncncccttgtgaagaattactaaagaggactgtggccaggctcagtggcttacgcctgtcatcccagcactttgggaggtcaaggcaggaggatcatttgagcccaggagttcaagaccagcctgggcaacatagtgaacccctgtctacacacagtcaaaaaattagctggacgtggtggcctgcacgtttggtcccagctacacggaaggctgaggcaggaagattgcttgggcccaggcggtcaaggctgcaatgagccgtgttcatgtctgtctctgaataaataaataaaaaggactgtgaaagacattctagtcataatgacaacctcatatatttataataaactcgtttatgtcaaaggagtatatctgattacttgttctacaatcggttttgctttatttcattttcacgggaattcagacacctgaaattatttagattttattgtattgtttgttaatgacaaacttacccgttattatactagtttcataatttactcttgtatctctatactaaattgtttggtctttaaaccatctatatagcttagtgtcttatttatacagtctaaatgtctgtgtcaaataatgcagaantaagttaaacttttgtctcttatagattttaatgtttgtaatatgcgtttaagtgtattagcaagatattaccatctctttaggctatgtatactaatggagatttttaagtcacctaactaaagaactaaagaaacttattttttgtattgaaatgttattggtctttgggtcttataccgaaagtgatttttggctttgctgcagattttaacttttctgtccgcagaaatttaattttgcgtatataaacttactgaaattagacaagtcaaattatacaaatattttcagattgtctcatttttcatatttcttgtctaacaatttatgtgaatattttcaggtcgtctaattttacatatttcatctctaagaattcaagccaaaattctcaaccctagctgagaattggcactacctgtagttaattgaaaaaaaaa

SEQ ID NO: 111562 - DNA, 565 bp, Homo sapiens
taccggtcactctagtccaagagtgcagctataggcgggtgagccggtgtgactgtggcagtgtatgtgcgtgtgaggagggagtggtgtaagaaaaccgtgacaagaaatttcctggctgatgctattgggagcagatcccagagttcagggaatttaacctgagcattgctggaccacatctagaaagtgtcattgagttctaggggctgacttcttggttagacttgggccaaacagtcagtgcccatgagaaggagccaggacagccagaggcctggaaacctctatgaatgagggaacacgattatcattttcatgtgaaagagagcagacaatggctctgttttttaagggtagaatctgggtgttcagggagttagatttgggcttaacctgaggaaagctttcttgcagcaagacttgggaagcagaggaattgtttacttgggtaagtgaattagtgtcttgacctccaaggtcaggtggaccccttggcatgctgcagaagggtttgcatgagggcaatttaagatggttagtctgacttgtggcttcaggcttt

SEQ ID NO: 111563 - DNA, 263 bp, Homo sapiens
ttaaacatttttcttctaatttattgtcagttgctccactccattactaatcagctgcatgatctcgaactggctctccctttcaagccctgagggtgagaactgatctgccaggctcgaggaagggcttaatttcacatttacaaaaagaggcgtattcagaaaatggccctttgacacagctaagaaaatctgacatgaataaattttctgtagcatcaaatgcaaagtgtgatgaaaataatttttttaagatttgattt

SEQ ID NO: 111564 - DNA, 388 bp, Homo sapiens
cacaggcaccagtggcaccagagctgtgtcaggccctgggggcctactatatgctgtgtctgattctgtcttcaggcagcatatcggcatttgatcataagaaaacaagcaaatgcaaatgtgattatgactgatcccagtgccatcaaggaaacccaaagactgcatagatggagaatacagggaggacttattctagaagggcagctggggaagaattacttgaggaggtgacatcattgagctgaaactcaggaatgaataggagccagcaatgggaagggacagaggaaggacattccagacagcggggacagcaggagagaaggacctcaggcaggaagggcttggtgggcttgagaaactgagaagtctgtaggggacccta

SEQ ID NO: 111565 - DNA, 292 bp, Homo sapiens
ctgatacttaggtgaggggctcctgtggtctcaggcttgcgctggacctggttcttagcccttgggcactgcaccctgtttaacatcctggctctgaacttaggcctggttctctggctaatatcatgacaacatgcaaaggcaggcaataaagacttaagatagaactgccaacatttttcttttcattcaccccttaggtttaataactccatgtgtatcctataggtctctgtaaataaaaaacaaaatttgttgattaaattttaaccttaatatctaaggatctggt

SEQ ID NO: 111566 - DNA, 275 bp, Homo sapiens
aaattgcaccattgaggaccagaaaccatgaaatagcatggaatatttagggaaccataagatctttatagctgaagcaaaatatgcttgggtggaaatttgggagccacttctagacaaataggagatgctctataccaagtggtctgtactaagaaatttacctttttttttttttcttagacagggtcttgctgtgtcacccaggctgcagtacagtggtgcaatcttggctcactgcagcctctgcctcctgggctcaagcagtcctccca

SEQ ID NO: 111567 - DNA, 223 bp, Homo sapiens
ttccattccattccattcgggttgattctattcagttctttacactgcattcgattccattccattccacacaattccattccattccattccagttgggttgaatccattccattccatttctttccattccattctattccgtacctttccattccattgcattccacttcattgcattccgttgcattccattccattcgagttgattctattcaattcc

SEQ ID NO: 111568 - DNA, 545 bp, Homo sapiens
gggtcttgctttgttggccaggttggtgttgaactcttggccttaagctatcttcctgtcttggcctcccaaagtgctaggattacaggtgtgagccaccaggcccggccaggtatatgtatttctatgtttctcccttcctctcaattcatcctatatactaccaactgagttacctattttgaaaccccattgtttaaattcttccatgacttctaggttaagttcaaactctaagaacagcatgctaaccctctgtaatagctgtgtgtgtagtcatctctctccatccttccatataacatctcatatcctactctcattgaatgtcctctcatccccctgaaaaaactctaccctctcaagctttctagggctttgtggatactgtaactctgcttagagagtcattgctcatctcttaattcttattcacattttgacagtcatcatagttatcaaaaagttacccaattcagcaagactggattaagtatctttgccatgtactcccacaacatcctgggctttcacttccataacaa

SEQ ID NO: 111569 - DNA, 472 bp, Homo sapiens
cacctccctcccactacagtgtgtctagtgcttaaggacgacggggacggacagatttaaagccaaatctgtcttggcttggactcttgttgcatattagccatgtggatttgtgcaagttatataatccttgtaggttttgttttttcgtttataaaacaggaatctctcaggactgatgcaaggattggatgaaaagatctaaagccttctgtgaggtctggcacatggtaagcactcacatggtcgttaaagctgtgctgcccatgatggccgccactggccacaggtggcacttgagcacttgagacatggctagtacaaactgagatgtgctgtgtgaaacacacactggattttgaagatgttgtatgaaacaaagaatgtaaaatatttcatcaattttttacatttattacatatttaaatatttttggatatattgggttaaataaaatatattattagaatt

SEQ ID NO: 111570 - DNA, 412 bp, Homo sapiens
gggcatcctgtgttttatctggcaatcctgagaagagtcttagaatgcttgaaaagagctttaaacatcatttcttaaaatgccaagcctccctttggtggcactccccttatagctgagtgtaagctctagatgacaggcacgtgggtgccaggaggccaggacctaggagcgggacgctgactctctgcagccctctcctctcactctcttttcccttccagtcacagtcactgcagcagacatcatggctgtggatgtggcagaataccatctgagcggtgagtgcccagggcaaacccctcctggatcacgcctgcgagacccttacaccaggcctgggtgggaggtgtctgtgggacatgaataattagtccttgccattaatgtcttcactgtcaaggacagtcag

SEQ ID NO: 111571 - DNA, 702 bp, Homo sapiens
aacacgagtgaggaatgggaggccggagcggggagcagagaggaaacggaaggtctcgggagttgaacttggggagggtgacaagggccaggtcatagccggcttcctaggctgtggtcaggacttgacttttattaggttggtgcaaaagtaattgtgatttccgccattactttttttttttttatcagagcctgtctcggtcacccaggttggagtgcagtggtgtgatcttggatcactgcaacctccgcctcccacattcaagccattttcctgcctcatcctcccaagtagcaggaactacaggcgcacaccaccacccccagctaattttaatttttgtaattttagtagagatggggtttcaccatgttgcccaggctgatctcaaactgctgacctcaagtgatccacctgcctcggtctcccaaactgctggaattacaggtgtgaaccaccatgcccagtcaatttctgccattacttaggagacggaagaagtcatctatacattttaagtcaggcagtggtgtgacccaatgggtatttctaaaagattacagaggccatgcaggaaagatggtttcatatggtctgtggttgcttttgcactacaacagcagagctgttatatttgcaacagagaccacatggcccataaacctgcaatagttcctatctggccattcactaaaagag

SEQ ID NO: 111572 - DNA, 225 bp, Homo sapiens
taattgccaaatccagtggctcttcctcagcttctgttctccttgcctctgttaaatttggctccttcagaccctctcttctttggatccatgctagtccgctgtcttctcttacatctgactgcccacttgcctccttcattgacttttcatattcctccttccctaaagggtaggctttattcaggctttcttcccttccccacagcccaccaagacttcatc

SEQ ID NO: 111573 - DNA, 386 bp, Homo sapiens
tacgcactccttagagaatctaatgcctgatgatctgatatggaagtttcatcccaaaaccttttccccactttggtctatggaaaaactgtctgccacgaaaccggtccctggtgtcaaaaaggttggggactgctgctgtaaaactatccttcaaaaatgaagatgaaatgaaggtattttcagataataaaaggtgaaacaatgtgtcagacctacaccatgaaaaattctaagcaaggtcttcaggctaagaactaaaaataaaatcctaagcactccaactgactgaacaaagcctgttttggttccagccatgacaagatgccttgggacgcacctcattatattccctcccttttgtagttcaggcacaactgaccagc

SEQ ID NO: 111574 - DNA, 352 bp, Homo sapiens
gcctactactactactactaccaaattcgcggccggtcgagtgtgaaaagaagccttggtgggttgtaaagagtcattaacaggaggtacgtgaggaacgtgttcagtagaagactaacaggaagcttgtagattaggagtctgctctcagctcttccctggactggcagtgtagccttggtaaagtcactgagctactctgggccatcatttcagagtttgaattagaaaagagattttccagctctaaaaatccatgctgtttttactcctccaagtcttgctctatgttctgtattctttctagaaaaagagtccttatatatttaatatttgcacttcactgttttaa

SEQ ID NO: 111575 - DNA, 321 bp, Homo sapiens
tagaatcgagctggtacccctagtttagaagttcaatagcaaaggtaaagcaaaaacctgtgaactctcttaatgcagaattgccgtggtccttatttattttttccttgtgttgatagttattagattacaagtaaaacttaaaattgattttttttaaagcctgacattcattgcttagtatattttagttttcttgttaacgttttgaaaatagctttattgggatttaatttatatgccatataatcacccatttaaagtgtacagttcagtggattataatatattcacagagttgtgtaaccatcaacacaataa

SEQ ID NO: 111576 - DNA, 434 bp, Homo sapiens
tagatgcaaagaaatctagaaatactagcacattgaatacaacacaacattaaaaggatcatacccccacaatcaattgtgatttatccctgagatacaaggctgtttcaatatatgtgaatctataaacatgacacacccccattagcagaatgaaggaccaaaaattatatgatcatctcgatagatgtagaaaaagcactggacaaaattcaacatattttcatgattaaaaaagaaacctctcaacaaattaagtatacaaggaatgtgcctcaacataataaagactaggtattacaatcccacagctaatatcatacttagtgatataaagctgagagctttcctctaaagttagaaacaaaagaaaggatttgaactctcgcatctatttaatatagttctggaagtcctagccagagaatttagag

SEQ ID NO: 111577 - DNA, 723 bp, Homo sapiens
cctctggaataagatcttgatcctctgctcggatctgccgactccaccaacagtccagttaatcacaatcccagcttttgaaggctagaatgcccatgcagaactatggagtaacaggcaccatggttctcatttctaatcctttcccacattatttttttgaaaaaaaaaatgcagaaaagtcccgatttttggtaaatcttgcttaacgaatgacacagtctctgtgtttgttttgtttccatattcagggagctttgcagctatgattttgattttggagtttaggcatgttaattaagcctttgtatgaaagcagaggggttctgtttcttgtttgttagtttaataagatttagtgttaagaatggcactgagaatctgtcagaattagcttggctgcatatgtgtagctcagcgctttgagacccttgaaatgtctgtttttaggacataagcagggggctaatgaaaaggctttgttgattttaacgaattgcaagccactgtagccaaaataaatataatctgctttttggattagttgtcacagatgattttacctactaacagtgattaaagaacccgagtggaccagaagcatagctgctctctggtgactcttgttaaaatagcaataaacagaagtaaataaagacttagggcatagttatctttaataaacagtgacaacaaatatacagtgtgcaggcgtgaaagggt

SEQ ID NO: 111578 - DNA, 355 bp, Homo sapiens
tttgataccagcctgggcagacaaatcgagaccccatccctacaaaaaataaaaaataaaaatttttaaattttaaaaagagaaaaaaaatgggtgcctgaaatgggtatgatagtatctacctccaagctattgcagtaattaaatgagctttgcaaattgcctattacgctccagtaaatggtagttattataacaatcattatttcaggaggatagacattttataacttagagtctgatacagacttgtggaatcagaatctctgagcaggaggttttgccttaggtagataaaatgtctacgtctccaggattaagttgtctgaagaccccacatctttcagttcccatg

SEQ ID NO: 111579 - DNA, 184 bp, Homo sapiens
actccccacccccattgtccccaagcctcctagaactaaaagggccatatgagtgaggaccatggtcccagtcctgatgctgccactgcctgtccgatcttgtgaccttaggcacattctgggctctttctgggctttaatttcctcatcagcaagggacatggctggactgtgtcattattca

SEQ ID NO: 111580 - DNA, 369 bp, Homo sapiens
gactatgtttctattaagtatcctccctctggccttgccatagaaatgacgaaaaatggattggatcctgaagctgcctgcagctgctctccagacatgatcctgcaggcatccctggcagcacaagtcattagcctgacagcagggacatgaacatactgcttagcaagctgtggttcctggttgatggatgggtaaaatttcaaggagctgaaatgccaagagagaggggttctggctaattgaattttctcataactgcgtgcaaaccagcaatctttaatttcaaccccggtgcaaaacttttctggaatgtgctcagcttgataaacaacacacagaacagaccaaagctttggttctataatc

SEQ ID NO: 111581 - DNA, 217 bp, Homo sapiens
cccaagctgtcccaggaaggccatgggttccctccttgttcctaggaagtgaccccccttttcagggcaaccaggacaacagagtgtttttggaacatgctcctttctgttcttcttcctggtgcctccccccagctgtaattagcatgactcataaaccaaatattctggcattgaactttgctcatcaaaacaaagatgaaaagaatttcataga

SEQ ID NO: 111582 - DNA, 176 bp, Homo sapiens
ccatatctcagagcctgcctggggtgtcggctgtacaaaggcagggacttcatctatgtgattcactcctgtgcaggcctgcctcacagtcagcaccaagattttaaagaaatgaatgaggccaggtgtggtggcccacacctgtaatcctagcactgtgggaggccaaagtggga

SEQ ID NO: 111583 - DNA, 319 bp, Homo sapiens
tgaagccttgggtcagagaaaggggcagaatgcatgcttaatgtttctgggggatgaaaaggagagtttcccctggggggaaggggcagtgagtgggcaccgcaaacccccagggcaccagtggctgagctcagcactgagagatgaaattgctggctgagcccccatgcttagaaggcttcagtgcctgaccaggcttcagtgcctgaccaggcttcagtgcctgaccgggcttcagtgcctgaccaggcttcagtgcctgaccaggcttcagtgcctgaccaggcttcagtgcctgaccaggcttcagtgcctgacc

SEQ ID NO: 111584 - DNA, 369 bp, Homo sapiens
ggtcgacctgaggcaggagaatggcgtgaacccaggaggcggacttgcagtgagccgagattacgccactgcactccagcctcctgagtagctgggactacaggtgcccaccaccatacccagctaattttttgtattttagtagggatgcgatttcaccatgttagtcaggatggtctcgatctcctgacctcgtgatccacccgcctcggcctcccaaagtgctgagattacaggcgtgagccaccatgcctggacgaaaactctttttttctctgctccagagtctagctttcttatcaaaaattttgtctacaacctccaacatgaccatagcccccaatgtgaccatttccagatctatgatga

SEQ ID NO: 111585 - DNA, 411 bp, Homo sapiens
taatggagtttcgcccttgttgccaaggctggagagcaatggtgtgatctcggctcactgcaacctccatctcccaggttctcgtgattctcctgtttcagccttccaagtagctgggattacagccatgcaccatcacgcttgactaattttgtacttttagtagtgacagggtttcaccatattggtcaggctgatctcaaactcctgacctcgggtgttccgcccgcctcagcctcccaaagtgctgggattacaggcgtcagccaccatgcccagtctgggcatctgtttaaggtaatgtgaaactatgacaaaccaggtattgccagccaatgatacaagtggtgaacacttaacagaaaaagcagcgacaaatggttatctacaggagaataatcagtttactac

SEQ ID NO: 111586 - DNA, 386 bp, Homo sapiens
ctgcctcactggtagctgggactacaggtgaacgccaccacgccttgctgatttttgtatttttttggtagagatggggtctcattatgttgcccagggtggtctcaaatgcctggcctcaggcgatcctccttcttctggcctcccagagcactgggattacaaatgtgggccatcttgcccagctagtcataatctttttgcttgtggaaggttttgcctctatactgatagctgctgactgaccagggtggaggtttctgaaggttgggatagctgtgtcaatttctttttttttctttttttcttttcttgcagtgagctgagatcacaccactgcactccagcctggtgacagagcaaaagtccgtctcaagaaaaaaaaa

SEQ ID NO: 111587 - DNA, 709 bp, Homo sapiens
cctcctttgtgcgatccgtcccgagtccacagtcgctcgcggtcttggttgcagggaccctaagtccgtaggctgtggcttgggagccccgtccaatgcgcggcccctttgctcggctcgggacatctcgccccaaagaaactcgcctcgccggggcccctgggttacccgggactcggggctagggatagagggcgactacactgcgcaagagatcgcaatgaagtccgtagatctccaggctggagccgcagagcgaggtggcgaggtggagaacgcggggctgggcctggacagcggccctggggtcgtctggagtcctcgctccctcaacccggaaggcagcggactgacatctgcgccgaagtcgcgcgtaccccacggagggtcgggaccctggaaatttcgaacgccccagcagttcagggcagtcatcgcttttcccaagccggggagtccggggccccgccagagcggagagcgccaagctctctgctgggtgtcggaggacgcgccgaaaacagggacgtctctgcagtgcgtccgacaccagctctccagtcctgctgccgcccggggttgctgcagcccgggttatcccggccccccaagctgcccggctttcggcctcccctgctccccgcgctgtggggtggcggaggatggacccaggctgacgctgggctgggtacctggaaagagggcccgc

SEQ ID NO: 111588 - DNA, 789 bp, Homo sapiens
gaaaaattgtaaaaaataaaacgatattaacaaatattggtatactggtgaaggccgggctcagtggctgctttccaaagtggttacaccagtcgggcatggtggcacacacctgtaatctcagcacttccggaagctgaagcaggcagatcacttgagctcaggagtttgacacaaacctgggctacatgacaacaccccatttctaccaaaaactgtaaaaatcagctgcacatgatagcatgcacctgtaagtcccagctacttaggaggctgaggtgagaggatcacttgtgcctggaaggtcacagctgcactggccatgttcatgtcactgcactccagcctgtgcaacagagcaagattttgtctcaaaaaaaaaaagttggtgacaattggaataattggaactcacatacattactggtgggaacataaaatggtgtaatcaatttgggtgttttcttggcatttgatttttttaaaaaatcaagacattgtttccctatgttgcccagggttgtcctgaactcctgagctaagaaaatcctccaaactcagcgtctcaaatacctgagattaaaggtgtgagccactgtgcctgaccagtgtaaccactttgaaaaacaacgtggcagtttctcaaagactaaatgtatagtaatcacataatgcaacaatttcactcctgagtgtaaatccaagagaaataaaaatatatgttcacactaaaacttacgtacgagtgttcatagcagcctgactcatgatggtgaatacgcaaaaaca

SEQ ID NO: 111589 - DNA, 373 bp, Homo sapiens
tcctggttcaaaaaagaaaaccaactttacctttgcatggcatggtattaatactaaagcaattttaataaaattttataaatgaattcatcaaatatcaatcagtttaatcataaggtacgatttaagaaatgcttgttaaccttttactattttctactgagaagcagataaattctctgaaaaaatgatgtccagatcctgggcttgcataaatgtgttttttaatgttcaatttatagaaagactgaataataccctttaaatttcagcccacttggtcacagacaatatttcttttgtaaaatcaatctgctacaaatctacaattccgtcaaactttcagttttgtcctacgattttaccttagaac

SEQ ID NO: 111590 - DNA, 761 bp, Homo sapiens
atttgaagaaaatgtcaagtactttcacttacattttcttattgatctccacaagaagacaaccaggcaatctgtctttagctgaggaaacagacccccgagaggttaagagtccctaagtagtaaacattcatctcacgttcaggacctctgactcatgtgtcttgctgtttatattatgtatgaagatagaaattgagaagctgtcagtaaattctgtatgtgctagataagcaccctgtttaaagaaattctgtggcaattgtcaattgtgttttataatcttgtctagacttgtgtctctcaagttttcttattcacacatatgtagttttatcccccccaaaataattattctcttgtgggatctacttagtggtatggtttgcaaatggattaactcattgaactggaatttttagtagattatattttcttttttctcatgtttctttgagacagagttgctctgttgcccaggctggagtgcagtggcctcctgggtacacttccacttcctgggttcaagtgattctcctgactcagcctcccaagtagctaggattaagggcatgcgccaccacacccagtgaatttttgtatttttagtagagacggggtttcactgtgttggcctggctggtcttgaagttccaaccttaggtgatctgcccgcctcggcctcccaaattgctgggattacaggcgtgagccaccatgcccggccagtagattgtattttctaatcaaaactttagaca

SEQ ID NO: 111591 - DNA, 1477 bp, Homo sapiens
tttgattgatctgtcttaaaatttactctttcctttaacatgtccacttggctgttaactccatctggtgaattttctacttaagaaattatacttttcagctgtagaatttacatgaagaagtacattatcaactgtaaatgggccatgaaaagttaaggttgaattttgtaatttataaatcaactattaaacagtgcagaatagctgtaaagcatcaggaaaattaaaatagaatatatcttaaaatattaagtaatttttaaaggcgggaaataagaaatgaagaaacaaatgtcagaggagacaaatagaaaacaaaataaaacaaaaatgatagactcatacccaaccatttcaaaaattacattgaacatttatgagctaaacactccaattaaaagacagagattaataattgtttttaaatggatacaaaaacaattataacatctcaccaaagaagatacacagatgccaaaaaatttgaaaagctgtttaatagtatatgttattaggtaattacaaattaaaacaacaatgagataccactacacatctactagaatagccaaaattcaaaatgctaacaacaccaaatgctggtaaggatgtggaacaacagaaactgtcattcattgttgatgggaatgcaaaatggtttggccactttgaaagacagttttgacagtttcttgcaaaacgaaacatacttttaccatatgattcaacaatcttactcctgggtatttacccaaatgagctgaaaacttatgtccacacaaaaccctgcacatggatgtttatagcaactttattcataattgccaaaagctggaagcaatcaagatgtccttcagtaggcaaatggataaaccgtgatatatccagacaatggaatattattcagtgttaaaaagaaatgagctgtcaagccatgaagacatggaggaatgttaaatgcatattactaactgaaaaaagccaatttgaaagggctgtgtactggatgggtcaaactatacgacattctggaaaaggcaaaaccatggagacaaaaagatcagtagttgccaagggttgggcagaggcaaggatgaatagatttctaaaaaaaagtatcataaaagataaagaagggcactttagaagaagaaaaggaataattgatcaagatgacataaaatttacaaatttatttgtgcctaataatagtctcaaattacataaggcaaaaactgatagaatgaaaggaagaaataggcaattataattggaaattttaatgtctctcagaagttgatagagtaaccaacaaaaaatcagcagacagaaaacctgaacaacattatcagtcactttgacctaattaatatttttagaacatttcactcagcaatagcaaaatgcacattcttttcaagtgcacatggaatgcttaccaagatagaccacattctggaccataaaaaagttt

SEQ ID NO: 111592 - DNA, 1217 bp, Homo sapiens
tttgattgatctgtcttaaaatttactctttcctttaacatgtccacttggctgttaactccatctggtgaattttctacttaagaaattatacttttcagctgtagaatttacatgaagaagtacattatcaactgtaaatgggccatgaaaagttaaggttgaattttgtaatttataaatcaactattaaacagtgcagaatagctgtaaagcatcaggaaaattaaaatagaatatatcttaaaatattaagtaatttttaaaggcgggaaataagaaatgaagaaacaaatgtcagaggagacaaatagaaaacaaaataaaacaaaaatgatagactcatacccaaccatttcaaaaattacattgaacatttatgagctaaacactccaattaaaagacagagattaataattgtttttaaatggatacaaaaacaattataacatctcaccaaagaagatacacagatgccaaaaaatttgaaaagctgtttaatagtatatgttattaggtaattacaaattaaaacaacaatgagataccactacacatctactagaatagccaaaattcaaaatgctaacaacaccaaatgctggtaaggatgtggaacaacagaaactgtcattcattgttgatgggaatgcaaaatggtttggccactttgaaagacagttttgacagtttcttgcaaaacgaaacatacttttaccatatgattcaacaatcttactcctgggtatttacccaaatgagctgaaaacttatgtccacacaaaaccctgcacatggatgtttatagcaactttattcataattgccaaaagctggaagcaatcaagatgtccttcagtaggcaaatggataaaccgtgatatatccagacaatggaatattattcagtgttaaaaagaaatgagctgtcaagccatgaagacatggaggaatgttaaatgcatattactaactgaaaaaagccaatttgaaagggctgtgtactggatgggtcaaactatacgacattctggaaaaggcaaaaccatggagacaaaaagatcagtagttgccaagggttgggcagaggcaaggatgaatagatgaaacatagaagatttttaaaggagtgtaactattctatatgatactgtcatggtggctatatgtacataaatacattagacatttgtcaaaactcatagaatgtataata

SEQ ID NO: 111593 - DNA, 801 bp, Homo sapiens
atttaagtgtaggtgttaccaaagagataaaaatatagacttactgaaactttggtgcttggacataatattaaaacatattacaaaaacagacttcttacaccagaggaatagaagataaaacacattatcttccctctttatcatgatatctttaaagcgtaaatcattttaggcactccaaaagtattttataaatagttgaaatattctgtccacctacaaagaacatgaggtttttcataattggattactattggtttatgttgagctggctgcctcctgtagttctattactttggttccaattttattcataaaaacctgggtttaatgatgtagcctatgactataaaataaataaagctaatgagatataaggggtttgtatgcatggcttaggcctcttttggacccaacctagctttacaagaatagattcaaacattcatttacaaaattccataatttttaaaagatgttttagaagacctgagctccttggaggtacttcaagaaccatgataggaaccaagataaggctaaggaagtgtaatttttgatgatacaagtttcctgaagaggcaggaatagaacagaatggagaacacaggtgaaaacacaaagaggaatatgtctttcactggattccaaaggacgaaggcaaaaatatatacagtaagattgcaggtggggtttcatgaagataagaagttcctacctgaagactacttttttggtaaagtaaaaggtgagagaggttctttgttgagattgtgggagaattctttcagataaga

SEQ ID NO: 111594 - DNA, 268 bp, Homo sapiens
atcctcccctgctccagcttctctaagcatctcttgttctgacccctttccttctagtgtcatacaaagtccaggctagagcgcacctgtgatcctatgcttttcctgtggcccactgagggcaaagctggctagaggtcagatccacagagctagttgagacttgaactcagagcctctgactcacataagcccttgactggcttgtggagcccagtctcgcctcccgagatcggcaatgcacttggagggtggggaggccgcctgg

SEQ ID NO: 111595 - DNA, 260 bp, Homo sapiens
ctttttttggagtgttagaaattgggaagatacttttaaccaaaaggtcatttaagacatcatatacaaaatacttagaaattcacatgtaagaggttttaaaagcatatatgcacgttctgattattcctttatggtaaattctgttgaagtaatctgaaaaactatttatggggaaaacagttgtagataagggtcgtactgatttttttttttaatcttcctgcctgtaaacgtaccagcgttttgccaatgtaaat

SEQ ID NO: 111596 - DNA, 312 bp, Homo sapiens
tcagtccccagtggagaatagaaagttgtcattttacattggcaggaaaacatagaggcccttgcagggaggacctctcccccattctttgctgttcttatttttgatccctacttgatctctgaatcacctcatctgccacctctttcccctgctggacacccttagactcaacatctgacctccgccctgttgctccggtcttggagggtaatcttttcttatgcctttgtgccactctgcacatacatcccaagttacttcattcaaggatttcccacaccagtgtcctgcccttctcctgccccaggg

SEQ ID NO: 111597 - DNA, 720 bp, Homo sapiens
ggccagcaatattatataaatagtggttgtttgagggagagaaacgacaagttccccttttgtgcatgttcacactttgttttgaatgtctctgagatatctttaaagtagaggatcaaaattgggtaccagcatggaatcaggagttatactttggaggaaaatgaattaatattagatcacattttctttaatcttttaagatctggaattttacaagggtcttcatcaacagggaaaaccgtgttctgagtgctaaagtttgggtggtgaactggataattcttttataggatctctgataaagataaacatgtaaataactgcagaaataatgctttatttaagcacattacctatgattcatggtagggggaaaatagagaccacagaaactcctgaagtcttatcagggtttctttgcaaactattatatggatgcccatctgttgttttttcttgaaatttagtgttcaggttgatggatactgaatgtataggattctgaaggttggagtttatttaaaacagaactttccttttgttttactacgagttatgaaatgcagttttaatttgttgcaataaatatagaaactgagatgagtaggaatttatactaacttttctcactgttatggtacatactctatatcatgaaccttgaaattcaaattgatccctacactatcttgcaaatattacaaatgaagaattaca

SEQ ID NO: 111598 - DNA, 637 bp, Homo sapiens
tctcagaggcaggtgaagggaggagacactataacatggggtcgaggttaggttttacgtacagaaaacaaaggacacacagtagggggactgtctcttagtgactggacacgttttacaaaatccgattgcaaggcttcaacattgtctctttaagggaactcctcttccctccgctttccctccctgcatctctgcctccaacttccacctccaccttctttctttcacctttcatttccagcatatcttcccctggagaattcatgagtaaaattcagacacccacccccctaaagaaacccattcttcacagccccttcctttatttctatccacagaggttcctgggtcctcttatctaaagattgggctgtttgtgatcatctgcacttcatttcaacccaaattatatgatgtttcctttaagcccaggacgtcaggagtgttttgcttatatttactcccatagtggggctggtcagttttcattagctttgtcatcattattattaagagtctttgcacaaagagaggagccagtccacgctggcatccacctgcagtatacagcattagcagagagagaacgagagagagagcgagagcaagacagagagaaagagagatgcccctt

SEQ ID NO: 111599 - DNA, 398 bp, Homo sapiens
ggaaacagctgtgagattgcacaaagtattcttgtactcttcagagccattctttagtaggagaaaataaggtccatattttaagcttgatgatagcaagccatttattagcaacccagtttaaccccacacttttctccttttggggttaaattgggtagtattcattagaagtacttcaagaaaccatgaactcatttgctagcagtgtttatatcctgtatactgagaatttgaggtgacttttatagccattcttaatcctcagtatctgtcattgtggaacctgaaccctgtgtgtctaatgttatccaagagaaatattgtgtgagccactagtgtactttcaaattgtggtaaaatgtatatcccataaaaccatcttaaccacatttttg

SEQ ID NO: 111600 - DNA, 228 bp, Homo sapiens
aggcatgtcaaaaacacagagggtcgtcataaagtttccgtcagaccaaaggaaccaagatgaaagcatgtttaagagctactaggttctgggagatttcaaaatcaggacattactaccatgacaaccaatgaaaagttctttcaagtgaacctttggggaaaactatataacgttccttactctctaggctctctggaaataaacttttactttattatggctgtc

SEQ ID NO: 111601 - DNA, 713 bp, Homo sapiens
ccctgagttctggtgaatctgtcccccattcctggctttagaaatgttcatatgacaagtgattcattggtaagtgttaaaaaccaattctaaaaaaaaagaagaaaatccttgatttgtagcatttgacattttccatggtgtaaatacttttaccatggccaactttaagctaccaaggtgaaatcactaaacatggagttgggaagagaggcacatcatcagctcctgggaacctgcagcgcacagtgtcagagatgacccagtctaagtgaatcagaccatttatccctctgggcctaggactcaagccagaccagctccttaggtccaattcctttgatttttttaaagaactgttgtggaagaggcaccatctttcactgcgttcgttgaaaggaaggaattggaaccaattctggtgatctactttccatgtggtctgtttggaaagagcctggctgagaatgcagaccctcagagaagtgactagcagagctgagagatggagacagaccaaattctgggatcactgttggagtccttggatcttgtccagcctgaacctctggacattgctgttacatgagccaataaatccccttcgtttctctgtctctcattctgtttctcttcatctccctcttatccattatttgtttattaatttttcttttattaaagctgtttggtttttatttcattgaaaaata

SEQ ID NO: 111602 - DNA, 399 bp, Homo sapiens
gttgttaaaaatgaggcagatcattgtctttctttccccccttgtttttgggacgaggtgacccttgtagcatcatgatcatggcttgacactgagcttttagaggaaactagacaaagaggagaacatttagaaagaagcatacaggaaggtgcaaagtcttgaaacgatgtcacaggaagaacagctggaagacctggaggtgtttagtctgatttagggggtgacaggattgctttcttaaaatatttgaaggactgtcacttgaagaagggattagatgtgctctgtatggcctcaaggggataaatttaggatctctggttgacagttattaggatccaggttgtggtttaatagatatatttaaaaagccaatcttatgaaaatttaagctgt

SEQ ID NO: 111603 - DNA, 837 bp, Homo sapiens
gcctcccgagcagctgggattacaggcatatgccaccacgcccggctaaatttgtatttttagtagagacggcatttctctatgttggccaggctggtctcgaactccctcaggtaatccgcctgcctcggcctcctaaagtgcttgaactacaggcatgagccaatcatttgtatttttgagtgcttgctctttgttcatcatacttgcttggtattacttcatatagggctaataaaactacaaaagtactatttctatagacttaattctttagctcctgaaaaattgaaagagccaatctatttggtggaaaaccagtcagcctttaactgaattcaggtttctgaaaaggaccaaaattatagccataattctagtaacatgtcattgtagagcttcccaaataaaatgtggcaacctttatttctcacatctaacaccatcatcatcatcatcattatttttgagacagggtcttgctctgtcgcccaggctgaagtgcagtggcgtgatcttagctcactgcaacctctgcctcccaggctcaagcaattctcacatctcagcctcccgagtagctgggaccacaggtgcatgccaccacacctgggtaatttttgtagtctggtaaagatgaggttttgccatgttgcccaggctgacatctaacattattgactcacctgtatgaaggcatagtaacagaccagtagataatagatgacttgtgagatgatagaccagacacagcccttctttgacatctgaagggaagtgaagctttccagtctcaaagaggtgaagaaagcacctgagaataacaaagaacacctg

SEQ ID NO: 111604 - DNA, 900 bp, Homo sapiens
ccatgggttttagggaagtaaggctctacctgcattgagcaggccaagacctcaggacactggaatttttatgagaggagagtaataagttattagtgactgattatgtgatgggaatagtgcaggggaaatggttgccactttctctactgaatggcaatagctgttttatagcagagattgatgaaaaataggcttatttttgaaattgaagaggtaacagttattagagtggagagcttggtcagaaaaaccagaataccatggttttttttgttttgttttgtttttagtagaattcacactaattgctggaattacattttgctacagttttattaagaatgtgtcacagacataatgttttgctaaaaaaaattcaacgttttcttataactataaacaaatcacattctttgtaccaacatcattttatcctacctcagtaggatacttcatagcagataataacaatacactcagtcttttaggttggaggatgtagaacaattttttttttctttgtgggaatcaacatacaattttgggaaaatgtaatcatactctgcacttgaattattctctctacactctgccttagaatatttatatggatataatgaaaatcccatagaaagtgcagttttcatactcttacactctgaaagctgccacagtgttggtgaatatataccatattatatttttacatgcttgtgtgctaaataactatggcatgcatctttatttacatgaagtgaaaatacaaatatagaaagtgtatgggctgggtgtggtggttcatgcctgtaatcctagcactttgagacccaaggcaggggggtcacttgagtccaggagtttgaaccagccaggacaacatggcaaaaccctgtctct

SEQ ID NO: 111605 - DNA, 403 bp, Homo sapiens
ggatcccccccgccgtaccagttgcgcacacacactggggttcagtgtcccttggattatgctgatcctgagatcagggttgtgggtaatggtttccaagagctagcgattggggggacttattcctttgattatactgttgaaacatgaggccatcaggatgttgtgatcaatatcctctgagctgcctctgcaatcatccttgcccttcactgtagaagaagtatctggccacacgcccctgtcacttggactttatcctctttgtcttggagctctgccttgtgctaacactgatcttggatattgatttgaatgagatgaacttggagttaatactctgtcatcaggagcgtctctgagcccgagagttggccgcaactggtacgacgggggatgagga

SEQ ID NO: 111606 - DNA, 274 bp, Homo sapiens
acctcggtaccggcatactggacttctctaccctcataggctgggcctgaaaggtagacagcagagagggtagagaaggtagacaggggtggtctagggacagcaaaggcagggcaggtgtcagcatgaaggagactgactcagtggcgtctggcgtgcgtggagggcagggttagacacgagagggaaagaggaaggtggttgggcagggacggtacttcaggaaggtcagtctgcagaccagaaaggaaggtggacagaaggtccaggtatg

SEQ ID NO: 111607 - DNA, 398 bp, Homo sapiens
tcaatgaatgaatgatgctgctagtgacttggggacctgcacaaccctgggagtagatgccagcactcctaacacaaaggggtcaggacaggatgccccgcagtcaggatggaaagccacagagcggggcagaacgggtcctcagtgccaaggcacagctggctggctgtcttcttctcccgcaactccacaggccaacggcagggctgctgctctctcatttacaggtgggggcaccgaagcctggagagaacaggggctcaacagtcacatagctgatgcgcagcccagcctggcagagccccgtgactctggagctgtgtccacagccctcctctgctctgcagctgggttgtggagacaccaaaccactatggaaactgtgagtttctccaccg

SEQ ID NO: 111608 - DNA, 711 bp, Homo sapiens
ggggaacatcacacaccagggcctgtcagggggtggggggctaggggagggatagcattaggagaaatacctaatgtagatgatgggttgatgggtgcagcaaaccaccatgtcacatgtatacctatataacaaacctgcacgttctgcacatgtatcccagaacttaaagtataataaaaaaaagtttcatgatctaaagaaattcagaaaataaacaatattaaaatgaggaaacattggaaattagttttttacttatttgcctaatattgagtagtgaattttcttattctaatctggaaaccaagacttttatcagctattttactagaaaatctatgtgagatattgtaacttagaaaaagtccaaagcaaggcttaatttgtctgtcatattgaataatcttcaaataatcttttagtcttcaaaaatggttatagaaaaactgttagatttgagaaattggatatgaattatgctgacattctaacattctcaagttaaattcccctaagcagtgttttatgggaaatgaattcatttgaacaacttaaagaaatattttaagaatgagatgtgcctttagttataaaacctcttactgctgcaaacatatgtaagaattttgcagtaggttgaatgaattagctatataaaagtctgcaagtaaacttccttcctatagaaaatataatagacaggaaata

SEQ ID NO: 111609 - DNA, 820 bp, Homo sapiens
ctggttctcacaaaatgtgcttctctgcgtggagcaggctggcacttcagttgaacccaggtacctttctgataggcttctttctttttctgatcattttcctcacgcgtttcaggaagctgtcttggctcttagagtgcttaatgtgctcaatatgcacattaattctcttggcaagaatcttgcccttaacttgtttgtttacaacaatgccaacagcatgctggggaacattgtagactcttcccgttttgccatggtgacacctgtggggcgttcctttttgaacagtacccattcccttgatgtctacaatatcacctttcttatagattcacatatacatggacaaaggaataactccatgttttcttaaaggcctggagaacatactgggtgtctctcctctttctctttgtgtttctcattttggcgaattactggaggatggcggttccactcattatatttttgaagcctcattttggtttacgttttaaagtatgttatcaaaaggaaaaacatttaaattataaaagcactactactgagttcagtaaggcataaagaagaaagtaaatattacttgtcatcccatcatccagtggtgggatattactaatatctggtctattttgtcctgaactttctctgtgcacatgtgtacacacacacacacacacacataaacacacacatctacaagaatgcgtgggctacacacatctgtgggtatgaacttaatgagtcctgattctaccacttaccaaatgtgtgaccttgggttatttcttaaccccactaagccaggctttcccta

SEQ ID NO: 111610 - DNA, 383 bp, Homo sapiens
ctggaggggaacccgtggtagctaaagggagtgcactagccagccccaggtgtgctacattcccgctctaggggctggtctggcggcatggctctctcctgagtgccttcagagcctgagtgccagcaggcaggcgtctcctgcccagtgggtttggtaagatatatttcagaaggcatccaccactctaaaacatgcttattgcaggaaccatgggggagaccaaagggcctagagccttgagaacctctgaccattagtgttaacaggaaggcagcctgttcccctagctggggagggggttgtgcgtggcaggaagcccgtgcgtctgtgtctctttggagctgtgggttggttgtgtggatgccagctgtgtggtcccc

SEQ ID NO: 111611 - DNA, 622 bp, Homo sapiens
cagcccaatacgaatttttttttttaagtgagatgacagaattggaagaataaaagtccctgatgttgttatgctttgtaaatacatacatattagggctactctagattctagaaaactagaggaaagattgagcctttactttggaaaacctgcacctctgcaagatgccacgtgtacggatgactacattctggtgattaggtaaagtgatcccagttttccatctgaaactcatctctaaagcaaagttcttgtattctgcagataactattcttatgaacattggattataatttcagctacaagtagcatcaagatcttttatcagaagaaaacacactccaccttcttgcatattctaatgatgtaaaacttcataagtgatcctacaatatgtctctgtaataggttatgaatagtcatctatcattcccagagcagtatataataaatggttcaggtatgaaaattctgaaaattttcagctcaagattgttgattttaggggagatgtgtttagaaatgtacttgtccatttcatgcctgaggccaactaggagcaagcatgcctgtatgggaaatgagataggattttttactaatttataatttgaaata

SEQ ID NO: 111612 - DNA, 623 bp, Homo sapiens
gttacctaaaatagtgatcctctctccttcactggctggaaggattaaatgagatagtgtttataggaaatgtactttgtgttccttagttgcctccccccgccactccccgtggtaggaactcttgagtacttgtcaaatctgaactctcggcatttttacctccttcagggaaaactattggacaggctcttactgaacacccgcttttgtgcagaatgcacttcctgatactctgggagtttcagaggctactaaggtgtccttctggccctcaaggagttcatctggagacagggagacgacacattttcttcaataactaagaaaagaaagggcaatgaagaccataaggaaataacagtgaagtttcttaggcatccaaacttgatggaggggacaaaggaggcttcaggaagttttaaactagaacaggacttcagcgctcttaacattttggtcagatacttctccgtggtgatagtttgtgggcagttaacagtggtggagggctgtcctgtgcattgtagcaagtttagcaggatccctggcctccgcccacttagatgccattagcaccactagttaacaacaatcgaaattatcttcacactgtcaaatgt

SEQ ID NO: 111613 - DNA, 370 bp, Homo sapiens
ccagggtaatactgtggtagagaagaaaaacaactatagagagaaaaaagcttcacttaatgaatttctactttaacacaaaggaaacaaccaaagtatcacccactaaaacaaactacttgttatgttgtggaacaagtttgagaatctgcttctaagacacaatgtaacttatcattaaaagaaaaagaaaagaaggagtccaggcaagtggctcacacctgtaatcccagcactttgggaggccgaggagggcagatcacttgaggtcaggagttcaagaccagcctgaccaacatggagaaaccccgtctctactaaaaatacaaaattagccgggcgtggtggcacatgtctgtaatctcagcta

SEQ ID NO: 111614 - DNA, 342 bp, Homo sapiens
ctctgggaataaacccttaagaaacttgacagataaatgcagcagtttcggttccagccctgaagctccactcatggccctcctagtgggttttgggtccagctgcctcctcggtgggagttctgtacccagcagtgcccggtcacccatgggattctcctccacgtcccttcccaggccaaggccctgctctcagacctctgtgaagtgctcaagctcccgctccctctcctccaatgtgaacctccagcctgcgacgctgctgtgccccctcgaggccccacagtctcacagaggcctgtcctctgcagctgaacttctggacaagtgggagaccctggc

SEQ ID NO: 111615 - DNA, 816 bp, Homo sapiens
gagattttgtaaatcgataatgggaaatatttcagactgaatccagccttgaaaacgtcggaagagtcaggacaaagcttaagtaggagtcctatgggaagaattttgggaagtcccttctaatgtagttttgtcattctagatattactgcagtactgtcacggtccaagaaagggtcctaggaggacttgaattccttcaggaatttgtgaccaattgaggagggaatagcttaacctcacctggggacctcaattcccaagtgaggttgggaaaccgaatacataagcaactagtcttttagcacgagaagatatatttataaatgcacaacagaaactaaagttgcaatcagaaaatgtgatttccgatgaggtaaagtaatttaagctattttttattttaattaaagattaaagataaaaaaattgaaactgtaaaagagaatttctgaaggagctgtgttataaggcagattatactgttgctatgtatattaatgctagtaattgtgcagctaataaagtagcatagctctcacaaacatctcgcatgtgtggtagttgtcattagtcctttttctcagacatggtcactctgtggagggtccctcctggtaaatgtgttgttctaagggaatagatattggaactatttataatgtagttgagacctatgaccaggtaaaccaaggaaataatttctaagttctcacctgaaaagcattttcaaattatatggatcatccccctgccccatggaatcccagccaccgtgagattccgatatgccccctaactcttctgagtgggaat

SEQ ID NO: 111616 - DNA, 453 bp, Homo sapiens
ggattcagatctcattcatgaaagctttaccctcatgagcttatctaattctaattacccccaaagaccctacctcctaataccatcacattagggggtagggtttaacatatgaattttgagggaaccgaagcattcagttcataacagtgggcaacggttattgcctggtgggtcttgaagcatatgacagaatgggactcctgcctgttattttattggggaacttccccagttatctgtaggtcctttaggtttgggcctctcaatttcttggaaaggaatcctccaggagtgtaagcctagatgtctgttttgaaagccatttaggggcagagggctagacctttcactgttaagtataacactttaactaaatcccctcttttcagctgtgcctggggttctggaatccagaaactctctagttgagcatctccagagaataaactt

SEQ ID NO: 111617 - DNA, 142 bp, Homo sapiens
tctaggtccagagggcagcatgcactgggtgagggcctctagggagagtaaagcaggatacattcttgtccttatacttccttccctgtttctgtacctgctcacttttgccctgcaacaaataaacctttaagcatctgtt

SEQ ID NO: 111618 - DNA, 691 bp, Homo sapiens
gttaaatatttattgcactatggtaggaagtgaagtgggatggaaagaccattacagcaggaaggccagttaggaagctactgaataatagggaaaagatgatgaggaccttagatacagagtgaatggagggagggtcaatgttaaggcacattccagatgtaagtaaaagaaaatattaaaccattgtaaagtcttagagaagtcatgatgaaaatgttcttactaaatcttacctactaacaccttaagaagtttcttttcagccaacattttcacttacttagataggagtttgagaatatggtgacattttgcccagttccctccaccgttagggtgtctgggttaggtactaaatattatttgagaacatagctgcaaaattagtgagatagccatccagaactgcacatttaccacagtaaacaaacacattacaggattagaatcatggaatagacttcacatttattctagcccaatcttcttgtttgatattgaatatatggaagctggaagctttaaatcacttgttctaggtcccattactatttcttgataaagccagatcttacgaagtcaggttttctgactcataatctacaactgtgtgtgtgtgtgtgtgtgtgtgtgtgtgtgtgcatgtgcatgtgtgtatagatgggagttggcatgtaactgtagatat

SEQ ID NO: 111619 - DNA, 383 bp, Homo sapiens
gtaaaaataaaatgtaagcaaaactaatggtacttctaatacttctttacaggcagtgttcaattctgaattatttttggacttgcagttgttgttacgcatgtttttccacccaatattctcatcaagattatcagtgatgaagtatttctgaaaagagtattacagtctctggggctttttcctaagccactgacatccattctgcaagttcagaggaacatgttcaggtaaagacagtgtgttcgggtagagaacatgtttgagtagtgtctcaactgccatctggtgacagcaagtttaaggtatattctgattgcagagatgttaaatgctgaaaaaattaaagaaaagaagaaaggacggaaggaaggaaaaaagaa

SEQ ID NO: 111620 - DNA, 276 bp, Homo sapiens
ccaaaacccactgcaaaaacattaacaatcgtcatttggaaccgtccattcccacttttctccaaagctatctatttaaccaaacaccttctgaaatttgcagcataaacaaaatatatcaatgtcaaattttaagttttgggaaagacccctgggtcaacttgatgcaagctgattcttctatcatcttaatagtttgtggtcattattaggaaaccaaatagccaggaaagaatggggacaagagggagaaacaagcaaatgtgtgaaggcagg

SEQ ID NO: 111621 - DNA, 123 bp, Homo sapiens
ttcctccacatggtccagcaaacacacacctgggctgaatggtagagctgatcgctcatacacaaaggtagaccggtgggcagggattttcagacttacacagtcaatgagttttccttggtg

SEQ ID NO: 111622 - DNA, 370 bp, Homo sapiens
cacccccttcccccttgtattgctttttgtttcctgttatcctgggaatttatataaacctctgtttcagtgtcgagttcagtattagcacaggttcacagtgagtaaccttccacgtacatatgtgtgtagtgtccccactacccgttcaaacagagcagccttttctagtgttaggaactaaggatttttgtgccacctaagaaataaaacgttagcattttttctaacaacacgtcctaaggctggaccctgcctatgggatatcaggtcagaatattcaggggagtatcctcacgtatgtttctgtagacttaatccagggtatgcctcagtgtggccacatttcatcttgtaaagacagcaatta

SEQ ID NO: 111623 - DNA, 148 bp, Homo sapiens
atgaggttgtgtcactgcactccagcctggccacagagcgagaccccatcttaaaagaaaaaaatattgtgtgaggtggagatctagtttgttttattccagatgcatggccaattgcatgcaccaattggggatatgtatacaatga

SEQ ID NO: 111624 - DNA, 284 bp, Homo sapiens
ccctaacccccacccgctgcgcgtcgtgggaaccggttttggcgtcccctcctggttccgctcatctccgcacctagccttgcccaccggagctgcgctcgggacttacctggggtcccgagacccaaagactttggctccctctcctatcccagctccagacatttctgtctaaattagtgcgcctggtgcggggaggacgcgggccagtgcgcgccctggctgcagcaggagcggctgggttggcgccctctgtttccttttctcagaatggagctgggacg

SEQ ID NO: 111625 - DNA, 383 bp, Homo sapiens
aaaacaaaaaacaaaacaaaaaacacaaaagcagatccccggccagagaggtgtgggaggggttttgacaagagctccaaggccatacccatggccccatactttagaaacatggtttcctgggttaactgcgttgattcacgtgttagttgcaaaataaacaagtctaatatggtctggatctgtgtccccaccaaatctcattccccagtgttggaggtggggtctggtgggaggcgacttggatcttgggggtggtttatcatgaatggctcagcaccatctcccttggcactgtcgttgggataacgagtgagttctcgtgagatctggctgtgtaaaggtgagtagcacctcctccctcccttcctcctgctcccacc

SEQ ID NO: 111626 - DNA, 390 bp, Homo sapiens
tgtctgtcattttgaagcaatttacatttttttcaaagaccattcatatacattctcttttgaaacatattggataaatattagtaccccaaagataaagaagttgaagcagagggagtttaagtaacttgctctcagggtgattcagtgataggtcaggacacatgactcctaatttagggcttcttaaagctgtttggttgaaaatgaaaaaagaaaaacctatatttagtgttttatttatttattttttttgagatggatttttgctctatcatccaggctggagtgcagtggcgcaatctccgctcactgcaacctctgcctcccgggttcaagcgattctctgtcttagccttctgagtggctggggttacaggtgcgcaccac

SEQ ID NO: 111627 - DNA, 205 bp, Homo sapiens
ctccacaggacaaagaggaaaggagagaaaacaaattggcatcagtcaatattattacctcccagtggctactgtcagagttgagaagtagaaaacgaaacctagcaaaaaatctgaaagatttaacgtgcatgtacatttcatttattcatgtttttactctctttaccaacaataactgaaaataaactgataacaaacactt

SEQ ID NO: 111628 - DNA, 736 bp, Homo sapiens
gatatcctttccccttaaactatgtgctccaaaagctacactcaggatgacagtgatctagaagtaaatccatgccaccttcctacctgtaagggactgagaaaagttgcgtccgtctgagtagagcagaatgggggaatcctgagatgttctttatgtggatttgtgtgaataaacatcacctgagaatgattcagaaaaactgaagccatgtatgtaaagtagactcagcctgaattatacccctaataggtggtaatagcttattcataccctttctggaggaatgcaccttcttcctacgcctcagagagtttccacaataatctttgaagggaaaggaacagatcagttgttaaaaataagcatataaggaaaccacatacatcagaaacagacctccaaagacttcagaaactagaatttagataagattagcttaataacacaggtgaagagagaattggagaactgaaggcatccagaatggagcttaaagagccaattagatggaaaatatgaaagggatatctgagacacaaattgatagtgtgaaaatgtgtctacttgaagttctagaagtagaggaactacatggggcggaagcacaatttgaagagagaaatactgaaatttccagaatgattgaaggcttcaacagattcaagatgctcattgaatcccaagcagtaattttaaaaattcacaactggacacatgaggatgaaactataga

SEQ ID NO: 111629 - DNA, 446 bp, Homo sapiens
atcattttgcaggtgagggaactagaactcagaaaaggtacttaatttccccaagattacatagttattaggtgacaccggcaagatttcaacaaagctaatgtcctttctactttactgtgctaccatgatgatggtaatcaaaaatggcagacaacccataaatcttccaactttggaataggtttttgcactgaagtctgaatatggatacgtattgaatgtttattctggatattcacagaatcaaaaaatatgtgtaatgaattatgttgctgaattaactgaaaggaaagtaaaaatgtagcgctttctcattttcttcacgaatttggaattcttttctgctttccactatgcagataacatcagttcagacaaatattaaatacctacctaaattagaatgccttctcctcatgggatttttttaaaatcttgtcatt

SEQ ID NO: 111630 - DNA, 817 bp, Homo sapiens
gggcctgagcccggggtgtgcctgtgtctgtgattctacagtcccagaactttacaaaattcttcagcctctaagtgctctttcccgccctcatccaaccatggagttatgaagtagattacagagccatgtagtctgagtctgttttttataactcgcactcagaactgaagaattttgtaaagttctgggactgtagaatcacagaacgacacccggtaatccacagggtcatggagtaggtactcaccgtcagctgtggcccagctcaccaccatgggtcagcagggtcaccagcctctttatgcctttcacagtaatgcagcggccagctatggctatgtgttcctcatgctttgtgtacatgccatcatctcctcacaactgcaccaggtgtttttgtcaccatacagatgaggaaaccagcataggccaggctttatctgtcaggtggcaattctcacattcttccttgtcctaccccaggggccgggccagctgtgtaaatcccatgaatcagagagggtagaggtgcactgataaaccaaaaagcactgggattccatttattttttattttcaaataagttgcagaagttatgcagttctacatagctccgatcagactgtggattctagatcttagagtataaaaagccaaaggtcaaagtcaaagtcctttctctcctggccccttttcacggatggggaatctgaggcccagagacgagtaagttcccatggtccatggccaggattctgtgcttcagaacggcctatgtaatttgtgggacccagtataaaatgaaaatgtggg

SEQ ID NO: 111631 - DNA, 307 bp, Homo sapiens
tcacctcttgtctcatactcaagcttctgtggtattctggtccccgctcccatcccccgaaggcaatgcttcatctccagtgaccacagttccctctttctgcaccatctcttcaccctgcactgggcatccctttcccatctccccaaagcatccctaacacaaaggatttgcaggtagtggttgttaccgaggtttggggaataatagagaaggactgcagtaaaggacaggcagcagctcaatacaacgttgttcttcttataagttccttaaccatctacattgctggtaaggccttctaagg

SEQ ID NO: 111632 - DNA, 866 bp, Homo sapiens
cccacctctccggatccagcagggtgtccactgaccttctgatccagcgaggtgcccatcgccactcccgatcgggctagaggctcgccattgttcctgcatggctaagtgctcaggttcagcctaatcgagctgaacactagttgctgggttccacggttctcttccatgacccacggcttctaatagagctataacactcaccgcatggcccaaggttccattccttggaatctgtgaggccaagaaccccaggtcagacaacaaaaggcttgccaccatcttgggagtggcccacgaccatcttgggagtggccaaccaccatcttgggagctctaagaacaaagacccacccgtaacagaaggagcaggccaatgtcatccaagaccttgcagttctataatcttatcagagaaatgagtaatgggtattattaacacgacctaccaaaacttcataaaaaagcaaaaagaggaagataatgcttttggtcagttaatactaactgcaagtcaaggaaataaagaaagcaagtgtgtttcttcaaatgtatgggttttttagccatttcattacagatggcacaatgccttgatatagctaactgcataagcactcgtgttgcatacaactggaaataaaactgaccacttgacaagtgctgtgggggtaaagagaacagaaagagttactttcgcagggtagtcaaggagagtttcagagaggtcatggtggaggaatagaattccaaggagagaagtgtggggcaggtcctcccagggagtaagaatagcatgcaagtgagggcccatgtcctgcgacatagaggttactatctctttgtatgttctaccctctccacta

SEQ ID NO: 111633 - DNA, 341 bp, Homo sapiens
tcccgggttcaggctatcctcccacctcagcctcccaggaccacaggcgtgtgccaccatgcccagctaattttttgtagagatggggttatgccatgttgcccaggctggtctcgagctgctgggcacaagcaatctacccatctcagtctcccaaagtgctggcattatagtcgtgagccactgtgcccagccaacagcgtctttcaaagagcagagagaggttaattttgatgatgtccaggcacctttgttgaaaattgaccatatatctgtgagtctgtttctagactctttgttctgctttattaaactacttgtctatttgtacaccaatgcca

SEQ ID NO: 111634 - DNA, 298 bp, Homo sapiens
gtaccggggattataggtgcgcaccactatgcccagctaatttttgtatttttagtagagacagcgttttaccatgttggccaggctgttctggaactcctgacctcaagtgatccacctgcctcggcctcccaagtgctgggattacaggtgtgagccatctcacccagcctagagacagtttctttaactgtaacaaaattgtgtcaaatgcaaaaggttgcattgacaggttcacatcttttaattttgtaaaaaattaaattaatacatacacatataatgtatgtttgtttca

SEQ ID NO: 111635 - DNA, 378 bp, Homo sapiens
agttattgaattctagaatatagtggttgctttgcattattactgtatatagtgtatttgtgcttattttatagtttatggagcaaaatttagtatattaagccatttttgcatcttaaccagctgctgcctaattattacaggaaaatagtgtggaagttcagctattctaaatctaaaataattggttttggtacatattctctaacctttagatggtctgtagctattgagccatatatgacattcttttaccttgcagtgaatttcatagcttgttcatattggggaagttgtacatggaagtcatattgcttgaaggtagataatttaatggctatggaggtcatttgactgtacctgctttaaaatttctct

SEQ ID NO: 111636 - DNA, 451 bp, Homo sapiens
aggctcatgtcttaatgttggcattatcagtgtggttgccagcacatgcacgtgcatacacatacacacacttaacactgtgaagcctttttgactgcttcaggaagcaataattattccctgctcttttatggaagccctttactcagatggcttgcataatagtatcacttgtcacactgtattttagctgattaaacaacctttttcctggctggaatgtgagtttattaggaaaagggattgtggatcatttttatttactcagaacctttacatgttcaacagacatttgtcaaacgagtaacaagagtttgtaagcaagagtttttagcttagtctagctattgattctgtgactgtgtactataataaacaaggcctctctggtgtttaccatatagctttaactcaagcttcacttcttgtggtaacctgaatgtattttgga

SEQ ID NO: 111637 - DNA, 178 bp, Homo sapiens
aggctggtcttgaactcctgacctcaaatgatccacccacgccttggcctcccaaagtgctgggattataggcgtgagccaccatgcccggccaagagtttatcccttttaagtctcatattttgtgatttttaagagtgcaattattttattttatatcatttaaaaatttttttga

SEQ ID NO: 111638 - DNA, 753 bp, Homo sapiens
caactctaaatgtttaaattcaagaagatcaaagaaccccagcgcacgagcacacacacacacatactcacacacacaatcacaccaaggtgtataataatcaaattgcttaaaaccagaggttaaaaaaatcttcaaagcactgacatgaaaaggattctatgtatataggaacaaagataagaatggcggcatacttcttttcgacaccaaaatatagtgctatgtatttttcagtgttaaacaacattttttaagtgctgaaagagaaaaagtagtaaacctagaattctatgttgaaagtgaaaatatacttcttttgtttttttttgaaagagtctcactctgtcacccaggctggagtgctgtggcacagtctcggctcactgtaacctctgtctcctgggttctagtgattctcctgcttcagcctctcgagtagcttgtattacaggcatatgccaccatgcccggctaatttttgtactctagtagggacagggtttcaccaggttagtcaggctggtctcgaactcctgaccgcaggtgatctgcttgtctctgcctctccaaagtgctgggattaaaggcttgacccaccatgccccctcccggaaaatatctttcaaaaattaaggtaaaattttaaaagttttcaaaaaccaaaagctgagagaatttattagcagtaaacctgcaccaaaaaagtccaagaaagttcttcagggaaaaaagtatcaggtgatgggtaac

SEQ ID NO: 111639 - DNA, 363 bp, Homo sapiens
ttatttaaaatattcttgtcaacatattttatctggaaaagctcaaagttacttttaagttttcaaatacatacacacatatacgtaaaacgtatatccagccgggcgaggtggctcatgcctataatcccagcactttgggaggccgaggtgggtggatcacctgaagttgggagttcgagaccagcctgaccaatgtggagaaaccccatctctactaaaaatacaaaattagccaggcatggtggtacatgcctgtaatcccagctacttgggaggctgaggcaggagaattgcttgaacctgggaagcggaggttgcggtgagctgaggtctgccattgcactccagcctgggcaacaa

SEQ ID NO: 111640 - DNA, 205 bp, Homo sapiens
gcatccactaagaaagtaacacacacacacaaaatcaaaacaggattataattctataaaaaatcaactaaatacataaaaaggcagcattagaggaacaaaaggcataaaaaacatatggaaaagaaagaggagaaggggaggagcagaactgagcaagcccctgctgattgtcccctaattttactaaattttactagttttt

SEQ ID NO: 111641 - DNA, 107 bp, Homo sapiens
ttttctttttggttggttttctgatctagaccaaacagcatctcaaaaaatgactccaaacagcatctcataaaataataacctttcacagttcagtggtttatact

SEQ ID NO: 111642 - DNA, 308 bp, Homo sapiens
gtcaaatgcactatacattattgcttctgcctgtgcagcagtgatccccgttttccctgttaaatgcgctgtgcttgtcctttagtggaacaacttcaccccagtactttacgtttttggagtggggctgttttatccttgactccagtcttgtcatttctattggaattcttagaaaactctcttcctgctaatattgctgggcgtaatttggagaagctgagagagtcactgagactgaagccaccacagacaaaggtcagcttggggatggagagagaaacctgtgctgttatcatcttctagat

SEQ ID NO: 111643 - DNA, 460 bp, Homo sapiens
gatgcaccccaaagctagagaattcctgctctgagccatctctgaaagcaccaagagccagctcacggaggagatgccagctcacggaggaaaatctggaaggtgttgaagcatagacgctggaacataaaatgactcatgatctcactgggagaagggctgggaacatcgtgggctctcttctccccgcgctcctctctccgggtctctgtttccctcattccacgatgtttagaaccatcggcgcactacatcagactagaggtctggggtcacccgaccatcccgccacaagcccctccgaggcatcactgtgtccagattttgcaaactgcacctcctgaaggggctggggtctgtccacttcgccccatctgccgtggcagcacttcctccgtggttcgcacccccacagcagcctcctgggaaggcacctccctggggcccctctcagtccacg

SEQ ID NO: 111644 - DNA, 283 bp, Homo sapiens
tttgacacatggtgttgtatttattttggagctccaatctccactaaattcaggtccatcatactgcctcatagtattaaactcatcagaacatgctgatttttctccagcccgagctacatgaaggaaatgaagcatggaaatggagaactaatagtaaagcaattgagccctgttgcaggtcacatctcaaagaggagcacagctacaaggacatataaattgttcttctgagccattagaatgtcaaaacattggaataaaatatttgtattttagaaag

SEQ ID NO: 111645 - DNA, 702 bp, Homo sapiens
cagtaaaagccttgtcatcaggtttatgggctggaaaacaacaagccaactccacagcagcagggaatgggaagtgtggatgccacacggcactgaaataagagagtaatttgaggagcataattatccaaggtggcagtttgatgaggggatggaggttgacactcctaagcttgagtcaagtgccctggaatctgagtggctgttgaaatggtccacatttcaagttcctgcctcacgccaaagtgctggcagttccctcataacaaggcccacctgagcacctgcaggcctgacccacagggcagagggcctcgtgctgagtcactgaaacctcccaaagttctgagccaagagctacaaggcaacactcccgtttcccttcgccaccacgaccaaaacaccatgctgggcagaggttagaagagagagccaccaccaaatgtttcaacaatatttttaatgttcatacagctttattaaaatgagcaataagctttacattccttggtttgtagaaatggactcaagaggtcatttgggttaactgctacatttaacagatgtggaaacacgcagggaggttacatgtcttgctaaagtcacccaggcagccaaaccaggattaaactcaggtctcttgatcacctgtcccaccagtatcccccagagtatcttgcttgttccatttcatgacactga

SEQ ID NO: 111646 - DNA, 150 bp, Homo sapiens
ggatgaggtccttggaacctgaatatttaccatcattttaagagtttttgatgtggttctggaaaggacactttgagaaagaaggagtggtggtagtgatggtagggcaggagtggggcaaggtggggaataggtctccatattctggat

SEQ ID NO: 111647 - DNA, 297 bp, Homo sapiens
atcctttttgagttaattttaggttttgaagatgtaaaaatcttaacatgatttaaagtaaaaattatacagtccctgttgccacccatcttatataggtaatacttttattaatttctggttgctcctatatttgtttctttttgcaaatttaaaattattataatattaaatataggccaggcatggtagctcatgcctgtaatcctagcattttgggaggctgaggtgggaggattgcttgagctcaggagtttgaaaccagcctgggaaatatagtgagacttcgtctctatg

SEQ ID NO: 111648 - DNA, 562 bp, Homo sapiens
ccctgcctggccctggtctttcttccatagctgtccagggctgccagccctgagcaaccagctcgccatcctgggaagagtgcccagccctgtcctccccggtgtctcctctcctgcttaccccatcccagccctccgaaccgctccccttcgcagagccacaggcatcatcctgccagcccggaggaatgtgctgcccagtcgaggggcatcttccacccggagggcccgccccctagagaggccagcgacccctgtgcctgtcgcccccagcagcagggctgccaggagcagccacatcgctcccctcctgcagtcttcctccccaacaccccctggtcctacagggtcggctgcttacgtggctgttcccacccccaactcatcctccccagggccagctgggaggccagcgggagccatgctctaccactcctgggtctctgaaatcactgaaatcggggctttctgagctgccccttcaccaccccgccccaaggaataaggaaggttcttttaccaggagcccaaaaaagggcactgccttttctgctttgcttca

SEQ ID NO: 111649 - DNA, 486 bp, Homo sapiens
aggaagtgtgatttttcatacgtgttctacggaaatagtaaataatggacttcacctagtctgcagtgtattatggggttcagaataaaatatgagttcaactggcaatttcaaatgcggctttggagagaaaacatttatttgactgaaagatttgcttctgacttgaggcccaggaacattcccagttttaactgtagtgttgcattcctgggaagttctgttccatagcttcctttgcaaattcatgtagatggatttctttagctctgacagtttcctccaaacctttcctacattcttccagggcctttgcttatagacaggggagttacaccaggatggttaggtttcaggttaacaaaaagaaacacttttattgtcaatattaatggcaaacctcgatttttacaaggcttgggtttagcagtgtgagcagatcaaaagcagcttggtttgatttctcaatattctctggagcttaga

SEQ ID NO: 111650 - DNA, 366 bp, Homo sapiens
aagacattaccttggacactaaaccatgaagcggggcctgaaaggactcccttttacagaagacctacaggcttctcccagaagatggaattaaggcaagcacgaaaacttggaggctacctatttaccaacctttttaaaaaaagttttaaaaaaattataatttctgcaggattcctatgtgaccacagtgctaagtgctttatatatattatttcattattgctcacaatagggctaggcatggtggctcactcctgtaatcccagcactttgggaggctaaggtgggtggctcacttgaggtcaggagtttgagaccagcctggccagcatggtgaaatcctgtctctgctaaaaatacaaa

SEQ ID NO: 111651 - DNA, 392 bp, Homo sapiens
cagatggactcagaggaggaagagctgtaaggcatgaaatacactgacacacttaagcataccgatagactgagtatatttgattaaatggcagaagatgaaggtagaaataaggaacttttttgtcatgttaaaaattatcctgaacataaatgggaatcactcaaggcttttaatttagtgaaaacctaacagccattaaagaatatttattgagtttttacccaagtacccagaattcttctaagaatattacattcttagaagcatttaattctcctaaccagccctcaaatcctatctgatttgcacttcggatagattatgctggtacagggaggatggccaaaaggctggaagtacagatcagactagaggaagtaaatctgctc

SEQ ID NO: 111652 - DNA, 499 bp, Homo sapiens
tttctcttgcacttagaggatccccggcactgcttcggatggggacggggtctttggaagatgcatcagcaggggaggacaaaagctagaggtgctttgtgggcaaagtgatgcacctaatgatggatttcagcaactcagcaggagcaagagagaaagggagcggtggaatctacaacacacccagctcattgcacagatcacagaaggtggctgtgaaagcctttctgccataaggggtgtagagctgcactctccatttgtgagccctgccatggacaaggtacagctcacatatgtgcagtgcctcagctaggttttcatttccgggttgttaaatgtttggccaagcacccaggatgtcctagaggaattcagaagagtcacagacccatgtgatgttagagctaggcaggacctcagagacccccactgtagcttgcttgttttactgatgggagccctaaaccccagaaagggaaagagacttatcctgagt

SEQ ID NO: 111653 - DNA, 491 bp, Homo sapiens
aggtgagtcagggagtggccagtgcttcggatggggacggggtctttggaagatgcatcagcaggggaggacaaaagctagaggtgctttgtgggcaaagtgatgcacctaatgatggatttcagcaactcagcaggagcaagagagaaagggagcggtggaatctacaacacacccagctcattgcacagatcacagaaggtggctgtgaaagcctttctgccataaggggtgtagagctgcactctccatttgtgagccctgccatggacaaggtacagctcacatatgtgcagtgcctcagctaggttttcatttccgggttgttaaatgtttggccaagcacccaggatgtcctagaggaattcagaagagtcacagacccatgtgatgttagagctaggcaggacctcagagacccccactgtagcttgcttgttttactgatgggagccctaaaccccagaaagggaaagagacttatcctgagt

SEQ ID NO: 111654 - DNA, 247 bp, Homo sapiens
ggtgaatggttctgcaggtgaagggctctgcaggtgaacggttctgcaggtgaagggctctgcaggtgaacggttctgcaggtgagcggctctgcaggtgagcggctctgcatgtgagtgcctctgtgactggctcgcaagcagcatttgtgcacacttgactggccacaacagaatgttcttctctgttgtcagcactgaggaggaagctcctgcctaagcgaccacagccaggcacccgctccat

SEQ ID NO: 111655 - DNA, 624 bp, Homo sapiens
gtgatcttaaaaaacagaaaagcagatcacagcgcttctctgctcagaatcctccaatcagccaaggagaacttgaagtcctctcctgggtgttataacgctcccatctgacccctgcctgtctcgctccctctgcttccgctaccccgcccctttcttgttgttctgttcttcagggactcctctgcctgtcaccatccaatcttcggggtctagaacaaagccacgcatagtaggatcaatagccattgttgaacgattgagtgactcttgcaaccaattcaaaattgaatgccttgccaagttaccatttgctcatggaaaatcaggctcattgtgtcgaaacgatttgcttcactagcattttatgttgttctttttcctgagcttatactcctcgctaattttagcatcccgtctaaactgatcagccttggagttgaccttttaaagatgttctcgtgtttctaatttcacctgtaatcattaatagcgtaaccagtatttatagatccatcgcagctaaagttttagtgtttgatttttttcgaatgatttcaattatttccatattactttcaaatttctttagaatatctacttttatttttcaaaaaataagag

SEQ ID NO: 111656 - DNA, 239 bp, Homo sapiens
tgctggggttacaggcgtgagccaccacaccaagaccttaattgtttttttagactgtcatgcccacctttgagtggctcttttgttttgagcttttttgcatactcacaaaccaatcagcatgcactcccccattctaagcccataaaagcccagaactcaggcacactttggggactgccccacctttggactgaagctacatgactttgggtgggggctgccctctctgggtcccc

SEQ ID NO: 111657 - DNA, 739 bp, Homo sapiens
cggcacgagattgagggtggctgatgtaacaatctatcccaatgagttgcagcttttatatggatatatagacaaatagtttcaacttttcaaaactattcctagtcaggggaggtaaggctaatgaaaataatttaatgaataattggatccattatatgtgataaatgataaacgttttggtagaaattaatctttggagaattttatcaatagtaaaggaatggtagaataatctacagtacctgacttcccaaaacacaaacacttgaatttgcaaaacatcattttatagtgaaacatgcagaattttttttggtcactggtggccatttgagctccattctgcttagcacgttgcaaaactggaatgagaagcttctgttatatttctctggcagtggccatgcttagacagtctcctccatatggaatttattttgtccccccaaaaatctatggtatctcattatagtatgttctgacctcaatgagtctttgatgttttgaattgttttttctccttttttcttttctctctctctgtttccttcctttttttcttttctttctctttcttcttttaacatggtagcccacatttacatataagaacattgactctcaagaattttgaatcacacttggaagaaagaatgtggattggaaacatgttgaatgtatgattgactgacatcattgtttcaagagcttaagggtgtcccctgtagaacaatct

SEQ ID NO: 111658 - DNA, 562 bp, Homo sapiens
cacctctatccccaccactctgctattacttcctgtaaccagagagaagtcactagaccaatttaaatagaaatctaggaaaatcctcatatgctagcatttcatggttcatgattcttccagaatttgagttattctgtttagtactcattgaggtaagaaaaaattagaaaagactgctccttacattatcttagagactaaggaatcacttttaaatccttttttcttttttctttttttttgcattttgaagttatctatgttcagtgtcagaaaaacaaagtctcctttttttgcagcattcatttgtgaattttagagcaagaaattaatcttagctgtaacattttaatgtcaagtaagcccctttctcataaccccatttgaagttacacattttgctaccatgaaacacacatgctggttaatacaaacaagttactctgaactgggaatacacccccaaaatgacctattacttctttctccttctcaggagaactttaattttgtggcctccaaaagcatttttaaaaaccaaaacggtttaaggaaggac

SEQ ID NO: 111659 - DNA, 318 bp, Homo sapiens
aataattacctatcacaattcaaaattataagaacaaattaaaacaatgtaatagcatttttcaaacatcaaattgtcaaagattaacatgataagatccaatttatccagagaatagagaaccaggaactctattacctattgttcctaggagtatagattgatataaccatgttggatttcaatttgggaatatttgccaaaattttaaatatgtgtaggctgtaatgtaagaattccaagtctggataaaagtctatcctataagagcacaaagatagatgtccaggattattgtttcagccattggttaccatt

SEQ ID NO: 111660 - DNA, 480 bp, Homo sapiens
taaatgtcatttcagaaaaagagccaattcataccatctttacaaaacacagataccctcaaataattgctgctattgcatattcgtcccttggaccccttcttgcacttcaaaatgattgcagcatctgatataacttttttcttctattccaacaacagcaacatcattaactgcatggatagcttagctgacttcaggacctcacagttttaagatctctatgattttatctccagagcaaccttgaaatagcagagctctaccttcactcttattactcacagatctcaaacttggaatcatgtatcattcatcaaagcctcctttaccttctatccactaatccaatgaactggttcttcaatcaattaacccttccaaagatgatctgtccattaacccctcctgaaaaatatttaaatccatatatagcctgtacttcattagcattaactgcaaaaggcttactatcctaca

SEQ ID NO: 111661 - DNA, 406 bp, Homo sapiens
ccaaggaattacaggatgtggccaaggacttatcaaagtcagtgcttccaggctgggtgcagtttgggctgttgtccacaggttccctgctgtagagtcaagtggaggtaccaggttccagatggggagcacatcagacatcctgtgataccactccctggtttggggggcactgctctaggctcctcgaaacttcagggtttgctgctgaccctggtgaaggcgagcacacctggaaagcctctggcactagtccggacttcagaccgcctctgcactcccagtgccccccagggtacggacgcaggccatgctaggtctccagcaggcggacttttctgtgttactgtgccattgcattcccggaagaagtgtccctgatacccgaaattggagagcaaagtga

SEQ ID NO: 111662 - DNA, 272 bp, Homo sapiens
gaacttaaaagagctaaatgttatatctcatattaactttgtctttaaaaattttatcagtctcaaaaaatgagttgaaaaggcagtacatagaggcttaatctaaaaagataagaagattttaattagaattgcttataacacaaaattcctaagattacaacatgataccaaagggaaaacggcaaagaagatttctaatcggcataagccaaaataacctaaggctatataacttttcttttttttctttttggtagacacaaagtctt

SEQ ID NO: 111663 - DNA, 788 bp, Homo sapiens
gaagagatttctgcctgaaaaggtgttttaagagggtaaaatgaactgcaattttcagtgaaaaaaatcccccaagggctttggaagtggtaggaattgatagaaattcaatgtagcgggaaagtccacactctgtagaacttgctttcctgaaaatcagtggacaatacatatcgttagaattctccctcgaactttggggtgctgttggagattatgaaatacatttgtcatgctggaattttaccaagatggaattgaagggaattatttttccatcttaactcttcatttgagagtgataatttttttctcaatgaaaagtttaagaaaatcttcatttccttcctcaaagtgttaggtgaaaaaatggaaatctttatccagagagagagaaaaaaggaggaacagctacagaatgaggaactctggtaagatgaaaacactactagttagaatcaatttaattactcagccagagtaatggagccagctgtaccccgacattatcacagggaaaaatgaactggcaggagggattcttgaaaacagttcaagaagggcgcatcaatatacagcctgttcttgtttcttctccatgtaattagatattgctcactggaaaatgaaagaatttgtgtgcaattccattagaatatgaaaagctgctgcccaagttagaattgtcctccccgttaagctgtacacaaaatagaggtcaagctcgggaggctgattctgtgtggccactgatccttgaatatccagtttaggggatattgaccctg

SEQ ID NO: 111664 - DNA, 224 bp, Homo sapiens
ttcattgtgttgtcttcctgctccaaatttctatgaatcctggcactgctgccaactagctcaggcaattcatagaatgtctcaaagtctcagttttctcatctgtacaataaaaaaaaaaaaaatacctgttgtgctgactcataggagcacatggaacagcatttgtagcaagtaagagcttaaataactttctggtccctttaagtatatgtgaagaaaga

SEQ ID NO: 111665 - DNA, 548 bp, Homo sapiens
ggtcaataaaattatcgcccaacacaactatctatgtccaaatgctaagcctgtccctcagaaagccctagatgaaggctacctttactgggacaaatacaatctggcatttcttctactgcagccaatattctaagctatactgctgtgaatgccacataagctactgacatcttgtttgtagtttcactggaaagtaaaataagaaaaaaaaatcaagaaagccacacagtgtgaataaatattacttttctgaaaaacacacagctctatttaatgctcagtgctcagctgcatctatatggtaatccattatagtacactcgaaatcgaaattaggtattactactgatcagcacatcagggaatctgtcattcttttaactgattatccatagttcttttttcttcagaacctactgcatgaccaggaataatgtgaaatgtaagctggagtctacacaagatgctatagtctactttataactgctggtcttctgatttgtgtgggaaatatttttaaattattatcagatgactgcaacat

SEQ ID NO: 111666 - DNA, 405 bp, Homo sapiens
tgatgtagcaggtctgatctaggaggatcccctcacattttccacaggagttcaagatcagcctgagcaatatagcgagaccccatctccacaaaaaaatatgccactgcctcaggagaaccttctatgatctctctcagaccaggatggaaccccatgttacatacatccatgagattatctcctcttagtactggtcatacttctaattatttgttcaaggccctactagactcaagcttcaaggaaacaggaccatggctgtcttattaccatgtcatcatcactgagccagggcccagcaccctggtgggcactcaacaaatgtctactgaaggcatgaatccctcacaaaaattaaggcagcaactgacaattcaaagttgctatccctgtgcaatatta

SEQ ID NO: 111667 - DNA, 255 bp, Homo sapiens
  misc_feature (213)..(213): n is a, c, g, or t
tgggtgttgagcagatgccagcatccctaccaggaagaaactgggcagggggctcgtgtgaaggtactgagggcacatgaggctggcaagcttgaagactagaaaggagatgagggaggctggtgtgtggtttgcagagagtgcaggaggtgaggttggaaggaggcggtggctgggccacctccagcttgtgagccagtgagaggatgtgtntgcagaggaggagttggatgaaatgtgtctgtagaggtggag

SEQ ID NO: 111668 - DNA, 298 bp, Homo sapiens
ctgggaggccattacttaagggagatggagatgggtttttggtcttaaaatatgcacacctgatgactacaggtgataccatagcaaggttgcaggctttttctctacagatatccaggtcgtaaagaattcaggtttcatggcctttgttgtatgttcttctttttacaaccctttaaaaatgttaaaaccattcatgctcgtgatggtgcagaaacaggcctcgggcaggatttctcccagaggccaggggggtgagatttctcccagaggccgtagtttgccaacccctgaccaa

SEQ ID NO: 111669 - DNA, 300 bp, Homo sapiens
caccactgcctgtgctgttttggatttataacttagctgcatttgtttccaaatctataatatggaggtaataatggtatccaccacttggagttctgaggaggaacacatagttaataaggagagcgtccagaacaaggccagtgcacaattagcatggaagcacttgttataaatagtagatgggcctgagtagactggccccacctcttcactctcctcccctcggccagcacaaaatagataccatgctagatgccgccttgatgccaagtttggtctagctgaggtaaagccagc

SEQ ID NO: 111670 - DNA, 267 bp, Homo sapiens
gcattcttgcccttccactgtactgcacacagcaggagcttcattcccggatgagccccaggtcagacactggctgggctggacccatgagtcagggctctgcggcagactgaatcaacagagaagacaggcctggcccagccagtggcccaaacagaaagggaaaggccaatgcctttgcttggtctgggctgggccggggctgtaacagttgtaggcagaagctgagttcaagctgggggtaaataaatacatctccagcaaagc

SEQ ID NO: 111671 - DNA, 249 bp, Homo sapiens
ctgaacatataaaccacattcccatgtttaacagataggttggttaattttatccaaggtctaggaatatagcaagttgattacaggacaagaaacagcaaaactgaaatccaacttctctgcttttgaaaataacctctctgaattcagaaaaggagtaatatcttgatagcctacttgctaaagccatggctacttttcaactggtttgtactgctattgttgcactcaatgttaaaatattaaaat

SEQ ID NO: 111672 - DNA, 377 bp, Homo sapiens
gcacttcggtgcttctgcctgccctgctgtttccattttccccagcatgccagtcaagagctgcagacatactccaactccccatgccacagttagggttaccagtactttctttcaaattagaggagtgaaatttgctactactggtcacttggattgtctctgtgaatttggacttaaaccctacaatcaggtaaataatcttgtgctccccatttattccaaaataatagaaagggaatgcttttaaacagtaattaggaatattaatgagatcctatctgacttagttccagtaagtgctaaaaaccacctaccaatccagaaggaaaatactctgcaaagcaaacaggagtgtatactcagctcctgagagt

SEQ ID NO: 111673 - DNA, 709 bp, Homo sapiens
acatttaagagcagtgttttaacagttttttccaaagccatgagatagaaactgtcatggaaactgaagctcctctgactggaacttacttaggccttgccagggtgggcaaaagatgacgttgaaaaagatcaggtagcaccctgcattttgccattggctaaagtggggtcagagctggttgccattttctctctgtcttgaggttcaggcctgtcatcttctcaaaatgcctccaggcctgttgggacagtgaacagtaatggccaaactaaaaactttaagaaggatatgatatgctaaatgcagggaaaaagacttcgctttaaccctcaacaaatgtataaagagggccgggtgtggtggctcacatctgtaatcccagcactttgggaggccaaggcaggaggatcgcttgagcccaggaattcgagaccagcctgggcaacatagcaagatcccatctcttaaaaaaaaaacctagctgggtgtagtggtgtatgcccatagtcccagttacctgggaggctgaggtggtaggattgcttgagcccaggaattccaggctgcagtgagccatgattgcactactgtgctccagctagcctgggtgacagagccagaccctgcctctcaaaaaaaaaaaaaaaaaaggccgggcgcggtggctcacgcctgtaatcccagcaccttgggaggccgaggcggg

SEQ ID NO: 111674 - DNA, 509 bp, Homo sapiens
tgaccatgctggtcctagaacaatggccggggctgccccacgttttccttcctaaggcaaagccacgacgtggcccttgctcctccccgtgcagttcctggagctcctgtgggaaccaagcttccttcgttttcttcctttctcgagtagctcaacacagacaccaccagccactgagggtggggagtcgggaagagcgggctgcagcctcagagcctgtactcccagcccgaagctgtctcatgacgcatgggcccatagtgtgcgtgcctgcgagcgtgtgtgcagctgggagggcgcggtatgcgtgactgtgagcatgtgcacgcacacatgtgtgccgtggctgtgggagcatgcagggcatgtaagggcagtgctgaggcctcaactgtctgcttccacataccctgcactccacatgggttattagctggaataaatcataaatacttcattatacatcatgctgttggacgcagaaaggccccatccatccacctcaccac

SEQ ID NO: 111675 - DNA, 196 bp, Homo sapiens
ggtcgacatgtcattcagatatgcagctcagtgagattaatatcactatatcactgtgtcatggacaaagataataaacaggagtgactgtcagtgaatacaactggttataactcagcaatctccatagcttcattattatttacttatcactgaatatgcagtaatttgtccagtaaaagatggactgtgaaat

SEQ ID NO: 111676 - DNA, 269 bp, Homo sapiens
gtgagtcactgcccctggcacctatttattgttttggtatttcatgttactcctaagcttgaaagctcttttttctatatacagaattcatagaatttttgaaatacttagttttctttacagctttttccatgcattcagcatttcatggttaactctagtcagactggaatggctttgttatgccctggcccacttgctgccgaattcccagaagtgcctctgctgtgctggcataaaataacctgaaaagattctgaaaagccagg

SEQ ID NO: 111677 - DNA, 406 bp, Homo sapiens
gaaggtacagaggagcactgtttataaaaaccctacactggccaagctgtgtgcctgggcatgacactgggctcacccaaagggcaactttttcccattcacacagtgggctaatagtggccatgattttctacttccaaggtcagtacatagtaccttaaaacaacacatatcaacatagtgttggaagttctggccagggcaattaggcaggagaaggaaataaagggtattcaattaggaaaagaggaagtcaaattgtctctgtttgcagatgacatgattgtataacgagaaaaccccactgtctcagcccaaaatctccttaagctgataagcaacttcagcaaattctcaggatacaaaaccaatgtacaaaaatcacaagcattcttatacaccaata

SEQ ID NO: 111678 - DNA, 380 bp, Homo sapiens
gggcaggtggactgcttgagtccaggagtttgataccagcctgggcaccatgccaatacctcgtctctataaaaagtacaaaaattagctgggtgtggtggcatgtgcctgtagtcccagctacttgggaggctgaggtaggaggatcatagtttcaaagtgtggcacttactggttctccactcactccctcctgccgtcttgtgaagaaggtgcctgcttccccttccccttctgccatgattgtaagtttccggaactgcaagtcaattaagcctgtttcctttataaattacccaatctcaggtatttctttacatcagtgtgaaaacaaatgaatacagtccccttccctgaggtgccttctccttaggcaacca

SEQ ID NO: 111679 - DNA, 324 bp, Homo sapiens
tttcactgtgttagccaagatgttctccatctaggagagtatttttcataggcttcagttggggaagaaaaaagccataaataaaaagactgatgcatttaactacatcaaaatggaaaaacttcagtatatagaaagacaacacagacaagattaaaacaagctacagactaggagaaaatatttacaacatataaaacagagaaacaagtactatctatactaaatacagcccttctgcaaaatcagtaagataaaggtaatatcttttgtgccaggaaaacaggcaaagcatgtgaacaggcaatttacagagctacaagt

SEQ ID NO: 111680 - DNA, 248 bp, Homo sapiens
agccatgtcccggggctaggggcgctgtgggcgccgcgcccgccgctgcccggcaccggaagccaagagggcgttcccgacgggctccgcagatgcccctccgcgtcctgccgcccatcctgcccggattgtcgcgggccgggggcgcgacaggaggccgaggcctgcccgggcgcagaggcctgcctgggcgcagcggcctgcagggcgcagccgtccctccgccggtcggggtcccctcgctccgc

SEQ ID NO: 111681 - DNA, 366 bp, Homo sapiens
gccacggacacctccccatcaaaagccacgaaacccccaccatggaccaccacgaacccccagtggctgaacacctcggaaccccgaccaccgacctcctcccggggccccaggtaggacagcctggatgctgggcaccgagccaggggcctcggggctgggggcagcttgggtgctagcgagaggaagttcctgggggcgggcatgcggggagacacagcacccctgtggggggggcttctttctccaggctgggccttggcctccagacgcctctctgcccaccaacccctttgtattgagaggggcctcgacccctcctcatcccctcagtgaaaacaataaagacaaatttttgttgcttca

SEQ ID NO: 111682 - DNA, 161 bp, Homo sapiens
aggaaaaataatcctgtgggtccacctaatctggtaagtgttgtatttggaaaatcaaaccccaaattaaacgcaggacgtggaaactgacgataatatttaactatgacttccacgtgcacatttatctgaattggctaataaatcaaactattcgtctt

SEQ ID NO: 111683 - DNA, 747 bp, Homo sapiens
tcacccattgtttctgcacctttcaggaggcaagggggaggacccgaagtccccatgggctgcaaggtgggtgcacaccgtttctgcttctgaagtccttccttggcttctgagaacaaccctcttccattccctccaacccttctggctgttcattctctatccctgttgcaggctcatcctcctcctcctgacctgggaacatcagggctgctcaaagctcagtcctgggccctcttcccttctcagctttagacctcctgtagtataataaaaatagacatttggtctttgtccttggttcctgaaatagaaaggctaaaactcttggaattttctgatagaacatttgttattacttacattgttagtgttattttgttgtaacataattgttttttataaagagtcccttttgatcacacctgaatttatgctaatgagatgactgagagtgggctctctagacagcctcaagatgggctgggtaccagaaacaccaagtgattagaggactggaacttttaactccacccactgacctccagaaaggggcaggggctgcagactgagcaaggctggtggggcttctgggtggggagcatgtggagaccctggaggctggtgcacccagaggggccctggaagtcccatgcccatagcacactctgtcttctatctcttccctttgccagttcctgagttttcttctttataataaactggtgaactcaagcaaaatgtttt

SEQ ID NO: 111684 - DNA, 441 bp, Homo sapiens
  misc_feature (100)..(100): n is a, c, g, or t
  misc_feature (441)..(441): n is a, c, g, or t
gcccgggagttcgagagcagcgtgggcaacatggcaaaaccctgtctttacaaaaaaatacaaaaaattagctgggcatggtggctgtcgcctgtagtcncagctacttgggaggctgaggtaggaggatagcttgagcccaggaggtgagctgtgatcttgccactgcacggacagagcaagactgtcgcagaagaaaatataaaattcaatattccaagggctgtctccctgatagtatttattagctctttatttgtgtaactaagtaatcaaaattttaaaataaataaaagaaaaggtcaaaatacatcgaactacacatggggcaatgaatgaatttaaaagacatacatgttcagttcgtagctaataaaaacatacaaaggaataactcacatgctctacaattttctatcctgagggtctctctctcactcn

SEQ ID NO: 111685 - DNA, 519 bp, Homo sapiens
ttaatgatggtgatactttctgaaaaatgcatcattagatgatttcatcatgctaacatcatagagtgtacttaacacaaacctagaagatggtatagcctactatacatctaggttatatggtatagcctattgctcctagtttacatacttgcacggcatgttactctactgaatactgcaggcaacttgacacaatagtccatcactgactgaaacaacgttatgtggcacatgaccataattttattcctaggaatatcctcaacaggagtaagcaataagggcacaaaaataacagaatgttaatagaaactgtattatttataatactaaaaattagaaattggccaggcacggtggctcacacctgtaattccagcgctttgggaggccgaggcaggtggatcacctgaggtcagaagtctgagaccagcctgaccaacatggtaaaacctcatctctactaaagatacaaaaagtagccaggcatggcggctaatgcccgtaaacccagct

SEQ ID NO: 111686 - DNA, 685 bp, Homo sapiens
ttaggcagaattagtgattcctgagtctttgctcttagagcttgtaggtcaagtgtgtactgtatttctgttctttcacagttttttattcgattgtctgtagaatagactttattattgtcaaggggaagacagccttagcaaaattttgaaataagtcattgtgtgcctaagcataaattagtttgtgagaacatactttttaaagagaaatgtagtagggtgtatagtatgtttgagtatctttttccaataagcattgcatgtataatcattcactcattgcatgtataattattatttaaatattctttattaattaaagacctctctggtctctccagaagtcttccatggctgccctcatccccaccctccagaggaatctgaagccacatgtgctccctggcacccacagcccctgcctctcccagagcagcagtacctgagcctcagtggattccaagaatcgaaacccttggtctgctgcccctccctcccagaatgtttctgtctcattcttacctactcaaggccctttcagtagccccttggggtattctcttcctatgcaccagggcaacttctgaactcaccactttcctggaaagacccccaacatcttcggggagcggtcccctacaggcctggctgcagatgcccgtgcacacaggaacactgttta

SEQ ID NO: 111687 - DNA, 695 bp, Homo sapiens
ggataatgtgggaggtggaagggtaggggtgggagaaatcctggtattctttaatgaggagactagaaagggaaaggaagaatataaaatccaacttttgttcctccattttgattgtcctaaagcatttccaaatagataagaccttttcaagaatacttctcagaaaaaaaatcactcagccttcaaatagaccttgacttcagatgacacaaaagctttgggaagactcttgggtagtggactttaatgaaaactgaagtgtagtaagttatctatggggtaggaatagaaattttcataaattcaatgatgtaagtattttttaggaaaattaaaaattccaatatttcaaatattctttttttttttttgagacagagtcctgctctgttgctgaggctggagtgcggtggcgcgatcggggctcactccaacctcaacctcccaggctcaggcgatccaaccccgtcagtcccgccaagtagctgggactacaggtacgagccaccacacctgccttttttttccttttatttttctttttaattttagtagagatgttatgttgctctgttacccaggccagtctcaaactcctgggctcaagtgatcctcctacctcggcatcgcaaagtactgggattatagacatcagccacaacacctggcctaaatattctttttttcgggaa

SEQ ID NO: 111688 - DNA, 674 bp, Homo sapiens
  misc_feature (390)..(390): n is a, c, g, or t
gaatttaatgaaataggttggcatggctatccagagggcagcccccaaggccagggacgctgggtgtggacaggaaaggtttgctacacacagtgtgatgtctcttgaggttagagaacctgtgcctctttgggaggatgtagtttgccctaggcctggatttcggtagaatgagcaagagttagccttgaagtcctgttcaggtgggccccctcttgccctgtacccagaatgagctgatgtgagatgccgagagtggcttcgttgggaagagagcccggaccttgcttcccgttggccttccaggatgctaactgctcgggccgaacatcctgtgggaagataatcccctgcttgtactgagaaattcagaagcaggaggccgggcgncggttgctcacgcctgtagtcccagcactttgggaggccgaggcgggcggatcacttgagatcagcctggccaacatggtgaaaccccgtctctactaaaaatacaaaaattagccaggcatggtggcgggcatctctaatctcgcgacttgggaggctgaggcaggagaatcacttgaaccagggaggcggaggttgcaacgagccgagctcacaccactgcgctccagcctggggaacaagagcaaaaccccatctcaaaacaaagaaaagaaattcagaag

SEQ ID NO: 111689 - DNA, 319 bp, Homo sapiens
aaagataagaatatgtacctccagaattcttccagctcttctgcactgcaagataaagtaatacttcatgaagacagaaaaaagataccagatcaaagtgtggattcacaaaaaataacgagcgatgctagaaatggtatatgtgtgagaaaacatagaaaaacatcttttattaatctaccatttaattttatcagcagtgtgaaaacgaactaatacaatacatcatgtttgaaagcagggcaaactcataggctcctggtacaatgaaagcaatctccaaaccgcatagatgcaacaataaaagctgaaaactttg

SEQ ID NO: 111690 - DNA, 146 bp, Homo sapiens
tgctgggattacaggtgtgagccaccgtgcccggccggaccggatagtcttatttcgcatttgtagaaacctagaacaaaaataagcatgtgggaaagtttattctgcaaatctgcatttttgaagggacagagctgctgagagcc

SEQ ID NO: 111691 - DNA, 681 bp, Homo sapiens
gacctcgtgatccacccgcctcagtctcccaaagtgctgggattacaggcataagccactgtgccccaccggcttaaaatttcttaaaacattgggggaaatacaattttaggtgatattctaaagctcattgtgcctattgttatttttttccttttctcttttggaacctggagaatgtaaaagaacttttcttatgaagctgtatgcttaaaatttgtgccgttttctgtagttacgttatacgttaatacataatttaatgaaaaaagcctgggctcagaatcatgctaccatttacaggagaaaaaatatgtactaatttttaagatgtattatttataaatactactttgtttcatgcagtggtccttattattcaaaggaaagaatcaggaaccaggatacagttgttaaaaggaagagccagaaacagggatataaagaaataattagaaaaaacttaatgatatatatttatgaaagaagatgcagcaaagggaatcagtcacagcatgaagaaaggagatgtcctagtgattcagggctaagttgttacatataaaatagatgtcatatatgttatatatagttgttataattacatacaatgcaatagatgtccccttagttatcttaagtaagtatctatggctttctttatttctctcccataaaata

SEQ ID NO: 111692 - DNA, 289 bp, Homo sapiens
cattttcattatgcatagcacagatatgatgttgtggccttctctgcattgtattaggaggcacaatcttaatttgtcccattattggtgatgctaaactaagtcatttggttaacatgttatctgccaggtttctcccctataagcttgtttttctgcttgtaatttagaagttacaattttccctttgtaattatcatatggttgtgctttaagaacacataaaatattggttctctttattctttttcccattaattttagcatctagtgatgattctttccttaa

SEQ ID NO: 111693 - DNA, 351 bp, Homo sapiens
gccttcatactttctattccaattcctgcatctagattatacattcttcattggtgtagaaaaaaaggaccagtttggctcaaatttgtgattttgattttaagttggactgcagcacttttgctaaattgtggttcatatgagctcgtaatggtatagtggacattttgattctgatctgtctccctccacaacttccctccccctcccaaactgatgcacgtataattttatcatataaacccatgacttagcttcaggggaccatgttgggaagacttaacatttgatgaactgtaaccgtgtaccttattcactcgttcatcttaataatttatatgtgttgtatta

SEQ ID NO: 111694 - DNA, 201 bp, Homo sapiens
tactagcaaaccgaattcagcagcctactagaagaatcatatatcaagtgagatttatccctgagatgcaaggatggtatgacatatgcaaatcaataaatgtgataccacacattgacaaaatgaaggataaaaatcatataaccagccaggtgcagtggctcacgcctgtaatcccagcagtttgggaggccaagatgg

SEQ ID NO: 111695 - DNA, 194 bp, Homo sapiens
taaaattttaacttattttagattcaaggagtatatgtgcaggtttgttacacgggcataaagtcagttttctttgacacctaagattaaaaagtgaaagatattttcattgaaactggtttcctttaacacagtctttggtttgtgagaattttcccatttttgaaaaggattcctagaatacctaaatattg

SEQ ID NO: 111696 - DNA, 316 bp, Homo sapiens
gcaaagagccaggaaaagaattctaagcagagggaacctaagcatgtgtaaaggtcttgagactggaataaatttgctaaatgaacagagaagactcctgtggctgacggaaatgaccaatagaataatttccaatgatctatggagaccaatagagatagatggctggaagggggaggcaggaaccggctcactcagggctctgaacgccatggtaaggaatttagattttattctaagggcagaggaaagtcactgagtgacatagtcagatttgtgttttttgggttttttgttttgttttgttttgtttttt

SEQ ID NO: 111697 - DNA, 751 bp, Homo sapiens
aacaaaagcgaaactccgtctcaaataataatcattataatttctaatgtttttatgtgtgatctaagtttcaaaacattacttgtcttgatatttggtaaattagtagtaatgtgaattagcaaagcttgagattttttttttatacttgaaccttggtttgagagttaaacaggaaaaacatcaaacattaatggaaacgtatttaatctgttaaattataccataatagtctatttaatatatttcgtttgtttttcattaccaataacaaaatatattagactattgtagcatatgattctattatcttctcagttaatgtgtatgcacatgtgtataagtgttaaggaaactcagaccatcttatttctacatatgcttttatatctgcaaagatgatacataattcttgtagagccttatttgttcaaaaggtaattacgtatttgatacatcatttccagatttagaaatttcgtatttgttataggatgcacaaacaaaagaaaagctttttaaaaaaaaatctgctttcaattgttcgatataggacaatcttgaaatctttttaactagggttttcaaaagcatttgctctcatgaagaacctacccattattcccccagaggatattttacaacccagttaaacaaacacctaaaaatgttggattattatggaaatacactaccttaaacctccattattatatagtaacttgaaagcagcaataaattatgtttgctt

SEQ ID NO: 111698 - DNA, 148 bp, Homo sapiens
gtcatctttgctctgatagcattataatgatgatgaagacaattgctaggttggtgagagaaggctatatacacaccagaactctccacgtatatggcaagttcatatattttgttaagtatgtctcattggagaccttcttttcccg

SEQ ID NO: 111699 - DNA, 516 bp, Homo sapiens
ctataatgaaatatgtaatttaatttaaataatatttagaaattatatccatatattcaacaagtaattattaagtgtatttatgtgccagataccattctaggtgcctgggatgcatcagtgaacagaatacatctagtgctgcatgagggagcttcttttttagtgaaggaggacattagacacagatgtataaatgagtcattgaacaagataattgcaggcagagatggattctatgaaagaaataaatcagggtgatgagagggaaagtgacagagagacagctttaggttggaggctaaagtgaggcctttgaagaaatgataattcatgtgtgacttgaatgacaagataaaatgtagagagttagaggctgaggattacaggccaaggaaatagccctgtgcatatgttgtgagacatagctccaagacatagacatgcatagtttaattcaacttgactcttccagaaatgaattgaaggtcgctaggcctggagtgtcaggaagca

SEQ ID NO: 111700 - DNA, 380 bp, Homo sapiens
taaaggtcacagagatcagaaggcaggtacttgtaggctcattagggacacagtaaaacagacttaggaagccgcaggtgttagaaccaagtaccgtggtgggagctgtgggaagacagggttggggttctgctgggggttatgttactcttggtctggtgctcagggaattctgcctagaagctggatgagctgttgaggatcctgtggctgagttggagccatctctcttgctctgctcaggtatggatgtgtttgtgcctctgtcagcctttgactttgacattttgtgtgtttcatcctgccaggctccttcatacgagtgtgggtagggaactcctctgtgctgttttcttagtttttttagtgcacccaggggc

SEQ ID NO: 111701 - DNA, 272 bp, Homo sapiens
gctacacacttaggctacatggtatgacctattgctcatatgctacaaatctgtacagcatgttgctatactgaatactgtaggtagttataacaaagataagtatttgtgttcatctgtgtaggccacttaccacaaatggagcttgcaggactagaatttgctctaggtgagtcattgagcgaatgccttgtaattaactaatttcctatttggtacctttcccttctttttccttctggaatccatttactatttggggtcacttgctt

SEQ ID NO: 111702 - DNA, 690 bp, Homo sapiens
gagagcactaaaagtattccaaaaggaaccaactaacatttgagtggattttaatatgatcaaaaattctcttttgaatttatattatgtgtcaggaagcctctggggatagagagtccattaaaatgagcagtgtgctcttttgcatagtgggataggcagagtttaaagatgacccccaatgacccattctttatatcattccgctcttctttagtgtcaacaggatttcactcccttgattgggttactaatcagttgactttgacgttatcaaaagagacataattctgggtggatcttacccaatcagaagaacgtttaaaagagatgaagcacttcctaaaagagattcaaagcataaaaaggtccatggaggaaccacatagtaagtgcctgagagtggcatgtcagagctaagagcagttctgggacaatagatagagaagaaatggggacctcagtcatgtcgctgcaaaaaaaaatgaattttcccaaagacatgaggatgtaaatgcacttggctgatattttgatttcagctgtgtgaaaaccttagcagagaacccaatatactatagccagactcttgatctatggaaactgtgagataataacttttttattttataagcctctaaaatggtggtagtttgttcacagaaataaaaatctaacacaaggagtcca

SEQ ID NO: 111703 - DNA, 606 bp, Homo sapiens
ccactaggttttgtttcctactttttaaattggtgttaagaaagggaaaaaaatcacaagtttgtctaactcagtagaaaaatcgacaaagcatttgcagacaacttggcaagggtacagagaaatggatgtactgtttttcagtattttgggagggtggtttgagcagcatttattgacaatttcattagtggggatgtttctattgaaaacagagttaggaagtcataaaatgttcttgcaatataaggtaataataccactggcgtttatcttactgttttcatgttctaagtgcatgcatctgagtaaaaggatctgggctgcagtccagtctgagagatgccagcaaaggcttcctaggccaattcagtccagtaaatccctcttcgatcttctcttccacacagacagcagtgatgagcatgcccatgaactcacatgattattttggggaaaatgaaagagttgtattctttttgaggtagtaattccactttcaggggcaaatacattttgattattttatcacccttcagtgagttgtttttgttctttaatcacggatgtatgtttgaagtaagaagtaaagcataaagtatatga

SEQ ID NO: 111704 - DNA, 402 bp, Homo sapiens
ccgggaaccagaggttgcagtgagttgagatcgtgccactgcactccagcctgggtgatagagcaagactctgtctcataaataaataaataaaataaataaatggttttgcatataataattcaataacccttacaataaccctgtgaggaagagataggtactactattatctcagtttaacttatgggaacaaactgaggccaagaattgttaagtaacttgtccaagggttactcagtttgcaaatggtaaagtcaagatgtgaacccaagcaatgtggcaccacagccctcttaaccagtatgttctactgcctctcacttgaagagtttagaattaggtgcataactttcaaacccctggaggaaaaaagaaaacaatctagcaaaacctaagaaa

SEQ ID NO: 111705 - DNA, 335 bp, Homo sapiens
gggtgtcccctggtgccttgggggccaccaggtgtgtgtgtctgagtgtggatggaggccggggggacgttcggcagaactgagcctatttctgtccttcaggcctgcctgagctgggccatgggcatcagcccagcgtcctcagcagtgccccctccctgaagtcccctctcctaccaaccagaggcagaatctcctaccagagttaggtaggagtttggtcttctctgctgttttgacacggtgggacagacccattggtcaagaggagggtctgtccatctgtccagctgttccagttccagacatgtgcccacctcccccaaccccaaggt

SEQ ID NO: 111706 - DNA, 1082 bp, Homo sapiens
tccgggtcagaccggcgcggggcgctgcggcccaactccttagtaggacgacgtgactcgaggggccggaggacggagggctcctcctcatccctggaggttccagggatctggcagagaaagaagcccagtctcacagcaatgactcctgaacatcctttgcaaacactatttaggacagatggactgaagtaggccctggggagagttgggggcatttccggaggccagaccaaaggtgatctccaggagatttggatgttagtgcaggatagctcagagccaagtggcagataagtctttgggagccagaagggctctttcttctctaaggaacaagtgtagacctataggggcaagaacctgtggcaaccctgggagaggtctgcagattcaggagggaacatcccaaaactcagcagaggaggagagggagcttttgttggtcacctggaaccactaccaatccatgttcatgtcaaattaaatgatcactttgaagtcaaaacaaaaaaacacaaaaaaaaaaaaaaaatttttgggggcgccccatgaccccaggaaaaagttttcgaaaccacatcgctggggcggcgagcgcccccagcgaagtatcggtgaccctgtgctaacacaggttgtacacaaggagacccgcgacagacatcgcgtgggggactccacaccaataaaaaaagccgggggacccgcaacgtttgtgaacatcccacaagagtacgaaggacatagggactacacaaggggccaagggacgcaaataaataccggcgcggggggaaacaaggaaacaacatagagcagaaataccagaagaaacgaaaaagacgcgagaacgccgatacgaccaaggagcgagcgaacgcgacagccacaggaggacgaagaaagaagaaaccaaggacgaagcaaagaagagagagagaggagagacaacacaaagaagagaacgaaacgcaacgagaggtgagaacacaacaaaaaagcaggacaacaagaagaacacaacagagcgaaacgagaaggcaaaggaaaagtaggacgaagccacggcaccgacggat

SEQ ID NO: 111707 - DNA, 873 bp, Homo sapiens
caaccgggaaaccacataccatggacagtgctcggggaatttcggctcctcctcatccctggaggttccagggatctggcagagaaagaagcccagtctcacagcaatgactcctgaacatcctttgcaaacactatttaggacagatggactgaagtaggccctggggagagttgggggcatttccggagggaacatcccaaaactcagcagaggaggagagggagcttttgttggtcacctggaaccactaccaatccatgttcatgtcaaattaaatgatcactttgaagtcaaaacaaaaaaacacaaaaaaaaaaaaaaaatttttgggggcgccccatgaccccaggaaaaagttttcgaaaccacatcgctggggcggcgagcgcccccagcgaagtatcggtgaccctgtgctaacacaggttgtacacaaggagacccgcgacagacatcgcgtgggggactccacaccaataaaaaaagccgggggacccgcaacgtttgtgaacatcccacaagagtacgaaggacatagggactacacaaggggccaagggacgcaaataaataccggcgcggggggaaacaaggaaacaacatagagcagaaataccagaagaaacgaaaaagacgcgagaacgccgatacgaccaaggagcgagcgaacgcgacagccacaggaggacgaagaaagaagaaaccaaggacgaagcaaagaagagagagagaggagagacaacacaaagaagagaacgaaacgcaacgagaggtgagaacacaacaaaaaagcaggacaacaagaagaacacaacagagcgaaacgagaaggcaaaggaaaagtaggacgaagccacggcaccgacggat

SEQ ID NO: 111708 - DNA, 403 bp, Homo sapiens
  misc_feature (377)..(377): n is a, c, g, or t
cttctctctactcatgcttctcacaattacaggaatatgctcttctcatcccttcatctgttaattctcattagtcttcaaagtcttagcctaggcatgaattcctgtaggaagcgtcctctgactcaaggctgggttagagtccctcctggagttgacacctttggaagtatctaattagcccatgagccacacctccttctttaagaactgagcctcacttgcccactcccccaatttacagtcactggccccagagccatgtttttactatcctaagttcagagccaggcctggctctgaacttaggataacctacattaatgtataattccagggctgggcatcgtggctcacgcctgtaatcccagcacttngggaggccgaggtggggtaccgagct

SEQ ID NO: 111709 - DNA, 377 bp, Homo sapiens
aggctctgtcagaaggaaggtctagggctgaaggctgtttttcagattcttttgttccctttatttggtattctacccttttcctgtggatgtggcttcctgagagccgagctgtattgattgttatctcccttctaggtatagccacccagcaaatctaccaaactttgggctggaactaagggttgtctgcccggagttctgtgttgtgaactgtttatgggtttctcagctgtggataccagcacctgtttcagtggaggtggtagcgggggtgaaatggactcttccagtgttcttagcactggtgatttaatgctctcttattgtgctgatttgcctccttctgggaagtggtgctttccagagagcatcag

SEQ ID NO: 111710 - DNA, 589 bp, Homo sapiens
cacagagccctgctctgggctgacgggtgaccgtttgtcagaactctccagatggagcaattagggcctgtgcatctcactttaagccaactttaccttcagaggagaaaaagacccaggaacgatgctcacccccattgagctgatggtctgcctgctgaaggactgtgtgcagtacacagacgtctgcaacttgccttgaaatgtgccaaaaaataagatggtgagggcagcatagctttggggagcggaccacaggtgtgagcgaggggactccacaattcacttcaactttgcaggtgttcgaattttttttttttcccgagatgaagtcttgccctgtcgcccaggctggagtgcaatggtacaatcttggatcactacaacctctgcctaccaggttcaagcgattctcctgcctcagcctcccaagtagcttggactacaggcatgcaccaccatgcctggctaatttttttttgtatttttagtagagatggggtttcaccatgttggccgagctggtctcaaactcctgacctcaggtgatctgctcacctcagcctcccaaagtgctgggattacagac

SEQ ID NO: 111711 - DNA, 462 bp, Homo sapiens
tattatttcatgtacttttcccgggtaagcaatttatttaacttcaggcctcagtttccttatctgtaaaatggacataatcgtaaggcctacttcatgagactaatgtaaggattaaatgaaataagggaagcaggttgcttaacatagtgcctgacacatagaaagctttttttaaaatgttagaaagtagagataatatttttcatcttcataccaattctatggcgcagagaggttaaactgcgagcccaaatgtgcacaacaaggagcactggtcagcccagagcccccatcagcgcaccgatgcttccccttccctcccagaagcacagaaagggcggctggcctgcaggatttggcagagcttggctgaggagccacagcagacgggtagcaaaaaggcaccaacatgggtggaaagagaatgtccagtttctatgagatccctaacgccgtcct

SEQ ID NO: 111712 - DNA, 279 bp, Homo sapiens
gaagtccacgtgataaatgtttgacacataaaaaggaagcagttttcctagtgtctggcattacacagaaagctgctctctatatttgtgagtactctatttcacaaaggcctctgaccttctgtcaatattagatttcatttagttaagttaaattagtatttacagtcaaaattgggaattataccaacatgttatgattaatgaagttatggaattattctgtactggaattcgaacaggggaaggctttaaaaaggagaacttaggctgggtgca

SEQ ID NO: 111713 - DNA, 109 bp, Homo sapiens
catcattcttgaaggatcatctcaatttactcttacagctatccaatggcattacgtgttataattttcatttcacagatgagcaaactgaggcacagagattaagtaa

SEQ ID NO: 111714 - DNA, 847 bp, Homo sapiens
atcataagaaagttaaaaaacaaaattcaaagttaaaaaaaagaaattctaagaaacaaatgatttccaaagaagactcctataaccaggcatggtgttaattaattgaaaggtaagagtaaagagtaattagatatacaaaacctctaaaaatgtaattcacaagaagccactggagtatgtgctctaccaaaacaagaacataaactaaaaaatatgaagacctaggattcagtaacagagaattcagcaatagagaggaacaaagggaatttctagtttaatgtgaagggaaatctgtgaaggaaatcttttaaaaggatcttaaagtattacattgaaaaatactagaccacacactgaaccaattaatcacaaaatctggggatgggccccaggcatcagttttttctaagctctttaggtggtatcaatgcatagataagtttgataaccattggtgtacaagcttgttgtacaaaatgtgctccctgaggcagtagcattggcatcactggggaacttgttagaaatgcagtatctcaggaatggcagggacatggaaatatgttttaaagacttgctacagcctgagtgtggactactgtgagagtgagaaaattctaggggctgcagtcttagaggaaagccccacactctcatgggctttacctccagtacctccactaaaatcttatggtgaagaaccaagaaagttgatgtccttgtgcccccagcagaggaaagggaagaataatcattgtaaaaacaccagtgccttctccacaaggagggccagctctccaggggaagactgtcagaggcttatcccagtggaggaagggta

SEQ ID NO: 111715 - DNA, 750 bp, Homo sapiens
agaaagcttttctcacaacaattcaaaggaacatccctaaatggagtcttaccagctggacttggatcacctacaggaatctggaccaactgctgtgacctggggaatccatgtgtccagtcctagctcaggtgcccacccctgaaccaacaagcaaggttatggagaatccatcctctgactggccaggcctgggtcaggtgtccaccatgaaccaatcactgaggctatgaagagtccatgctatgataggccaaactggagtcaggtgtccaccaaaaaccagtcactgaggccatgaagagtccatgctatgattggccaggctgaagtcaggtgtctaccggagtggaccgatgaaccactcactgaggccaagaagagtcctacaggattgaccaggctggagtcaagtgtccaccatgaaccaatcactgaggccatgaagagtccaagctatgattggccaggctggagtcaggtgcctagccctggcccaaatgttgttagaggttcaggagcacagaagtaaaggctcttctagaaaaatatacattctattactaacagaagagtagtaaagtctaggcaggaaaaagaataagtgtccaattcagtatataattatcaacagactaatattcacaaatggtctgttttgaacttcataattaaggttgattagcattgccaatgcttcccagccttcctgggtcacatagaaaggtataatgtgtgtaggcagcctag

SEQ ID NO: 111716 - DNA, 454 bp, Homo sapiens
acaggaggcaggtagacctgggtttgaatcccagctgtcccacccctggtgtaattacgcatctcggtcagctctcgaaagcgggaaggatggtagcctcatccttgggctccatgagtgtgtgtgctcatgggtgtcttgtgctcagatggtagcgctggagtgggtgtgttgtcggtggctgttactccagcattgaaacgctgccagctgccgcttcatagcttagggccctgggaagtcgcttagtctctgagctggagccttgtcagctgtgaaaagggctgttaacaaatgttaacctcacagagttactgaggactcgaatgaactcacatttgggaaggtcacgggagggttgagtgctgagtgctgtgaccaccgcgtcctcacagcgagggctgagtgccactcgccagccccagaatctgcctcccgtgctcagcgcctgctt

SEQ ID NO: 111717 - DNA, 314 bp, Homo sapiens
tcacagctcactgaagccttgatctgagatcaagcaaccctccctcctcaatcccctgagtagctgggactgcagtgcgtgccactacacttggttaatttgtttgtttgttttgttttgtttttgtaaagacaatcttactatgttcctctggctggtctcaaactcctgggctcaagcaatcctcccgcctccaccttccaaagtgctaggattacagggataagccatagcacccatcctaaatgcttcctgatgaaataatatgccactgtctatagtctttcttaaggattaatcaagcctctggatcc

SEQ ID NO: 111718 - DNA, 722 bp, Homo sapiens
gttccagctgggacattgggatactgggatgccaagaacgtgtctgcctgatgtcagcagtgggctcgaggcaaatgtccctgcgcacccactagtcacttagtcggtgcatcttcacagaagatgacatctctgtgggcccctctcctcccctgctgtacagtggctcttctgcgaccaagtggcccccttggaggtggaagcaaaaggaaaggctctggacggaggttccccagctccttgataacgtgtaaaaatctctggcaagtcagaggagttcattgctcacattaagagctgcttctcattgctctcttattcattcagccattagttaattaattctctcaacatgaatctattcggtcccggctgtgtgccagggtctgtgctagatgccgggggcatcatgtcagccaaacatggttgccagcctccataaaactgttttagtggggaaattagatattaaacgagcagtgtcacaactccataattaaaaacagtggatgagctttcagggaaaatcatagtgtgctgtgaaagagtaaaaatgaggggatccgatcaaagctgagggagctgcatttgggctgaattctgcaagatccatgtgccaaggccccagggtggagccattgaaagaaggaacctaagagctgtggtgatagtgccatatgtgttcatgctgcttttgtttttacaaagacttaactttttag

SEQ ID NO: 111719 - DNA, 504 bp, Homo sapiens
gtccacactgtgaaactgaaggatttcacacgagggaatctgtggtggtttggatggtcttggactcgtttctctctaagatacatgatggaaatgccacctgaggttcacaggccattgtgagtttgttgcaaatgagctgggagtgtttagccttccctgtgagcggtttccggctgcatgtcttattcaagtgtttctctaaaaggccgcagctccccgtggtgacttgcctggtggacatgcattcacaaggatacccaaatgagcagcaccttcaccagctgtgtgcaggcagacattcagcagggatgagctgccgaggtggcggccctgagggccggcgtccacctctgcgaaaatagtgacttggtctagttgtgggctggccattattggacctttgggaaaaagggaaggggaagaggtaaagggtctcaccttttcaggccctggcagaagggtgaaggcaaaggccccagacacagggatagaagagatggt

SEQ ID NO: 111720 - DNA, 409 bp, Homo sapiens
ccaatctagcagatcccaatgattttccctacaaagtatatcctgaatccattttcttctcttatctctacagccaccaactgacgacaagctgcttgctctgcaatagtctccaaactctggaactggttaggacgaagaacagtatctggtgcaaaggctctccctcactcccctctaacttccacacagcagcctgagtgatcttgcttaaaatcctttggtggcttcccaaggcagtcagagaaaccccaaacttctcaacatgggctacaaggcctggcagtcacaggctgctgcctgcctcttccacctcagttctccctcactcactcctccaccctggcctggatcacgttttctgaccagcagtaagtttttttccaactttgcacatggtgctcattct

SEQ ID NO: 111721 - DNA, 459 bp, Homo sapiens
ttactggtgaaactggtacaggcaacatgttggcttttttgtcaatcagtttttttttttgagaaattttgcttttgtgaaaaatctgccttttcaaagttttctttccttctattatactccccatatttttggtgtatctgagatgctaatggcctttcattttcaagtttttatttcccagttggcagtaccacttttacactttgaagatggaaacttggcaggaaaattgtatgtcagggtgtatttctgtgtggggttgcaagggcaggaaagaaaaaaaactcaaataagaggtattttcattgagtatgatcttagctggtggcatatataattacccagttatttctctcatgaaatgaatgtttatatttgttgtcatgaccaggatcagctacacagtttgtggggcccagttcaaaatgaaaatgtgggtgtattaccagatttagc

SEQ ID NO: 111722 - DNA, 419 bp, Homo sapiens
gagggccaggttttcacctttggcgggataacacagatcctcaccctgctcatcatgacctttccaatcatgcttgccacaattgtttatctatatttatcatcatgcatgacagaatgaagaggaatctcggtaaatccctgagtttcagacacattcctccctaccccaataatacaggagcaatcctatggcctccatataatgagtcaattacttctgctagaatataaatgtttctctttgcctgcctaagagtagcataagagtgcacaaaatggtctatggtagatagacctgtaggcttcatggagccactttgtgtctgctggtagagtcaccctttccctaaaactaggagtctattcatgcagagccagatcgtcagaagaaagaaagtattacccaagtgggtcagt

SEQ ID NO: 111723 - DNA, 566 bp, Homo sapiens
ggggaagtgggcgctgactgtccccagggggtacaagaggcttaacagcacccactgccagtgacatcaacgagtgcgcaatgcctgggcgtgtgtcgccatggtgactgcctcaacaaccctggctcctatcgctgtgtctgcccacctggccatagtttaggcccctcccgtacacagtgcattgcagacaaaccggaggagaagagcctgtgtttccgcctggtgagccctgagcaccagtgccagcacccactgaccacccgcctgacccgccagctctgctgctgcagtgtcggcaaggcctggggcgcgcggtgtcagcgctgcccaacagatggcaccgctgcgttcaaggagatctgcccagctgggaagggataccacattctcacctcccaccagacgctcaccattcagggcgagagtgacttttcccttttcctgcaccctgacgggccacccaagccccagcagcttccggagagccctagccaggctccaccacctgaggacacagaggaagagagaggggtgaccacggactcaccggtgagtgacggaga

SEQ ID NO: 111724 - DNA, 444 bp, Homo sapiens
cctgcctcggcctcccaaaatgctggaattacaggcatgagccatggcccctggccaatcatctctgtttttacaaatgaggaactagaaacttaggtgagtaacttgctcaaaggtacacagcaggaaagtgctgggagctggatttgaaccagactggcttactgttaagcctcttccattaataccagttcctgttctatcatgcggactgttaaaaggggcactctgaaatctagggttctaattgataattccccccgccccgcctcacttttcattctccttttcagctcctgcattgcatattaagaaatcaatagtcagttggcatcttgcagagtctctggcattgctcacaggccctcgaactactacacagtttttgcagtaaatcctattgggctcatttctgttgtcacagggcactggcggctgtatctc

SEQ ID NO: 111725 - DNA, 102 bp, Homo sapiens
  misc_feature (1)..(1): n is a, c, g, or t
  misc_feature (92)..(92): n is a, c, g, or t
  misc_feature (95)..(95): n is a, c, g, or t
  misc_feature (98)..(98): n is a, c, g, or t
  misc_feature (100)..(100): n is a, c, g, or t
ngaaccaatcctaaagaatattcttacatataataaagaattcccatttgatgttcagcctgtcccattaagaagaattttggcacctggtnaanaananaa

SEQ ID NO: 111726 - DNA, 632 bp, Homo sapiens
gccacacactccttatatcctcccacctgagcccaaatcctggccccaggtgcaagcagcacccctcgagggctctgccccagtatccccagagaattcacacccctcccgctcccacccccgagcctaccctttgtctcgcatgagtgcaatatttcattcccggtggttgtctggggaggtggttggacgaggtcctgcttgaggctcggggatcagaacgatgtcaagtgaagaaaaatgcacgggggcatgctgagccactggagttccagagagggccgaggagggtgcagccacggaggttggatcctctgctccgccgcctcgtcctcgtcccgcttctgctgggttccgctttgtccctggttttttcctttttttttctgtgtgcgtgcgaatggtgcggcccctcccctctcaccgtggttaacgtgacgaaggcacgattcctgtaaatgtgtaaactaaggggatggttggattttttttcaatgtaaacactaaaaacaaaatggacaaaaaaacacacaaaggttttatgaacagcagactctatgtaaaggcattttagtatcaaattttttattgataacttgcttaagaataaatatatggactattgtacaggt

SEQ ID NO: 111727 - DNA, 8199 bp, Homo sapiens
  misc_feature (118)..(118): n is a, c, g, or t
  misc_feature (1860)..(1860): n is a, c, g, or t
  misc_feature (1916)..(1916): n is a, c, g, or t
  misc_feature (2071)..(2071): n is a, c, g, or t
  misc_feature (3597)..(3597): n is a, c, g, or t
  misc_feature (3599)..(3600): n is a, c, g, or t
  misc_feature (3604)..(3604): n is a, c, g, or t
  misc_feature (3634)..(3634): n is a, c, g, or t
  misc_feature (3637)..(3637): n is a, c, g, or t
  misc_feature (3639)..(3639): n is a, c, g, or t
  misc_feature (4421)..(4421): n is a, c, g, or t
gttccacacacgcgctggacctggaggctgaggaggagaggacgaggctatgtgatgaccgcctggggcttgccagccgcgagctgctgctgcaggacagcaaagaccgcgtagagtncgcccggatccacccaccgagcagctgccctggggacctggccccccacctcatgatgcagagcggccagctgggcggggacccagccccccacacccacccccatcccccctggctgccccgcacccgcagcccctccctgtggatgggggggcactcctacggcctggggcaccctgccctgcaccagaacctgccccccggcttccccgcctccgtggctggccctgtgccctctgtcttccccctcccacaggacgcccccacacagctggtcatcctgccctcagagcccacaccccacagcgccccccacgcacttgcggatgtcatggaccaggcgtcactgtggccccccatgtacgggggccggggccccgcctctcacatgcagcacccgggccagctccctgtgtactcgaggccgcagctcctccggcagcaggagctctatgctttgcagcagcagagggccgcccagttccagcggaagcccgaagaccagcacctggatctggaggagcccgcccaggagaaggccccaaagtccacccacaagccagttgccttaacccccacggccccgggcgccccctcacccgctgcaggccccaccaagctgccaccttgctgccatccgcccgacccaaagccccccgccagctcccccaccccaccacctcggcccagcgccccgtgcactttaaatgtctgccctgccagcagccccgggcctggctcccgggtgcgcagcgccgaggaaaagaatggggagggtcagcagtccacggccgacatcatcacatccgaaccagtggcacgtgctcactctgttgcccacgctggtctcgaattcctggcctcaaatgatccatccacctcagcctcccaaagttttgggattacagacctgcctcccggatacctgcgccccatggctggcctgggcttctccctaccctcagacgtgcactcttctaacctcgaggaccctgaaactatgcaaaccaccgccccgggggcccagcctgagcccacaaggacattcctgcctggggagccgcctccctgcagccccaggagcctggaggagcccgggctgctctcaggggccagggaggccacccaggaccttgccgccaccccctaccctgccgagcggggaccccaggggaaggcagcggaccccagcccactagaggggctacaagaactgcaatgtgcggccctcctggaggcagggggccccgaggccaccggccaggctcattctactcagggaggggcacgagaagagaggagcagggaggagggggagcaggggccctcgtcaggggcctcctcccaagtcctggagcagcgagcagggagtccgggtgcccttgaggacgagggggagcagccggcccctgaggaggacgagctggaggaagacgagctggggcagcagagcatggaggactcagaggaggactgtggcggagctcccgacaacagccacccacccagggcgctaccaggcctggatgccttggtggccgccaccatcaacctgggggacctgcccagcgacagcccaccggaccctcagcccccagcggcctctgggccccccagcacagtccccctgcctcatagctcagggattcatgggatcgctctgctcagcgagctggctgacctggcaatccagcggcagaggagtgagaggactgtgccagaggaggaagaggacgtgctanccttcaacctgcagcacctggccacgctggccacagcctggtccctggtggaggcngctggcctggacagctccactgccccagcgcagccgcccacagccaacccctgcagcggccccaggctcaccccccgcatgcagatcctgcagcgcaaggacacctggacccccaagaccaagcctgtgtgccccctgaaggccgccatcgaccngctggacacgcaggaggtggggatgcgcgtgcggctggcggagctgcagcggcgctacaaggagaagcagcgggagctggcccgcctgcagcgcaagcacgaccatgagagagacgagagttcacggagccctgcacggcgggggcctggccggccgaggaagcgcaaacactcaagctcgctgcctgccccacgtcccacggggccgctccccaggagcgatggcaagaaagtcaaggcggtgcggacaagcctgggtctgctgtgtgcggagctgcgaggaggcagtgggggcgagcctgcgaagaagcgaagcaagctggagaggagcgtctatgcgggcctgcagactgcctccgtggagaaggcgcagtgtaagaagagcagctgtcagggcgggctggcgccctccgtggcccacagggtggcccagctgaaacccaaggtcaagagcaaagggctgcccacaggcctcagctctttccagcagaaggaggctacccccggggggcgcatccgggagaagctgtcccgagccaagagtgccaaggtgtctggggccacacggcacccacagcccaagggccacggcagccgggagacacccaggtgcccagcccagccctccgtggctgcgtcccaggaggcaggcagtggctatgacagtgaggactgcgagggtctcctggggacagaggcaccacccagggaagcagggctgctgctgcacgccggggccagtgtggccgtgctggggccctcaccctcctctgtggtcaagatggaggccaaccagaaggccaagaagaagaaggagaggcaggggttgctaggggcctgccgcctgtccagccctgagagtgaggtcaagatcaagaggcggtcggtgaaggccaaggtgggcaccaccctggagcgggccccagggcagaggcccccaggtgcgctgggcaagaagaaagccaagggcaaggccaagggcagcctgcgggcagagccgggggccacccccagcagggacgccctcttcaacccctctcgggccttcgcctgccgtgaggagggcagccagctggccagtgagcgcctcaagagggccacgcgcaagggcacagtgctgcagccagtgctgcggcggaagaacggggccctgtccatcacgctggccacacgcaacgccaaggccatcctggggaagggccggaagctgagcaaggtgaagcacaaggccggcaagcagggcaagggccgggccgtgagccgcctgctggaaagcttcgccgtggaggaagactttgagttcgacgacaacagcagcttctcggaagaggaggaggacgaggaggaagaggaggaggacagcggccctctgagcgcagagcagagcgccgccctagcgcgctcgtgtgccatccacaaggaggacctgcgggacgggctgcccgtgctcatccccaaggaggatagcctgctgtacgcgggcagcgtcaggaccctgcagccacccgacatctatagcatcgtcntnnaggncgagagggcaccggcagaggatctactcantgnancagctgctgcaggaagcgttctcgatgtgcggccacagtccagccggtacctcccgcccggcacgcgggtctgcgcctactggagtcagaagtctcgatgtctgtacccgggcaacgtggtccggggggcctccggtgacgaagatgaggacctggactcagtagtggtggaatttgacgatggggatacaggccacatcgccgtctccaacgtcaggctgctgccccctgacttcaagatccagtgcacagagccctctccagccctgctagtgtctagcagctgccggaggaccaagaaggtatccagtgaggcacccccgcctagtgaagccgccacccccagcctgtcccccaaagcacaggacggccccgaagctttgaagacacctgggaaaaaatccattagcaaagacaaagctggtaaagccgaactcctaacctcaggtgccaaatcccccacgggggcctccgaccacttcctgggccgccgtggcagccccttgctgagctggtccgcggtggcgcagaccaagcggaaggcggtggcagcggccagcaaggggccgggggtgctgcagaacctcttccagctcaacggcagcagcaagaagctgcgggcccgcgaggccctgttccccgtgcacagcgtggccacacccatatttggcaacggcttccgcgccgactccttcagcagcctggccagctcctacgcgcccttcgtcggggggaccgggccgggcctccccaggggagcccacaagctgctgcgggctaanaaggccgagagggtggaggccgagaagggtgggcggcggcgggcgggcggtgagttcctggtcaagctggaccacgagggtgtgacctcccccaagaacaagacctgcaaggcgttgctcatgggggacaaggacttcagccccaagctcgggcggcccctgcccagccccagctatgtgcacccggcccttgtgggcaaggacaagaaggggcgggcacccatccccccgctgcccatggggctggcgctgcgcaagtacgcgggccaggcagagttcccgctgccctacgacagcgactgccacagctccttctcggacgaggacgaggacgggccggggctggcggccggcgtgccctcccgcttcctcgcccgcctgtccgtgtcctcttcctcctctggctcgtccacctcctcctcctcaggctccgtgtccacctccagcctctgctcctccgacaacgaggactcgtcctacagctcagacgacgaggacccggctctgctgctgcagacctgcctcacccaccccgtgcccaccctcctggcccagcccgaggccctgcgctccaagggcagcggccctcacgcgcatgcccagcgctgcttcctgtccagggccacggtggctggcaccggtgcgggctcaggccccagcagcagcagcaaatccaagctcaagcgcaaagaggccctgagcttctccaaagccaaagagctctcccggaggcagcggccgccctccgtggaaaaccggccaaagatctcagccttcctgcccgcccggcagctctggaagtggtcggggaatcccacacagcggcgtggcatgaaggggaaggcccggaagctgttctacaaggccatcgtgcggggcgaggagaccctgcgtgtcggggactgtgccgtcttcctgtcagctgggcggcccaacctcccctacatcggccgcatcgagagcatgtgggagtcgtggggcagcaacatggtggtcaaggtcaagtggttctaccaccctgaggagaccaagctgggcaagaggcagtgcgacggcaagaatgcgctgtaccagtcctgccacgaggatgagaacgacgtgcagaccatctcccacaagtgccaggtcgtggcgcgcgagcagtatgagcagatggcccggagccgcaagtgccaggaccggcaggacctctactacctggcgggcacctacgaccccaccaccgggcgcctggtgacggctgatggcgtgcccatcctatgctgagccgccaccgcagatgcctcccacgtgcgccagggaccctgtgtgcggagcctggcgtcggccaagccaccgggcaggaggcagccccggcctcccaagggcgcatctgagcaaatatgcaaaagcccacagggcaagacccaggctttcttacggttttccctggaaagagcgctccaggtgtcggaatccagtcccgtcccatcctctgcggagggtcgggctgtggccctcatgggtccccggcccgcccacccacagcgccctccgtttcccgcaccggcagttcacgggagatttgaatccaagccatattccctagtacctccgactgtctcccaccagggaaagcagaaatcaggtgtgttgtctatttatttctctatgtaaatattgtatttctgcggggaaattttatggtaaaaagtggaaaagggtttttccccatccgcgtgacaaggtgtgtgtgagcgtgtatgtgtgtgcgcgtgtgtggcgatttttgtcctggggtttcctttggaaatgcactgttctcagcccagctgggttccaacgggggcacctgggacgacagaggcatctcggggcagggggcagaggccacgggagggtcaggtgggacccttgacggcaccctctgatctcttggggggacgaccgtgtaagatgaaagtcggtcaagtttatttgctttcagtgcatctcctagaaaagaagtgttggagcagggggtggtgatgaggggcccgtggggaaaggattcaagaggcaaagcccagaccagggagtgtgacaacagccgtgagcatctcacctgtgttcaaaacaagacaaagacgaacaaatattttaaagtattgataagaaaaagcaatgtttggattgtatctgctgaatcatattccaacctatatctgatttctgtttccggggccagttggtctgaggccaaggagtctggcctccacccagagcagggaggggctggcccctcgcccccctcaccctcgccgccctggcacactcgggaagcagggcccagctctgagcccctcctcacccctggggtcctaactttcctgaaagtagtaggtgccgtgagaaggggcagtttggccaggttcctgaactgggcagggctcggggcctatgagggcaggttcacagtcccaccagattctctcctcacccccaagcagaatgcatgcaaaagacaccccttttcccacccaccttattggtgcccccaaacccctggcctgctgcgtagatggtggtgaggccaggccagcagtgctgtggccaggggagaagaaaataaaacgcaggccctgcccttggggaaggcccctttctgggcccccttttccaccagccaaatctgcctggccctcggacccctctgcctgccccaacccctttggaggtttctcggccttttctgtgccacttggtggggcagatggcctgatgggctagtgcttggggcatagaatgagggtccccctgaccacctgagcccaaatcctggccccaggtgcaagcagcacccctcgagggctctgccccagtatccccagagaattcacacccctccccttctcccacagccaaggacagacaggctgcctggacctgagcccaacagccttcagcctcagaaacgcatggggggccacacactccttatatcctcccacactaaggttcccctggccccacgggagcttcaggaaagccccccaagttagccactgctctaggacgagctctgtgtcccccacaccacaggcctcgaagcagggtgctggtgggtgccctgcaccccaatcccaggtccccttggccccctatttttctcgggcccattggggcctgtttctcacctgctggctggaccccctgaagggccgttcccagaggctccccaggaggctcaaggctgggggcttatgttgtggtcgggggtccccgcctccagccccccgctcccacccccgagcctaccctttgtctcgcatgagtgcaatatttcattcccggtggttgtctggggaggtggttggacgaggtcctgcttgaggctcggggatcagaacgatgtcaagtgaagaaaaatgcacgggggcatgctgagccactggagttccagagagggccgaggagggtgcagccacggaggttggatcctctgctccgccgcctcgtcctcgtcccgcttctgctgggttccgctttgtccctggttttttcctttttttttctgtgtgcgtgcgaatggtgcggcccctcccctctcaccgtggttaacgtgacgaaggcacgattcctgtaaatgtgtaaactaaggggatggttggattttttttcaatgtaaacactaaaaacaaaatggacaaaaaaacacacaaaggttttatgaacagcagactctatgtaaaggcattttagtatcaaattttttattgataacttgcttaagaataaatatatggactattgtacaggt

SEQ ID NO: 111728 - DNA, 8146 bp, Homo sapiens
  misc_feature (118)..(118): n is a, c, g, or t
  misc_feature (1860)..(1860): n is a, c, g, or t
  misc_feature (1916)..(1916): n is a, c, g, or t
  misc_feature (2071)..(2071): n is a, c, g, or t
  misc_feature (3597)..(3597): n is a, c, g, or t
  misc_feature (3599)..(3600): n is a, c, g, or t
  misc_feature (3604)..(3604): n is a, c, g, or t
  misc_feature (3634)..(3634): n is a, c, g, or t
  misc_feature (3637)..(3637): n is a, c, g, or t
  misc_feature (3639)..(3639): n is a, c, g, or t
  misc_feature (4421)..(4421): n is a, c, g, or t
gttccacacacgcgctggacctggaggctgaggaggagaggacgaggctatgtgatgaccgcctggggcttgccagccgcgagctgctgctgcaggacagcaaagaccgcgtagagtncgcccggatccacccaccgagcagctgccctggggacctggccccccacctcatgatgcagagcggccagctgggcggggacccagccccccacacccacccccatcccccctggctgccccgcacccgcagcccctccctgtggatgggggggcactcctacggcctggggcaccctgccctgcaccagaacctgccccccggcttccccgcctccgtggctggccctgtgccctctgtcttccccctcccacaggacgcccccacacagctggtcatcctgccctcagagcccacaccccacagcgccccccacgcacttgcggatgtcatggaccaggcgtcactgtggccccccatgtacgggggccggggccccgcctctcacatgcagcacccgggccagctccctgtgtactcgaggccgcagctcctccggcagcaggagctctatgctttgcagcagcagagggccgcccagttccagcggaagcccgaagaccagcacctggatctggaggagcccgcccaggagaaggccccaaagtccacccacaagccagttgccttaacccccacggccccgggcgccccctcacccgctgcaggccccaccaagctgccaccttgctgccatccgcccgacccaaagccccccgccagctcccccaccccaccacctcggcccagcgccccgtgcactttaaatgtctgccctgccagcagccccgggcctggctcccgggtgcgcagcgccgaggaaaagaatggggagggtcagcagtccacggccgacatcatcacatccgaaccagtggcacgtgctcactctgttgcccacgctggtctcgaattcctggcctcaaatgatccatccacctcagcctcccaaagttttgggattacagacctgcctcccggatacctgcgccccatggctggcctgggcttctccctaccctcagacgtgcactcttctaacctcgaggaccctgaaactatgcaaaccaccgccccgggggcccagcctgagcccacaaggacattcctgcctggggagccgcctccctgcagccccaggagcctggaggagcccgggctgctctcaggggccagggaggccacccaggaccttgccgccaccccctaccctgccgagcggggaccccaggggaaggcagcggaccccagcccactagaggggctacaagaactgcaatgtgcggccctcctggaggcagggggccccgaggccaccggccaggctcattctactcagggaggggcacgagaagagaggagcagggaggagggggagcaggggccctcgtcaggggcctcctcccaagtcctggagcagcgagcagggagtccgggtgcccttgaggacgagggggagcagccggcccctgaggaggacgagctggaggaagacgagctggggcagcagagcatggaggactcagaggaggactgtggcggagctcccgacaacagccacccacccagggcgctaccaggcctggatgccttggtggccgccaccatcaacctgggggacctgcccagcgacagcccaccggaccctcagcccccagcggcctctgggccccccagcacagtccccctgcctcatagctcagggattcatgggatcgctctgctcagcgagctggctgacctggcaatccagcggcagaggagtgagaggactgtgccagaggaggaagaggacgtgctanccttcaacctgcagcacctggccacgctggccacagcctggtccctggtggaggcngctggcctggacagctccactgccccagcgcagccgcccacagccaacccctgcagcggccccaggctcaccccccgcatgcagatcctgcagcgcaaggacacctggacccccaagaccaagcctgtgtgccccctgaaggccgccatcgaccngctggacacgcaggaggtggggatgcgcgtgcggctggcggagctgcagcggcgctacaaggagaagcagcgggagctggcccgcctgcagcgcaagcacgaccatgagagagacgagagttcacggagccctgcacggcgggggcctggccggccgaggaagcgcaaacactcaagctcgctgcctgccccacgtcccacggggccgctccccaggagcgatggcaagaaagtcaaggcggtgcggacaagcctgggtctgctgtgtgcggagctgcgaggaggcagtgggggcgagcctgcgaagaagcgaagcaagctggagaggagcgtctatgcgggcctgcagactgcctccgtggagaaggcgcagtgtaagaagagcagctgtcagggcgggctggcgccctccgtggcccacagggtggcccagctgaaacccaaggtcaagagcaaagggctgcccacaggcctcagctctttccagcagaaggaggctacccccggggggcgcatccgggagaagctgtcccgagccaagagtgccaaggtgtctggggccacacggcacccacagcccaagggccacggcagccgggagacacccaggtgcccagcccagccctccgtggctgcgtcccaggaggcaggcagtggctatgacagtgaggactgcgagggtctcctggggacagaggcaccacccagggaagcagggctgctgctgcacgccggggccagtgtggccgtgctggggccctcaccctcctctgtggtcaagatggaggccaaccagaaggccaagaagaagaaggagaggcaggggttgctaggggcctgccgcctgtccagccctgagagtgaggtcaagatcaagaggcggtcggtgaaggccaaggtgggcaccaccctggagcgggccccagggcagaggcccccaggtgcgctgggcaagaagaaagccaagggcaaggccaagggcagcctgcgggcagagccgggggccacccccagcagggacgccctcttcaacccctctcgggccttcgcctgccgtgaggagggcagccagctggccagtgagcgcctcaagagggccacgcgcaagggcacagtgctgcagccagtgctgcggcggaagaacggggccctgtccatcacgctggccacacgcaacgccaaggccatcctggggaagggccggaagctgagcaaggtgaagcacaaggccggcaagcagggcaagggccgggccgtgagccgcctgctggaaagcttcgccgtggaggaagactttgagttcgacgacaacagcagcttctcggaagaggaggaggacgaggaggaagaggaggaggacagcggccctctgagcgcagagcagagcgccgccctagcgcgctcgtgtgccatccacaaggaggacctgcgggacgggctgcccgtgctcatccccaaggaggatagcctgctgtacgcgggcagcgtcaggaccctgcagccacccgacatctatagcatcgtcntnnaggncgagagggcaccggcagaggatctactcantgnancagctgctgcaggaagcgttctcgatgtgcggccacagtccagccggtacctcccgcccggcacgcgggtctgcgcctactggagtcagaagtctcgatgtctgtacccgggcaacgtggtccggggggcctccggtgacgaagatgaggacctggactcagtagtggtggaatttgacgatggggatacaggccacatcgccgtctccaacgtcaggctgctgccccctgacttcaagatccagtgcacagagccctctccagccctgctagtgtctagcagctgccggaggaccaagaaggtatccagtgaggcacccccgcctagtgaagccgccacccccagcctgtcccccaaagcacaggacggccccgaagctttgaagacacctgggaaaaaatccattagcaaagacaaagctggtaaagccgaactcctaacctcaggtgccaaatcccccacgggggcctccgaccacttcctgggccgccgtggcagccccttgctgagctggtccgcggtggcgcagaccaagcggaaggcggtggcagcggccagcaaggggccgggggtgctgcagaacctcttccagctcaacggcagcagcaagaagctgcgggcccgcgaggccctgttccccgtgcacagcgtggccacacccatatttggcaacggcttccgcgccgactccttcagcagcctggccagctcctacgcgcccttcgtcggggggaccgggccgggcctccccaggggagcccacaagctgctgcgggctaanaaggccgagagggtggaggccgagaagggtgggcggcggcgggcgggcggtgagttcctggtcaagctggaccacgagggtgtgacctcccccaagaacaagacctgcaaggcgttgctcatgggggacaaggacttcagccccaagctcgggcggcccctgcccagccccagctatgtgcacccggcccttgtgggcaaggacaagaaggggcgggcacccatccccccgctgcccatggggctggcgctgcgcaagtacgcgggccaggcagagttcccgctgccctacgacagcgactgccacagctccttctcggacgaggacgaggacgggccggggctggcggccggcgtgccctcccgcttcctcgcccgcctgtccgtgtcctcttcctcctctggctcgtccacctcctcctcctcaggctccgtgtccacctccagcctctgctcctccgacaacgaggactcgtcctacagctcagacgacgaggacccggctctgctgctgcagacctgcctcacccaccccgtgcccaccctcctggcccagcccgaggccctgcgctccaagggcagcggccctcacgcgcatgcccagcgctgcttcctgtccagggccacggtggctggcaccggtgcgggctcaggccccagcagcagcagcaaatccaagctcaagcgcaaagaggccctgagcttctccaaagccaaagagctctcccggaggcagcggccgccctccgtggaaaaccggccaaagatctcagccttcctgcccgcccggcagctctggaagtggtcggggaatcccacacagcggcgtggcatgaaggggaaggcccggaagctgttctacaaggccatcgtgcggggcgaggagaccctgcgtgtcggggactgtgccgtcttcctgtcagctgggcggcccaacctcccctacatcggccgcatcgagagcatgtgggagtcgtggggcagcaacatggtggtcaaggtcaagtggttctaccaccctgaggagaccaagctgggcaagaggcagtgcgacggcaagaatgcgctgtaccagtcctgccacgaggatgagaacgacgtgcagaccatctcccacaagtgccaggtcgtggcgcgcgagcagtatgagcagatggcccggagccgcaagtgccaggaccggcaggacctctactacctggcgggcacctacgaccccaccaccgggcgcctggtgacggctgatggcgtgcccatcctatgctgagccgccaccgcagatgcctcccacgtgcgccagggaccctgtgtgcggagcctggcgtcggccaagccaccgggcaggaggcagccccggcctcccaagggcgcatctgagcaaatatgcaaaagcccacagggcaagacccaggctttcttacggttttccctggaaagagcgctccaggtgtcggaatccagtcccgtcccatcctctgcggagggtcgggctgtggccctcatgggtccccggcccgcccacccacagcgccctccgtttcccgcaccggcagttcacgggagatttgaatccaagccatattccctagtacctccgactgtctcccaccagggaaagcagaaatcaggtgtgttgtctatttatttctctatgtaaatattgtatttctgcggggaaattttatggtaaaaagtggaaaagggtttttccccatccgcgtgacaaggtgtgtgtgagcgtgtatgtgtgtgcgcgtgtgtggcgatttttgtcctggggtttcctttggaaatgcactgttctcagcccagctgggttccaacgggggcacctgggacgacagaggcatctcggggcagggggcagaggccacgggagggtcaggtgggacccttgacggcaccctctgatctcttggggggacgaccgtgtaagatgaaagtcggtcaagtttatttgctttcagtgcatctcctagaaaagaagtgttggagcagggggtggtgatgaggggcccgtggggaaaggattcaagaggcaaagcccagaccagggagtgtgacaacagccgtgagcatctcacctgtgttcaaaacaagacaaagacgaacaaatattttaaagtattgataagaaaaagcaatgtttggattgtatctgctgaatcatattccaacctatatctgatttctgtttccggggccagttggtctgaggccaaggagtctggcctccacccagagcagggaggggctggcccctcgcccccctcaccctcgccgccctggcacactcgggaagcagggcccagctctgagcccctcctcacccctggggtcctaactttcctgaaagtagtaggtgccgtgagaaggggcagtttggccaggttcctgaactgggcagggctcggggcctatgagggcaggttcacagtcccaccagattctctcctcacccccaagcagaatgcatgcaaaagacaccccttttcccacccaccttattggtgcccccaaacccctggcctgctgcgtagatggtggtgaggccaggccagcagtgctgtggccaggggagaagaaaataaaacgcaggccctgcccttggggaaggcccctttctgggcccccttttccaccagccaaatctgcctggccctcggacccctctgcctgccccaacccctttggaggtttctcggccttttctgtgccacttggtggggcagatggcccaaatcctggccccaggtgcaagcagcacccctcgagggctctgccccagtatccccagagaattcacacccctccccttctcccacagccaaggacagacaggctgcctggacctgagcccaacagccttcagcctcagaaacgcatggggggccacacactccttatatcctcccacactaaggttcccctggccccacgggagcttcaggaaagccccccaagttagccactgctctaggacgagctctgtgtcccccacaccacaggcctcgaagcagggtgctggtgggtgccctgcaccccaatcccaggtccccttggccccctatttttctcgggcccattggggcctgtttctcacctgctggctggaccccctgaagggccgttcccagaggctccccaggaggctcaaggctgggggcttatgttgtggtcgggggtccccgcctccagccccccgctcccacccccgagcctaccctttgtctcgcatgagtgcaatatttcattcccggtggttgtctggggaggtggttggacgaggtcctgcttgaggctcggggatcagaacgatgtcaagtgaagaaaaatgcacgggggcatgctgagccactggagttccagagagggccgaggagggtgcagccacggaggttggatcctctgctccgccgcctcgtcctcgtcccgcttctgctgggttccgctttgtccctggttttttcctttttttttctgtgtgcgtgcgaatggtgcggcccctcccctctcaccgtggttaacgtgacgaaggcacgattcctgtaaatgtgtaaactaaggggatggttggattttttttcaatgtaaacactaaaaacaaaatggacaaaaaaacacacaaaggttttatgaacagcagactctatgtaaaggcattttagtatcaaattttttattgataacttgcttaagaataaatatatggactattgtacaggt

SEQ ID NO: 111729 - DNA, 4623 bp, Homo sapiens
  misc_feature (845)..(845): n is a, c, g, or t
ggcttggctggggcagcagccactcccaggcccagggaccagactctcaggcagccctgggccgggccccacctgctcatgggtcgtcgcccgcgttcctgcaggttctcgatgtgcggccacagtccagccggtacctcccgcccggcacgcgggtctgcgcctactggagtcagaagtctcgatgtctgtacccgggcaacgtggtccggggggcctccggtgacgaagatgaggacctggactcagtagtggtggaatttgacgatggggatacaggccacatcgccgtctccaacgtcaggctgctgccccctgacttcaagatccagtgcacagagccctctccagccctgctagtgtctagcagctgccggaggaccaagaaggtatccagtgaggcacccccgcctagtgaagccgccacccccagcctgtcccccaaagcacaggacggccccgaagctttgaagacacctgggaaaaaatccattagcaaagacaaagctggtgccaaatcccccacgggggcctccgaccacttcctgggccgccgtggcagccccttgctgagctggtccgcggtggcgcagaccaagcggaaggcggtggcagcggccagcaaggggccgggggtgctgcagaacctcttccagctcaacggcagcagcaagaagctgcgggcccgcgaggccctgttccccgtgcacagcgtggccacacccatatttggcaacggcttccgcgccgactccttcagcagcctggccagctcctacgcgcccttcgtcggggggaccgggccgggcctccccaggggagcccacaagctgctgcgggctaanaaggccgagagggtggaggccgagaagggtgggcggcggcgggcgggcggtgagttcctggtcaagctggaccacgagggtgtgacctcccccaagaacaagacctgcaaggcgttgctcatgggggacaaggacttcagccccaagctcgggcggcccctgcccagccccagctatgtgcacccggcccttgtgggcaaggacaagaaggggcgggcacccatccccccgctgcccatggggctggcgctgcgcaagtacgcgggccaggcagagttcccgctgccctacgacagcgactgccacagctccttctcggacgaggacgaggacgggccggggctggcggccggcgtgccctcccgcttcctcgcccgcctgtccgtgtcctcttcctcctctggctcgtccacctcctcctcctcaggctccgtgtccacctccagcctctgctcctccgacaacgaggactcgtcctacagctcagacgacgaggacccggctctgctgctgcagacctgcctcacccaccccgtgcccaccctcctggcccagcccgaggccctgcgctccaagggcagcggccctcacgcgcatgcccagcgctgcttcctgtccagggccacggtggctggcaccggtgcgggctcaggccccagcagcagcagcaaatccaagctcaagcgcaaagaggccctgagcttctccaaagccaaagagctctcccggaggcagcggccgccctccgtggaaaaccggccaaagatctcagccttcctgcccgcccggcagctctggaagtggtcggggaatcccacacagcggcgtggcatgaaggggaaggcccggaagctgttctacaaggccatcgtgcggggcgaggagaccctgcgtgtcggggactgtgccgtcttcctgtcagctgggcggcccaacctcccctacatcggccgcatcgagagcatgtgggagtcgtggggcagcaacatggtggtcaaggtcaagtggttctaccaccctgaggagaccaagctgggcaagaggcagtgcgacggcaagaatgcgctgtaccagtcctgccacgaggatgagaacgacgtgcagaccatctcccacaagtgccaggtcgtggcgcgcgagcagtatgagcagatggcccggagccgcaagtgccaggaccggcaggacctctactacctggcgggcacctacgaccccaccaccgggcgcctggtgacggctgatggcgtgcccatcctatgctgagccgccaccgcagatgcctcccacgtgcgccagggaccctgtgtgcggagcctggcgtcggccaagccaccgggcaggaggcagccccggcctcccaagggcgcatctgagcaaatatgcaaaagcccacagggcaagacccaggctttcttacggttttccctggaaagagcgctccaggtgtcggaatccagtcccgtcccatcctctgcggagggtcgggctgtggccctcatgggtccccggcccgcccacccacagcgccctccgtttcccgcaccggcagttcacgggagatttgaatccaagccatattccctagtacctccgactgtctcccaccagggaaagcagaaatcaggtgtgttgtctatttatttctctatgtaaatattgtatttctgcggggaaattttatggtaaaaagtggaaaagggtttttccccatccgcgtgacaaggtgtgtgtgagcgtgtatgtgtgtgcgcgtgtgtggcgatttttgtcctggggtttcctttggaaatgcactgttctcagcccagctgggttccaacgggggcacctgggacgacagaggcatctcggggcagggggcagaggccacgggagggtcaggtgggacccttgacggcaccctctgatctcttggggggacgaccgtgtaagatgaaagtcggtcaagtttatttgctttcagtgcatctcctagaaaagaagtgttggagcagggggtggtgatgaggggcccgtggggaaaggattcaagaggcaaagcccagaccagggagtgtgacaacagccgtgagcatctcacctgtgttcaaaacaagacaaagacgaacaaatattttaaagtattgataagaaaaagcaatgtttggattgtatctgctgaatcatattccaacctatatctgatttctgtttccggggccagttggtctgaggccaaggagtctggcctccacccagagcagggaggggctggcccctcgcccccctcaccctcgccgccctggcacactcgggaagcagggcccagctctgagcccctcctcacccctggggtcctaactttcctgaaagtagtaggtgccgtgagaaggggcagtttggccaggttcctgaactgggcagggctcggggcctatgagggcaggttcacagtcccaccagattctctcctcacccccaagcagaatgcatgcaaaagacaccccttttcccacccaccttattggtgcccccaaacccctggcctgctgcgtagatggtggtgaggccaggccagcagtgctgtggccaggggagaagaaaataaaacgcaggccctgcccttggggaaggcccctttctgggcccccttttccaccagccaaatctgcctggccctcggacccctctgcctgccccaacccctttggaggtttctcggccttttctgtgccacttggtggggcagatggcctgatgggctagtgcttggggcatagaatgagggtccccctgaccacctgagcccaaatcctggccccaggtgcaagcagcacccctcgagggctctgccccagtatccccagagaattcacacccctccccttctcccacagccaaggacagacaggctgcctggacctgagcccaacagccttcagcctcagaaacgcatggggggccacacactccttatatcctcccacactaaggttcccctggccccacgggagcttcaggaaagccccccaagttagccactgctctaggacgagctctgtgtcccccacaccacaggcctcgaagcagggtgctggtgggtgccctgcaccccaatcccaggtccccttggccccctatttttctcgggcccattggggcctgtttctcacctgctggctggaccccctgaagggccgttcccagaggctccccaggaggctcaaggctgggggcttatgttgtggtcgggggtccccgcctccagccccccgctcccacccccgagcctaccctttgtctcgcatgagtgcaatatttcattcccggtggttgtctggggaggtggttggacgaggtcctgcttgaggctcggggatcagaacgatgtcaagtgaagaaaaatgcacgggggcatgctgagccactggagttccagagagggccgaggagggtgcagccacggaggttggatcctctgctccgccgcctcgtcctcgtcccgcttctgctgggttccgctttgtccctggttttttcctttttttttctgtgtgcgtgcgaatggtgcggcccctcccctctcaccgtggttaacgtgacgaaggcacgattcctgtaaatgtgtaaactaaggggatggttggattttttttcaatgtaaacactaaaaacaaaatggacaaaaaaacacacaaaggttttatgaacagcagactctatgtaaaggcattttagtatcaaattttttattgataacttgcttaagaataaatatatggactattgtacaggt

SEQ ID NO: 111730 - DNA, 8129 bp, Homo sapiens
  misc_feature (118)..(118): n is a, c, g, or t
  misc_feature (1860)..(1860): n is a, c, g, or t
  misc_feature (1916)..(1916): n is a, c, g, or t
  misc_feature (2071)..(2071): n is a, c, g, or t
  misc_feature (3597)..(3597): n is a, c, g, or t
  misc_feature (3599)..(3600): n is a, c, g, or t
  misc_feature (3604)..(3604): n is a, c, g, or t
  misc_feature (3634)..(3634): n is a, c, g, or t
  misc_feature (3637)..(3637): n is a, c, g, or t
  misc_feature (3639)..(3639): n is a, c, g, or t
  misc_feature (4421)..(4421): n is a, c, g, or t
  misc_feature (8096)..(8096): n is a, c, g, or t
gttccacacacgcgctggacctggaggctgaggaggagaggacgaggctatgtgatgaccgcctggggcttgccagccgcgagctgctgctgcaggacagcaaagaccgcgtagagtncgcccggatccacccaccgagcagctgccctggggacctggccccccacctcatgatgcagagcggccagctgggcggggacccagccccccacacccacccccatcccccctggctgccccgcacccgcagcccctccctgtggatgggggggcactcctacggcctggggcaccctgccctgcaccagaacctgccccccggcttccccgcctccgtggctggccctgtgccctctgtcttccccctcccacaggacgcccccacacagctggtcatcctgccctcagagcccacaccccacagcgccccccacgcacttgcggatgtcatggaccaggcgtcactgtggccccccatgtacgggggccggggccccgcctctcacatgcagcacccgggccagctccctgtgtactcgaggccgcagctcctccggcagcaggagctctatgctttgcagcagcagagggccgcccagttccagcggaagcccgaagaccagcacctggatctggaggagcccgcccaggagaaggccccaaagtccacccacaagccagttgccttaacccccacggccccgggcgccccctcacccgctgcaggccccaccaagctgccaccttgctgccatccgcccgacccaaagccccccgccagctcccccaccccaccacctcggcccagcgccccgtgcactttaaatgtctgccctgccagcagccccgggcctggctcccgggtgcgcagcgccgaggaaaagaatggggagggtcagcagtccacggccgacatcatcacatccgaaccagtggcacgtgctcactctgttgcccacgctggtctcgaattcctggcctcaaatgatccatccacctcagcctcccaaagttttgggattacagacctgcctcccggatacctgcgccccatggctggcctgggcttctccctaccctcagacgtgcactcttctaacctcgaggaccctgaaactatgcaaaccaccgccccgggggcccagcctgagcccacaaggacattcctgcctggggagccgcctccctgcagccccaggagcctggaggagcccgggctgctctcaggggccagggaggccacccaggaccttgccgccaccccctaccctgccgagcggggaccccaggggaaggcagcggaccccagcccactagaggggctacaagaactgcaatgtgcggccctcctggaggcagggggccccgaggccaccggccaggctcattctactcagggaggggcacgagaagagaggagcagggaggagggggagcaggggccctcgtcaggggcctcctcccaagtcctggagcagcgagcagggagtccgggtgcccttgaggacgagggggagcagccggcccctgaggaggacgagctggaggaagacgagctggggcagcagagcatggaggactcagaggaggactgtggcggagctcccgacaacagccacccacccagggcgctaccaggcctggatgccttggtggccgccaccatcaacctgggggacctgcccagcgacagcccaccggaccctcagcccccagcggcctctgggccccccagcacagtccccctgcctcatagctcagggattcatgggatcgctctgctcagcgagctggctgacctggcaatccagcggcagaggagtgagaggactgtgccagaggaggaagaggacgtgctanccttcaacctgcagcacctggccacgctggccacagcctggtccctggtggaggcngctggcctggacagctccactgccccagcgcagccgcccacagccaacccctgcagcggccccaggctcaccccccgcatgcagatcctgcagcgcaaggacacctggacccccaagaccaagcctgtgtgccccctgaaggccgccatcgaccngctggacacgcaggaggtggggatgcgcgtgcggctggcggagctgcagcggcgctacaaggagaagcagcgggagctggcccgcctgcagcgcaagcacgaccatgagagagacgagagttcacggagccctgcacggcgggggcctggccggccgaggaagcgcaaacactcaagctcgctgcctgccccacgtcccacggggccgctccccaggagcgatggcaagaaagtcaaggcggtgcggacaagcctgggtctgctgtgtgcggagctgcgaggaggcagtgggggcgagcctgcgaagaagcgaagcaagctggagaggagcgtctatgcgggcctgcagactgcctccgtggagaaggcgcagtgtaagaagagcagctgtcagggcgggctggcgccctccgtggcccacagggtggcccagctgaaacccaaggtcaagagcaaagggctgcccacaggcctcagctctttccagcagaaggaggctacccccggggggcgcatccgggagaagctgtcccgagccaagagtgccaaggtgtctggggccacacggcacccacagcccaagggccacggcagccgggagacacccaggtgcccagcccagccctccgtggctgcgtcccaggaggcaggcagtggctatgacagtgaggactgcgagggtctcctggggacagaggcaccacccagggaagcagggctgctgctgcacgccggggccagtgtggccgtgctggggccctcaccctcctctgtggtcaagatggaggccaaccagaaggccaagaagaagaaggagaggcaggggttgctaggggcctgccgcctgtccagccctgagagtgaggtcaagatcaagaggcggtcggtgaaggccaaggtgggcaccaccctggagcgggccccagggcagaggcccccaggtgcgctgggcaagaagaaagccaagggcaaggccaagggcagcctgcgggcagagccgggggccacccccagcagggacgccctcttcaacccctctcgggccttcgcctgccgtgaggagggcagccagctggccagtgagcgcctcaagagggccacgcgcaagggcacagtgctgcagccagtgctgcggcggaagaacggggccctgtccatcacgctggccacacgcaacgccaaggccatcctggggaagggccggaagctgagcaaggtgaagcacaaggccggcaagcagggcaagggccgggccgtgagccgcctgctggaaagcttcgccgtggaggaagactttgagttcgacgacaacagcagcttctcggaagaggaggaggacgaggaggaagaggaggaggacagcggccctctgagcgcagagcagagcgccgccctagcgcgctcgtgtgccatccacaaggaggacctgcgggacgggctgcccgtgctcatccccaaggaggatagcctgctgtacgcgggcagcgtcaggaccctgcagccacccgacatctatagcatcgtcntnnaggncgagagggcaccggcagaggatctactcantgnancagctgctgcaggaagcgttctcgatgtgcggccacagtccagccggtacctcccgcccggcacgcgggtctgcgcctactggagtcagaagtctcgatgtctgtacccgggcaacgtggtccggggggcctccggtgacgaagatgaggacctggactcagtagtggtggaatttgacgatggggatacaggccacatcgccgtctccaacgtcaggctgctgccccctgacttcaagatccagtgcacagagccctctccagccctgctagtgtctagcagctgccggaggaccaagaaggtatccagtgaggcacccccgcctagtgaagccgccacccccagcctgtcccccaaagcacaggacggccccgaagctttgaagacacctgggaaaaaatccattagcaaagacaaagctggtaaagccgaactcctaacctcaggtgccaaatcccccacgggggcctccgaccacttcctgggccgccgtggcagccccttgctgagctggtccgcggtggcgcagaccaagcggaaggcggtggcagcggccagcaaggggccgggggtgctgcagaacctcttccagctcaacggcagcagcaagaagctgcgggcccgcgaggccctgttccccgtgcacagcgtggccacacccatatttggcaacggcttccgcgccgactccttcagcagcctggccagctcctacgcgcccttcgtcggggggaccgggccgggcctccccaggggagcccacaagctgctgcgggctaanaaggccgagagggtggaggccgagaagggtgggcggcggcgggcgggcggtgagttcctggtcaagctggaccacgagggtgtgacctcccccaagaacaagacctgcaaggcgttgctcatgggggacaaggacttcagccccaagctcgggcggcccctgcccagccccagctatgtgcacccggcccttgtgggcaaggacaagaaggggcgggcacccatccccccgctgcccatggggctggcgctgcgcaagtacgcgggccaggcagagttcccgctgccctacgacagcgactgccacagctccttctcggacgaggacgaggacgggccggggctggcggccggcgtgccctcccgcttcctcgcccgcctgtccgtgtcctcttcctcctctggctcgtccacctcctcctcctcaggctccgtgtccacctccagcctctgctcctccgacaacgaggactcgtcctacagctcagacgacgaggacccggctctgctgctgcagacctgcctcacccaccccgtgcccaccctcctggcccagcccgaggccctgcgctccaagggcagcggccctcacgcgcatgcccagcgctgcttcctgtccagggccacggtggctggcaccggtgcgggctcaggccccagcagcagcagcaaatccaagctcaagcgcaaagaggccctgagcttctccaaagccaaagagctctcccggaggcagcggccgccctccgtggaaaaccggccaaagatctcagccttcctgcccgcccggcagctctggaagtggtcggggaatcccacacagcggcgtggcatgaaggggaaggcccggaagctgttctacaaggccatcgtgcggggcgaggagaccctgcgtgtcggggactgtgccgtcttcctgtcagctgggcggcccaacctcccctacatcggccgcatcgagagcatgtgggagtcgtggggcagcaacatggtggtcaaggtcaagtggttctaccaccctgaggagaccaagctgggcaagaggcagtgcgacggcaagaatgcgctgtaccagtcctgccacgaggatgagaacgacgtgcagaccatctcccacaagtgccaggtcgtggcgcgcgagcagtatgagcagatggcccggagccgcaagtgccaggaccggcaggacctctactacctggcgggcacctacgaccccaccaccgggcgcctggtgacggctgatggcgtgcccatcctatgctgagccgccaccgcagatgcctcccacgtgcgccagggaccctgtgtgcggagcctggcgtcggccaagccaccgggcaggaggcagccccggcctcccaagggcgcatctgagcaaatatgcaaaagcccacagggcaagacccaggctttcttacggttttccctggaaagagcgctccaggtgtcggaatccagtcccgtcccatcctctgcggagggtcgggctgtggccctcatgggtccccggcccgcccacccacagcgccctccgtttcccgcaccggcagttcacgggagatttgaatccaagccatattccctagtacctccgactgtctcccaccagggaaagcagaaatcaggtgtgttgtctatttatttctctatgtaaatattgtatttctgcggggaaattttatggtaaaaagtggaaaagggtttttccccatccgcgtgacaaggtgtgtgtgagcgtgtatgtgtgtgcgcgtgtgtggcgatttttgtcctggggtttcctttggaaatgcactgttctcagcccagctgggttccaacgggggcacctgggacgacagaggcatctcggggcagggggcagaggccacgggagggtcaggtgggacccttgacggcaccctctgatctcttggggggacgaccgtgtaagatgaaagtcggtcaagtttatttgctttcagtgcatctcctagaaaagaagtgttggagcagggggtggtgatgaggggcccgtggggaaaggattcaagaggcaaagcccagaccagggagtgtgacaacagccgtgagcatctcacctgtgttcaaaacaagacaaagacgaacaaatattttaaagtattgataagaaaaagcaatgtttggattgtatctgctgaatcatattccaacctatatctgatttctgtttccggggccagttggtctgaggccaaggagtctggcctccacccagagcagggaggggctggcccctcgcccccctcaccctcgccgccctggcacactcgggaagcagggcccagctctgagcccctcctcacccctggggtcctaactttcctgaaagtagtaggtgccgtgagaaggggcagtttggccaggttcctgaactgggcagggctcggggcctatgagggcaggttcacagtcccaccagattctctcctcacccccaagcagaatgcatgcaaaagacaccccttttcccacccaccttattggtgcccccaaacccctggcctgctgcgtagatggtggtgaggccaggccagcagtgctgtggccaggggagaagaaaataaaacgcaggccctgcccttggggaaggcccctttctgggcccccttttccaccagccaaatctgcctggccctcggacccctctgcctgccccaacccctttggaggtttctcggccttttctgtgccacttggtggggcagatggcctgatgggctagtgcttggggcatagaatgagggtccccctgaccacctgagcccaaatcctggccccaggtgcaagcagcacccctcgagggctctgccccagtatccccagagaattcacacccctccccttctcccacagccaaggacagacaggctgcctggacctgagcccaacagccttcagcctcagaaacgcatggggggccacacactccttatatcctcccacactaaggttcccctggccccacgggagcttcaggaaagccccccaagttagccactgctctaggacgagctctgtgtcccccacaccacaggcctcgaagcagggtgctggtgggtgccctgcaccccaatcccaggtccccttggccccctatttttctcgggcccattggggcctgtttctcacctgctggctggaccccctgaagggccgttcccagaggctccccaggaggctcaaggctgggggcttatgttgtggtcgggggtccccgcctccagccccccgctcccacccccgagcctaccctttgtctcgcatgagtgcaatatttcattcccggtggttgtctggggaggtggttggacgaggtcctgcttgaggctcggggatcagaacgatgtcaagtgaagaaaaatgcacgggggcatgctgagccactggagttccagagagggccgaggagggtgcagccacggaggttggatcctctgctccgccgcctcgtcctcgtcccgcttctgctgggttccgctttgtccctggttttttcctttttttttctgtgtgcgtgcgaatggtgcggcccctcccctctcaccgtggttaacgtgacgaaggcacgattcctgtaaatgtgtaaactaaggggatggttggattttttttcaatgtaaacactaaaaacaaaatggacaaagggaancacaggatcctgtagagtcacccgcacgctcgt

SEQ ID NO: 111731 - DNA, 7532 bp, Homo sapiens
  misc_feature (118)..(118): n is a, c, g, or t
  misc_feature (1860)..(1860): n is a, c, g, or t
  misc_feature (1916)..(1916): n is a, c, g, or t
  misc_feature (2071)..(2071): n is a, c, g, or t
  misc_feature (3597)..(3597): n is a, c, g, or t
  misc_feature (3599)..(3600): n is a, c, g, or t
  misc_feature (3604)..(3604): n is a, c, g, or t
  misc_feature (3634)..(3634): n is a, c, g, or t
  misc_feature (3637)..(3637): n is a, c, g, or t
  misc_feature (3639)..(3639): n is a, c, g, or t
  misc_feature (4421)..(4421): n is a, c, g, or t
gttccacacacgcgctggacctggaggctgaggaggagaggacgaggctatgtgatgaccgcctggggcttgccagccgcgagctgctgctgcaggacagcaaagaccgcgtagagtncgcccggatccacccaccgagcagctgccctggggacctggccccccacctcatgatgcagagcggccagctgggcggggacccagccccccacacccacccccatcccccctggctgccccgcacccgcagcccctccctgtggatgggggggcactcctacggcctggggcaccctgccctgcaccagaacctgccccccggcttccccgcctccgtggctggccctgtgccctctgtcttccccctcccacaggacgcccccacacagctggtcatcctgccctcagagcccacaccccacagcgccccccacgcacttgcggatgtcatggaccaggcgtcactgtggccccccatgtacgggggccggggccccgcctctcacatgcagcacccgggccagctccctgtgtactcgaggccgcagctcctccggcagcaggagctctatgctttgcagcagcagagggccgcccagttccagcggaagcccgaagaccagcacctggatctggaggagcccgcccaggagaaggccccaaagtccacccacaagccagttgccttaacccccacggccccgggcgccccctcacccgctgcaggccccaccaagctgccaccttgctgccatccgcccgacccaaagccccccgccagctcccccaccccaccacctcggcccagcgccccgtgcactttaaatgtctgccctgccagcagccccgggcctggctcccgggtgcgcagcgccgaggaaaagaatggggagggtcagcagtccacggccgacatcatcacatccgaaccagtggcacgtgctcactctgttgcccacgctggtctcgaattcctggcctcaaatgatccatccacctcagcctcccaaagttttgggattacagacctgcctcccggatacctgcgccccatggctggcctgggcttctccctaccctcagacgtgcactcttctaacctcgaggaccctgaaactatgcaaaccaccgccccgggggcccagcctgagcccacaaggacattcctgcctggggagccgcctccctgcagccccaggagcctggaggagcccgggctgctctcaggggccagggaggccacccaggaccttgccgccaccccctaccctgccgagcggggaccccaggggaaggcagcggaccccagcccactagaggggctacaagaactgcaatgtgcggccctcctggaggcagggggccccgaggccaccggccaggctcattctactcagggaggggcacgagaagagaggagcagggaggagggggagcaggggccctcgtcaggggcctcctcccaagtcctggagcagcgagcagggagtccgggtgcccttgaggacgagggggagcagccggcccctgaggaggacgagctggaggaagacgagctggggcagcagagcatggaggactcagaggaggactgtggcggagctcccgacaacagccacccacccagggcgctaccaggcctggatgccttggtggccgccaccatcaacctgggggacctgcccagcgacagcccaccggaccctcagcccccagcggcctctgggccccccagcacagtccccctgcctcatagctcagggattcatgggatcgctctgctcagcgagctggctgacctggcaatccagcggcagaggagtgagaggactgtgccagaggaggaagaggacgtgctanccttcaacctgcagcacctggccacgctggccacagcctggtccctggtggaggcngctggcctggacagctccactgccccagcgcagccgcccacagccaacccctgcagcggccccaggctcaccccccgcatgcagatcctgcagcgcaaggacacctggacccccaagaccaagcctgtgtgccccctgaaggccgccatcgaccngctggacacgcaggaggtggggatgcgcgtgcggctggcggagctgcagcggcgctacaaggagaagcagcgggagctggcccgcctgcagcgcaagcacgaccatgagagagacgagagttcacggagccctgcacggcgggggcctggccggccgaggaagcgcaaacactcaagctcgctgcctgccccacgtcccacggggccgctccccaggagcgatggcaagaaagtcaaggcggtgcggacaagcctgggtctgctgtgtgcggagctgcgaggaggcagtgggggcgagcctgcgaagaagcgaagcaagctggagaggagcgtctatgcgggcctgcagactgcctccgtggagaaggcgcagtgtaagaagagcagctgtcagggcgggctggcgccctccgtggcccacagggtggcccagctgaaacccaaggtcaagagcaaagggctgcccacaggcctcagctctttccagcagaaggaggctacccccggggggcgcatccgggagaagctgtcccgagccaagagtgccaaggtgtctggggccacacggcacccacagcccaagggccacggcagccgggagacacccaggtgcccagcccagccctccgtggctgcgtcccaggaggcaggcagtggctatgacagtgaggactgcgagggtctcctggggacagaggcaccacccagggaagcagggctgctgctgcacgccggggccagtgtggccgtgctggggccctcaccctcctctgtggtcaagatggaggccaaccagaaggccaagaagaagaaggagaggcaggggttgctaggggcctgccgcctgtccagccctgagagtgaggtcaagatcaagaggcggtcggtgaaggccaaggtgggcaccaccctggagcgggccccagggcagaggcccccaggtgcgctgggcaagaagaaagccaagggcaaggccaagggcagcctgcgggcagagccgggggccacccccagcagggacgccctcttcaacccctctcgggccttcgcctgccgtgaggagggcagccagctggccagtgagcgcctcaagagggccacgcgcaagggcacagtgctgcagccagtgctgcggcggaagaacggggccctgtccatcacgctggccacacgcaacgccaaggccatcctggggaagggccggaagctgagcaaggtgaagcacaaggccggcaagcagggcaagggccgggccgtgagccgcctgctggaaagcttcgccgtggaggaagactttgagttcgacgacaacagcagcttctcggaagaggaggaggacgaggaggaagaggaggaggacagcggccctctgagcgcagagcagagcgccgccctagcgcgctcgtgtgccatccacaaggaggacctgcgggacgggctgcccgtgctcatccccaaggaggatagcctgctgtacgcgggcagcgtcaggaccctgcagccacccgacatctatagcatcgtcntnnaggncgagagggcaccggcagaggatctactcantgnancagctgctgcaggaagcgttctcgatgtgcggccacagtccagccggtacctcccgcccggcacgcgggtctgcgcctactggagtcagaagtctcgatgtctgtacccgggcaacgtggtccggggggcctccggtgacgaagatgaggacctggactcagtagtggtggaatttgacgatggggatacaggccacatcgccgtctccaacgtcaggctgctgccccctgacttcaagatccagtgcacagagccctctccagccctgctagtgtctagcagctgccggaggaccaagaaggtatccagtgaggcacccccgcctagtgaagccgccacccccagcctgtcccccaaagcacaggacggccccgaagctttgaagacacctgggaaaaaatccattagcaaagacaaagctggtaaagccgaactcctaacctcaggtgccaaatcccccacgggggcctccgaccacttcctgggccgccgtggcagccccttgctgagctggtccgcggtggcgcagaccaagcggaaggcggtggcagcggccagcaaggggccgggggtgctgcagaacctcttccagctcaacggcagcagcaagaagctgcgggcccgcgaggccctgttccccgtgcacagcgtggccacacccatatttggcaacggcttccgcgccgactccttcagcagcctggccagctcctacgcgcccttcgtcggggggaccgggccgggcctccccaggggagcccacaagctgctgcgggctaanaaggccgagagggtggaggccgagaagggtgggcggcggcgggcgggcggtgagttcctggtcaagctggaccacgagggtgtgacctcccccaagaacaagacctgcaaggcgttgctcatgggggacaaggacttcagccccaagctcgggcggcccctgcccagccccagctatgtgcacccggcccttgtgggcaaggacaagaaggggcgggcacccatccccccgctgcccatggggctggcgctgcgcaagtacgcgggccaggcagagttcccgctgccctacgacagcgactgccacagctccttctcggacgaggacgaggacgggccggggctggcggccggcgtgccctcccgcttcctcgcccgcctgtccgtgtcctcttcctcctctggctcgtccacctcctcctcctcaggctccgtgtccacctccagcctctgctcctccgacaacgaggactcgtcctacagctcagacgacgaggacccggctctgctgctgcagacctgcctcacccaccccgtgcccaccctcctggcccagcccgaggccctgcgctccaagggcagcggccctcacgcgcatgcccagcgctgcttcctgtccagggccacggtggctggcaccggtgcgggctcaggccccagcagcagcagcaaatccaagctcaagcgcaaagaggccctgagcttctccaaagccaaagagctctcccggaggcagcggccgccctccgtggaaaaccggccaaagatctcagccttcctgcccgcccggcagctctggaagtggtcggggaatcccacacagcggcgtggcatgaaggggaaggcccggaagctgttctacaaggccatcgtgcggggcgaggagaccctgcgtgtcggggactgtgccgtcttcctgtcagctgggcggcccaacctcccctacatcggccgcatcgagagcatgtgggagtcgtggggcagcaacatggtggtcaaggtcaagtggttctaccaccctgaggagaccaagctgggcaagaggcagtgcgacggcaagaatgcgctgtaccagtcctgccacgaggatgagaacgacgtgcagaccatctcccacaagtgccaggtcgtggcgcgcgagcagtatgagcagatggcccggagccgcaagtgccaggaccggcaggacctctactacctggcgggcacctacgaccccaccaccgggcgcctggtgacggctgatggcgtgcccatcctatgctgagccgccaccgcagatgcctcccacgtgcgccagggaccctgtgtgcggagcctggcgtcggccaagccaccgggcaggaggcagccccggcctcccaagggcgcatctgagcaaatatgcaaaagcccacagggcaagacccaggctttcttacggttttccctggaaagagcgctccaggtgtcggaatccagtcccgtcccatcctctgcggagggtcgggctgtggccctcatgggtccccggcccgcccacccacagcgccctccgtttcccgcaccggcagttcacgggagatttgaatccaagccatattccctagtacctccgactgtctcccaccagggaaagcagaaatcaggtgtgttgtctatttatttctctatgtaaatattgtatttctgcggggaaattttatggtaaaaagtggaaaagggtttttccccatccgcgtgacaaggtgtgtgtgagcgtgtatgtgtgtgcgcgtgtgtggcgatttttgtcctggggtttcctttggaaatgcactgttctcagcccagctgggttccaacgggggcacctgggacgacagaggcatctcggggcagggggcagaggccacgggagggtcaggtgggacccttgacggcaccctctgatctcttggggggacgaccgtgtaagatgaaagtcggtcaagtttatttgctttcagtgcatctcctagaaaagaagtgttggagcagggggtggtgatgaggggcccgtggggaaaggattcaagaggcaaagcccagaccagggagtgtgacaacagccgtgagcatctcacctgtgttcaaaacaagacaaagacgaacaaatattttaaagtattgataagaaaaagcaatgtttggattgtatctgctgaatcatattccaacctatatctgatttctgtttccggggccagttggtctgaggccaaggagtctggcctccacccagagcagggaggggctggcccctcgcccccctcaccctcgccgccctggcacactcgggaagcagggcccagctctgagcccctcctcacccctggggtcctaactttcctgaaagtagtaggtgccgtgagaaggggcagtttggccaggttcctgaactgggcagggctcggggcctatgagggcaggttcacagtcccaccagattctctcctcacccccaagcagaatgcatgcaaaagacaccccttttcccacccaccttattggtgcccccaaacccctggcctgctgcgtagatggtggtgaggccaggccagcagtgctgtggccaggggagaagaaaataaaacgcaggccctgcccttggggaaggcccctttctgggcccccttttccaccagccaaatctgcctggccctcggacccctctgcctgccccaacccctttggaggtttctcggccttttctgtgccacttggtggggcagatggcctgatgggctagtgcttggggcatagaatgagggtccccctgaccacctgagcccaaatcctggccccaggtgcaagcagcacccctcgagggctctgccccagtatccccagagaattcacacccctccccttctcccacagccaaggacagacaggctgcctggacctgagcccaacagccttcagcctcagaaacgcatggggggccacacactccttatatcctcccacactaaggttcccctggccccacgggagcttcaggaaagccccccaagttagccactgctctaggacgagctctgtgtcccccacaccacaggcctcgaagcagggtgcagaagtgcgcctgggtgcagaagtgcgctggtgc

SEQ ID NO: 111732 - DNA, 7603 bp, Homo sapiens
  misc_feature (118)..(118): n is a, c, g, or t
  misc_feature (1860)..(1860): n is a, c, g, or t
  misc_feature (1916)..(1916): n is a, c, g, or t
  misc_feature (2071)..(2071): n is a, c, g, or t
  misc_feature (3597)..(3597): n is a, c, g, or t
  misc_feature (3599)..(3600): n is a, c, g, or t
  misc_feature (3604)..(3604): n is a, c, g, or t
  misc_feature (3634)..(3634): n is a, c, g, or t
  misc_feature (3637)..(3637): n is a, c, g, or t
  misc_feature (3639)..(3639): n is a, c, g, or t
  misc_feature (4421)..(4421): n is a, c, g, or t
gttccacacacgcgctggacctggaggctgaggaggagaggacgaggctatgtgatgaccgcctggggcttgccagccgcgagctgctgctgcaggacagcaaagaccgcgtagagtncgcccggatccacccaccgagcagctgccctggggacctggccccccacctcatgatgcagagcggccagctgggcggggacccagccccccacacccacccccatcccccctggctgccccgcacccgcagcccctccctgtggatgggggggcactcctacggcctggggcaccctgccctgcaccagaacctgccccccggcttccccgcctccgtggctggccctgtgccctctgtcttccccctcccacaggacgcccccacacagctggtcatcctgccctcagagcccacaccccacagcgccccccacgcacttgcggatgtcatggaccaggcgtcactgtggccccccatgtacgggggccggggccccgcctctcacatgcagcacccgggccagctccctgtgtactcgaggccgcagctcctccggcagcaggagctctatgctttgcagcagcagagggccgcccagttccagcggaagcccgaagaccagcacctggatctggaggagcccgcccaggagaaggccccaaagtccacccacaagccagttgccttaacccccacggccccgggcgccccctcacccgctgcaggccccaccaagctgccaccttgctgccatccgcccgacccaaagccccccgccagctcccccaccccaccacctcggcccagcgccccgtgcactttaaatgtctgccctgccagcagccccgggcctggctcccgggtgcgcagcgccgaggaaaagaatggggagggtcagcagtccacggccgacatcatcacatccgaaccagtggcacgtgctcactctgttgcccacgctggtctcgaattcctggcctcaaatgatccatccacctcagcctcccaaagttttgggattacagacctgcctcccggatacctgcgccccatggctggcctgggcttctccctaccctcagacgtgcactcttctaacctcgaggaccctgaaactatgcaaaccaccgccccgggggcccagcctgagcccacaaggacattcctgcctggggagccgcctccctgcagccccaggagcctggaggagcccgggctgctctcaggggccagggaggccacccaggaccttgccgccaccccctaccctgccgagcggggaccccaggggaaggcagcggaccccagcccactagaggggctacaagaactgcaatgtgcggccctcctggaggcagggggccccgaggccaccggccaggctcattctactcagggaggggcacgagaagagaggagcagggaggagggggagcaggggccctcgtcaggggcctcctcccaagtcctggagcagcgagcagggagtccgggtgcccttgaggacgagggggagcagccggcccctgaggaggacgagctggaggaagacgagctggggcagcagagcatggaggactcagaggaggactgtggcggagctcccgacaacagccacccacccagggcgctaccaggcctggatgccttggtggccgccaccatcaacctgggggacctgcccagcgacagcccaccggaccctcagcccccagcggcctctgggccccccagcacagtccccctgcctcatagctcagggattcatgggatcgctctgctcagcgagctggctgacctggcaatccagcggcagaggagtgagaggactgtgccagaggaggaagaggacgtgctanccttcaacctgcagcacctggccacgctggccacagcctggtccctggtggaggcngctggcctggacagctccactgccccagcgcagccgcccacagccaacccctgcagcggccccaggctcaccccccgcatgcagatcctgcagcgcaaggacacctggacccccaagaccaagcctgtgtgccccctgaaggccgccatcgaccngctggacacgcaggaggtggggatgcgcgtgcggctggcggagctgcagcggcgctacaaggagaagcagcgggagctggcccgcctgcagcgcaagcacgaccatgagagagacgagagttcacggagccctgcacggcgggggcctggccggccgaggaagcgcaaacactcaagctcgctgcctgccccacgtcccacggggccgctccccaggagcgatggcaagaaagtcaaggcggtgcggacaagcctgggtctgctgtgtgcggagctgcgaggaggcagtgggggcgagcctgcgaagaagcgaagcaagctggagaggagcgtctatgcgggcctgcagactgcctccgtggagaaggcgcagtgtaagaagagcagctgtcagggcgggctggcgccctccgtggcccacagggtggcccagctgaaacccaaggtcaagagcaaagggctgcccacaggcctcagctctttccagcagaaggaggctacccccggggggcgcatccgggagaagctgtcccgagccaagagtgccaaggtgtctggggccacacggcacccacagcccaagggccacggcagccgggagacacccaggtgcccagcccagccctccgtggctgcgtcccaggaggcaggcagtggctatgacagtgaggactgcgagggtctcctggggacagaggcaccacccagggaagcagggctgctgctgcacgccggggccagtgtggccgtgctggggccctcaccctcctctgtggtcaagatggaggccaaccagaaggccaagaagaagaaggagaggcaggggttgctaggggcctgccgcctgtccagccctgagagtgaggtcaagatcaagaggcggtcggtgaaggccaaggtgggcaccaccctggagcgggccccagggcagaggcccccaggtgcgctgggcaagaagaaagccaagggcaaggccaagggcagcctgcgggcagagccgggggccacccccagcagggacgccctcttcaacccctctcgggccttcgcctgccgtgaggagggcagccagctggccagtgagcgcctcaagagggccacgcgcaagggcacagtgctgcagccagtgctgcggcggaagaacggggccctgtccatcacgctggccacacgcaacgccaaggccatcctggggaagggccggaagctgagcaaggtgaagcacaaggccggcaagcagggcaagggccgggccgtgagccgcctgctggaaagcttcgccgtggaggaagactttgagttcgacgacaacagcagcttctcggaagaggaggaggacgaggaggaagaggaggaggacagcggccctctgagcgcagagcagagcgccgccctagcgcgctcgtgtgccatccacaaggaggacctgcgggacgggctgcccgtgctcatccccaaggaggatagcctgctgtacgcgggcagcgtcaggaccctgcagccacccgacatctatagcatcgtcntnnaggncgagagggcaccggcagaggatctactcantgnancagctgctgcaggaagcgttctcgatgtgcggccacagtccagccggtacctcccgcccggcacgcgggtctgcgcctactggagtcagaagtctcgatgtctgtacccgggcaacgtggtccggggggcctccggtgacgaagatgaggacctggactcagtagtggtggaatttgacgatggggatacaggccacatcgccgtctccaacgtcaggctgctgccccctgacttcaagatccagtgcacagagccctctccagccctgctagtgtctagcagctgccggaggaccaagaaggtatccagtgaggcacccccgcctagtgaagccgccacccccagcctgtcccccaaagcacaggacggccccgaagctttgaagacacctgggaaaaaatccattagcaaagacaaagctggtaaagccgaactcctaacctcaggtgccaaatcccccacgggggcctccgaccacttcctgggccgccgtggcagccccttgctgagctggtccgcggtggcgcagaccaagcggaaggcggtggcagcggccagcaaggggccgggggtgctgcagaacctcttccagctcaacggcagcagcaagaagctgcgggcccgcgaggccctgttccccgtgcacagcgtggccacacccatatttggcaacggcttccgcgccgactccttcagcagcctggccagctcctacgcgcccttcgtcggggggaccgggccgggcctccccaggggagcccacaagctgctgcgggctaanaaggccgagagggtggaggccgagaagggtgggcggcggcgggcgggcggtgagttcctggtcaagctggaccacgagggtgtgacctcccccaagaacaagacctgcaaggcgttgctcatgggggacaaggacttcagccccaagctcgggcggcccctgcccagccccagctatgtgcacccggcccttgtgggcaaggacaagaaggggcgggcacccatccccccgctgcccatggggctggcgctgcgcaagtacgcgggccaggcagagttcccgctgccctacgacagcgactgccacagctccttctcggacgaggacgaggacgggccggggctggcggccggcgtgccctcccgcttcctcgcccgcctgtccgtgtcctcttcctcctctggctcgtccacctcctcctcctcaggctccgtgtccacctccagcctctgctcctccgacaacgaggactcgtcctacagctcagacgacgaggacccggctctgctgctgcagacctgcctcacccaccccgtgcccaccctcctggcccagcccgaggccctgcgctccaagggcagcggccctcacgcgcatgcccagcgctgcttcctgtccagggccacggtggctggcaccggtgcgggctcaggccccagcagcagcagcaaatccaagctcaagcgcaaagaggccctgagcttctccaaagccaaagagctctcccggaggcagcggccgccctccgtggaaaaccggccaaagatctcagccttcctgcccgcccggcagctctggaagtggtcggggaatcccacacagcggcgtggcatgaaggggaaggcccggaagctgttctacaaggccatcgtgcggggcgaggagaccctgcgtgtcggggactgtgccgtcttcctgtcagctgggcggcccaacctcccctacatcggccgcatcgagagcatgtgggagtcgtggggcagcaacatggtggtcaaggtcaagtggttctaccaccctgaggagaccaagctgggcaagaggcagtgcgacggcaagaatgcgctgtaccagtcctgccacgaggatgagaacgacgtgcagaccatctcccacaagtgccaggtcgtggcgcgcgagcagtatgagcagatggcccggagccgcaagtgccaggaccggcaggacctctactacctggcgggcacctacgaccccaccaccgggcgcctggtgacggctgatggcgtgcccatcctatgctgagccgccaccgcagatgcctcccacgtgcgccagggaccctgtgtgcggagcctggcgtcggccaagccaccgggcaggaggcagccccggcctcccaagggcgcatctgagcaaatatgcaaaagcccacagggcaagacccaggctttcttacggttttccctggaaagagcgctccaggtgtcggaatccagtcccgtcccatcctctgcggagggtcgggctgtggccctcatgggtccccggcccgcccacccacagcgccctccgtttcccgcaccggcagttcacgggagatttgaatccaagccatattccctagtacctccgactgtctcccaccagggaaagcagaaatcaggtgtgttgtctatttatttctctatgtaaatattgtatttctgcggggaaattttatggtaaaaagtggaaaagggtttttccccatccgcgtgacaaggtgtgtgtgagcgtgtatgtgtgtgcgcgtgtgtggcgatttttgtcctggggtttcctttggaaatgcactgttctcagcccagctgggttccaacgggggcacctgggacgacagaggcatctcggggcagggggcagaggccacgggagggtcaggtgggacccttgacggcaccctctgatctcttggggggacgaccgtgtaagatgaaagtcggtcaagtttatttgctttcagtgcatctcctagaaaagaagtgttggagcagggggtggtgatgaggggcccgtggggaaaggattcaagaggcaaagcccagaccagggagtgtgacaacagccgtgagcatctcacctgtgttcaaaacaagacaaagacgaacaaatattttaaagtattgataagaaaaagcaatgtttggattgtatctgctgaatcatattccaacctatatctgatttctgtttccggggccagttggtctgaggccaaggagtctggcctccacccagagcagggaggggctggcccctcgcccccctcaccctcgccgccctggcacactcgggaagcagggcccagctctgagcccctcctcacccctggggtcctaactttcctgaaagtagtaggtgccgtgagaaggggcagtttggccaggttcctgaactgggcagggctcggggcctatgagggcaggttcacagtcccaccagattctctcctcacccccaagcagaatgcatgcaaaagacaccccttttcccacccaccttattggtgcccccaaacccctggcctgctgcgtagatggtggtgaggccaggccagcagtgctgtggccaggggagaagaaaataaaacgcaggccctgcccttggggaaggcccctttctgggcccccttttccaccagccaaatctgcctggccctcggacccctctgcctgccccaacccctttggaggtttctcggccttttctgtgccacttggtggggcagatggcctgatgggctagtgcttggggcatagaatgagggtccccctgaccacctgagcccaaatcctggccccaggtgcaagcagcacccctcgagggctctgccccagtatccccagagaattcacacccctccccttctcccacagccaaggacagacaggctgcctggacctgagcccaacagccttcagcctcagaaacgcatggggggccacacactccttatatcctcccctctcaccgtggttaacgtgacgaaggcacgattcctgtaaatgtgtaaactaaggggatggttggattttttttcaatgtaaacactaaaaacaaaatggacaaaaaaacacacaaaggttttatgaacagcagactctatgtaaaggcattttagtatcaaattttttattgataacttgcttaagaataaatatatggactattgtacaggt

SEQ ID NO: 111733 - DNA, 7507 bp, Homo sapiens
  misc_feature (118)..(118): n is a, c, g, or t
  misc_feature (1860)..(1860): n is a, c, g, or t
  misc_feature (1916)..(1916): n is a, c, g, or t
  misc_feature (2071)..(2071): n is a, c, g, or t
  misc_feature (3597)..(3597): n is a, c, g, or t
  misc_feature (3599)..(3600): n is a, c, g, or t
  misc_feature (3604)..(3604): n is a, c, g, or t
  misc_feature (3634)..(3634): n is a, c, g, or t
  misc_feature (3637)..(3637): n is a, c, g, or t
  misc_feature (3639)..(3639): n is a, c, g, or t
  misc_feature (4421)..(4421): n is a, c, g, or t
gttccacacacgcgctggacctggaggctgaggaggagaggacgaggctatgtgatgaccgcctggggcttgccagccgcgagctgctgctgcaggacagcaaagaccgcgtagagtncgcccggatccacccaccgagcagctgccctggggacctggccccccacctcatgatgcagagcggccagctgggcggggacccagccccccacacccacccccatcccccctggctgccccgcacccgcagcccctccctgtggatgggggggcactcctacggcctggggcaccctgccctgcaccagaacctgccccccggcttccccgcctccgtggctggccctgtgccctctgtcttccccctcccacaggacgcccccacacagctggtcatcctgccctcagagcccacaccccacagcgccccccacgcacttgcggatgtcatggaccaggcgtcactgtggccccccatgtacgggggccggggccccgcctctcacatgcagcacccgggccagctccctgtgtactcgaggccgcagctcctccggcagcaggagctctatgctttgcagcagcagagggccgcccagttccagcggaagcccgaagaccagcacctggatctggaggagcccgcccaggagaaggccccaaagtccacccacaagccagttgccttaacccccacggccccgggcgccccctcacccgctgcaggccccaccaagctgccaccttgctgccatccgcccgacccaaagccccccgccagctcccccaccccaccacctcggcccagcgccccgtgcactttaaatgtctgccctgccagcagccccgggcctggctcccgggtgcgcagcgccgaggaaaagaatggggagggtcagcagtccacggccgacatcatcacatccgaaccagtggcacgtgctcactctgttgcccacgctggtctcgaattcctggcctcaaatgatccatccacctcagcctcccaaagttttgggattacagacctgcctcccggatacctgcgccccatggctggcctgggcttctccctaccctcagacgtgcactcttctaacctcgaggaccctgaaactatgcaaaccaccgccccgggggcccagcctgagcccacaaggacattcctgcctggggagccgcctccctgcagccccaggagcctggaggagcccgggctgctctcaggggccagggaggccacccaggaccttgccgccaccccctaccctgccgagcggggaccccaggggaaggcagcggaccccagcccactagaggggctacaagaactgcaatgtgcggccctcctggaggcagggggccccgaggccaccggccaggctcattctactcagggaggggcacgagaagagaggagcagggaggagggggagcaggggccctcgtcaggggcctcctcccaagtcctggagcagcgagcagggagtccgggtgcccttgaggacgagggggagcagccggcccctgaggaggacgagctggaggaagacgagctggggcagcagagcatggaggactcagaggaggactgtggcggagctcccgacaacagccacccacccagggcgctaccaggcctggatgccttggtggccgccaccatcaacctgggggacctgcccagcgacagcccaccggaccctcagcccccagcggcctctgggccccccagcacagtccccctgcctcatagctcagggattcatgggatcgctctgctcagcgagctggctgacctggcaatccagcggcagaggagtgagaggactgtgccagaggaggaagaggacgtgctanccttcaacctgcagcacctggccacgctggccacagcctggtccctggtggaggcngctggcctggacagctccactgccccagcgcagccgcccacagccaacccctgcagcggccccaggctcaccccccgcatgcagatcctgcagcgcaaggacacctggacccccaagaccaagcctgtgtgccccctgaaggccgccatcgaccngctggacacgcaggaggtggggatgcgcgtgcggctggcggagctgcagcggcgctacaaggagaagcagcgggagctggcccgcctgcagcgcaagcacgaccatgagagagacgagagttcacggagccctgcacggcgggggcctggccggccgaggaagcgcaaacactcaagctcgctgcctgccccacgtcccacggggccgctccccaggagcgatggcaagaaagtcaaggcggtgcggacaagcctgggtctgctgtgtgcggagctgcgaggaggcagtgggggcgagcctgcgaagaagcgaagcaagctggagaggagcgtctatgcgggcctgcagactgcctccgtggagaaggcgcagtgtaagaagagcagctgtcagggcgggctggcgccctccgtggcccacagggtggcccagctgaaacccaaggtcaagagcaaagggctgcccacaggcctcagctctttccagcagaaggaggctacccccggggggcgcatccgggagaagctgtcccgagccaagagtgccaaggtgtctggggccacacggcacccacagcccaagggccacggcagccgggagacacccaggtgcccagcccagccctccgtggctgcgtcccaggaggcaggcagtggctatgacagtgaggactgcgagggtctcctggggacagaggcaccacccagggaagcagggctgctgctgcacgccggggccagtgtggccgtgctggggccctcaccctcctctgtggtcaagatggaggccaaccagaaggccaagaagaagaaggagaggcaggggttgctaggggcctgccgcctgtccagccctgagagtgaggtcaagatcaagaggcggtcggtgaaggccaaggtgggcaccaccctggagcgggccccagggcagaggcccccaggtgcgctgggcaagaagaaagccaagggcaaggccaagggcagcctgcgggcagagccgggggccacccccagcagggacgccctcttcaacccctctcgggccttcgcctgccgtgaggagggcagccagctggccagtgagcgcctcaagagggccacgcgcaagggcacagtgctgcagccagtgctgcggcggaagaacggggccctgtccatcacgctggccacacgcaacgccaaggccatcctggggaagggccggaagctgagcaaggtgaagcacaaggccggcaagcagggcaagggccgggccgtgagccgcctgctggaaagcttcgccgtggaggaagactttgagttcgacgacaacagcagcttctcggaagaggaggaggacgaggaggaagaggaggaggacagcggccctctgagcgcagagcagagcgccgccctagcgcgctcgtgtgccatccacaaggaggacctgcgggacgggctgcccgtgctcatccccaaggaggatagcctgctgtacgcgggcagcgtcaggaccctgcagccacccgacatctatagcatcgtcntnnaggncgagagggcaccggcagaggatctactcantgnancagctgctgcaggaagcgttctcgatgtgcggccacagtccagccggtacctcccgcccggcacgcgggtctgcgcctactggagtcagaagtctcgatgtctgtacccgggcaacgtggtccggggggcctccggtgacgaagatgaggacctggactcagtagtggtggaatttgacgatggggatacaggccacatcgccgtctccaacgtcaggctgctgccccctgacttcaagatccagtgcacagagccctctccagccctgctagtgtctagcagctgccggaggaccaagaaggtatccagtgaggcacccccgcctagtgaagccgccacccccagcctgtcccccaaagcacaggacggccccgaagctttgaagacacctgggaaaaaatccattagcaaagacaaagctggtaaagccgaactcctaacctcaggtgccaaatcccccacgggggcctccgaccacttcctgggccgccgtggcagccccttgctgagctggtccgcggtggcgcagaccaagcggaaggcggtggcagcggccagcaaggggccgggggtgctgcagaacctcttccagctcaacggcagcagcaagaagctgcgggcccgcgaggccctgttccccgtgcacagcgtggccacacccatatttggcaacggcttccgcgccgactccttcagcagcctggccagctcctacgcgcccttcgtcggggggaccgggccgggcctccccaggggagcccacaagctgctgcgggctaanaaggccgagagggtggaggccgagaagggtgggcggcggcgggcgggcggtgagttcctggtcaagctggaccacgagggtgtgacctcccccaagaacaagacctgcaaggcgttgctcatgggggacaaggacttcagccccaagctcgggcggcccctgcccagccccagctatgtgcacccggcccttgtgggcaaggacaagaaggggcgggcacccatccccccgctgcccatggggctggcgctgcgcaagtacgcgggccaggcagagttcccgctgccctacgacagcgactgccacagctccttctcggacgaggacgaggacgggccggggctggcggccggcgtgccctcccgcttcctcgcccgcctgtccgtgtcctcttcctcctctggctcgtccacctcctcctcctcaggctccgtgtccacctccagcctctgctcctccgacaacgaggactcgtcctacagctcagacgacgaggacccggctctgctgctgcagacctgcctcacccaccccgtgcccaccctcctggcccagcccgaggccctgcgctccaagggcagcggccctcacgcgcatgcccagcgctgcttcctgtccagggccacggtggctggcaccggtgcgggctcaggccccagcagcagcagcaaatccaagctcaagcgcaaagaggccctgagcttctccaaagccaaagagctctcccggaggcagcggccgccctccgtggaaaaccggccaaagatctcagccttcctgcccgcccggcagctctggaagtggtcggggaatcccacacagcggcgtggcatgaaggggaaggcccggaagctgttctacaaggccatcgtgcggggcgaggagaccctgcgtgtcggggactgtgccgtcttcctgtcagctgggcggcccaacctcccctacatcggccgcatcgagagcatgtgggagtcgtggggcagcaacatggtggtcaaggtcaagtggttctaccaccctgaggagaccaagctgggcaagaggcagtgcgacggcaagaatgcgctgtaccagtcctgccacgaggatgagaacgacgtgcagaccatctcccacaagtgccaggtcgtggcgcgcgagcagtatgagcagatggcccggagccgcaagtgccaggaccggcaggacctctactacctggcgggcacctacgaccccaccaccgggcgcctggtgacggctgatggcgtgcccatcctatgctgagccgccaccgcagatgcctcccacgtgcgccagggaccctgtgtgcggagcctggcgtcggccaagccaccgggcaggaggcagccccggcctcccaagggcgcatctgagcaaatatgcaaaagcccacagggcaagacccaggctttcttacggttttccctggaaagagcgctccaggtgtcggaatccagtcccgtcccatcctctgcggagggtcgggctgtggccctcatgggtccccggcccgcccacccacagcgccctccgtttcccgcaccggcagttcacgggagatttgaatccaagccatattccctagtacctccgactgtctcccaccagggaaagcagaaatcaggtgtgttgtctatttatttctctatgtaaatattgtatttctgcggggaaattttatggtaaaaagtggaaaagggtttttccccatccgcgtgacaaggtgtgtgtgagcgtgtatgtgtgtgcgcgtgtgtggcgatttttgtcctggggtttcctttggaaatgcactgttctcagcccagctgggttccaacgggggcacctgggacgacagaggcatctcggggcagggggcagaggccacgggagggtcaggtgggacccttgacggcaccctctgatctcttggggggacgaccgtgtaagatgaaagtcggtcaagtttatttgctttcagtgcatctcctagaaaagaagtgttggagcagggggtggtgatgaggggcccgtggggaaaggattcaagaggcaaagcccagaccagggagtgtgacaacagccgtgagcatctcacctgtgttcaaaacaagacaaagacgaacaaatattttaaagtattgataagaaaaagcaatgtttggattgtatctgctgaatcatattccaacctatatctgatttctgtttccggggccagttggtctgaggccaaggagtctggcctccacccagagcagggaggggctggcccctcgcccccctcaccctcgccgccctggcacactcgggaagcagggcccagctctgagcccctcctcacccctggggtcctaactttcctgaaagtagtaggtgccgtgagaaggggcagtttggccaggttcctgaactgggcagggctcggggcctatgagggcaggttcacagtcccaccagattctctcctcacccccaagcagaatgcatgcaaaagacaccccttttcccacccaccttattggtgcccccaaacccctggcctgctgcgtagatggtggtgaggccaggccagcagtgctgtggccaggggagaagaaaataaaacgcaggccctgcccttggggaaggcccctttctgggcccccttttccaccagccaaatctgcctggccctcggacccctctgcctgccccaacccctttggaggtttctcggccttttctgtgccacttggtggggcagatggcctgatgggctagtgcttggggcatagaatgagggtccccctgaccacctgagcccaaatcctggccccaggtgcaagcagcacccctcgagggctctgccccagtatccccagagaattcacacccctccctcccctctcaccgtggttaacgtgacgaaggcacgattcctgtaaatgtgtaaactaaggggatggttggattttttttcaatgtaaacactaaaaacaaaatggacaaaaaaacacacaaaggttttatgaacagcagactctatgtaaaggcattttagtatcaaattttttattgataacttgcttaagaataaatatatggactattgtacaggt

SEQ ID NO: 111734 - DNA, 491 bp, Homo sapiens
gcggccgccctccgtggaaaaccggccaaagatctcagccttcctgcccgcccggcagctctggaagtggtcggggaatcccacacaggtaggtccagcgggaggcgggaggagctcctggttcccaaggaaaccggggcgggctcatgcgcccctgctgcccttccctctcctttttcatcttcctacttgatttcaagttaaaaaatgtggaaaactcaagggaagaacaaagacccatccatgacccagtgaggcagccgcttccgctggcccctcgctggagcccgtggcctgcgtgacagtagaaatggcttcatgtcgggccgggcccgagctgcactccgcatggtgtggcctcacttttccacgtcgataagtggcgtggccagctggagagctgtgtatccccgcactcagatgcctgcgtctgtcctcaccagggcactgctcgggggcgcatgtggggccactcgtgggtcttttgcctt

SEQ ID NO: 111735 - DNA, 5846 bp, Homo sapiens
  misc_feature (1244)..(1244): n is a, c, g, or t
  misc_feature (1246)..(1247): n is a, c, g, or t
  misc_feature (1251)..(1251): n is a, c, g, or t
  misc_feature (1281)..(1281): n is a, c, g, or t
  misc_feature (1284)..(1284): n is a, c, g, or t
  misc_feature (1286)..(1286): n is a, c, g, or t
  misc_feature (2068)..(2068): n is a, c, g, or t
ttcagcccctgtggatcgagggcaggggcctcgaggtaccagttctgagccgggcatcaacagagaggcacctaaccgcccaggggctgtggtttgcagagggcgccctgagagtgcagctgcccctccctgttcacaggagaaggcgcagtgtaagaagagcagctgtcagggcgggctggcgccctccgtggcccacagggtggcccagctgaaacccaaggtcaagagcaaagggctgcccacaggcctcagctctttccagcagaaggaggctacccccggggggcgcatccgggagaagctgtcccgagccaagagtgccaaggtgtctggggccacacggcacccacagcccaagggccacggcagccgggagacacccaggtgcccagcccagccctccgtggctgcgtcccaggaggcaggcagtggctatgacagtgaggactgcgagggtctcctggggacagaggcaccacccagggaagcagggctgctgctgcacgccggggccagtgtggccgtgctggggccctcaccctcctctgtggtcaagatggaggccaaccagaaggccaagaagaagaaggagaggcaggggttgctaggggcctgccgcctgtccagccctgagagtgaggtcaagatcaagaggcggtcggtgaaggccaaggtgggcaccaccctggagcgggccccagggcagaggcccccaggtgcgctgggcaagaagaaagccaagggcaaggccaagggcagcctgcgggcagagccgggggccacccccagcagggacgccctcttcaacccctctcgggccttcgcctgccgtgaggagggcagccagctggccagtgagcgcctcaagagggccacgcgcaagggcacagtgctgcagccagtgctgcggcggaagaacggggccctgtccatcacgctggccacacgcaacgccaaggccatcctggggaagggccggaagctgagcaaggtgaagcacaaggccggcaagcagggcaagggccgggccgtgagccgcctgctggaaagcttcgccgtggaggaagactttgagttcgacgacaacagcagcttctcggaagaggaggaggacgaggaggaagaggaggaggacagcggccctctgagcgcagagcagagcgccgccctagcgcgctcgtgtgccatccacaaggaggacctgcgggacgggctgcccgtgctcatccccagcatcgtcntnnaggncgagagggcaccggcagaggatctactcantgnancagctgctgcaggaagcgttctcgatgtgcggccacagtccagccggtacctcccgcccggcacgcgggtctgcgcctactggagtcagaagtctcgatgtctgtacccgggcaacgtggtccggggggcctccggtgacgaagatgaggacctggactcagtagtggtggaatttgacgatggggatacaggccacatcgccgtctccaacgtcaggctgctgccccctgacttcaagatccagtgcacagagccctctccagccctgctagtgtctagcagctgccggaggaccaagaaggtatccagtgaggcacccccgcctagtgaagccgccacccccagcctgtcccccaaagcacaggacggccccgaagctttgaagacacctgggaaaaaatccattagcaaagacaaagctggtaaagccgaactcctaacctcaggtgccaaatcccccacgggggcctccgaccacttcctgggccgccgtggcagccccttgctgagctggtccgcggtggcgcagaccaagcggaaggcggtggcagcggccagcaaggggccgggggtgctgcagaacctcttccagctcaacggcagcagcaagaagctgcgggcccgcgaggccctgttccccgtgcacagcgtggccacacccatatttggcaacggcttccgcgccgactccttcagcagcctggccagctcctacgcgcccttcgtcggggggaccgggccgggcctccccaggggagcccacaagctgctgcgggctaanaaggccgagagggtggaggccgagaagggtgggcggcggcgggcgggcggtgagttcctggtcaagctggaccacgagggtgtgacctcccccaagaacaagacctgcaaggcgttgctcatgggggacaaggacttcagccccaagctcgggcggcccctgcccagccccagctatgtgcacccggcccttgtgggcaaggacaagaaggggcgggcacccatccccccgctgcccatggggctggcgctgcgcaagtacgcgggccaggcagagttcccgctgccctacgacagcgactgccacagctccttctcggacgaggacgaggacgggccggggctggcggccggcgtgccctcccgcttcctcgcccgcctgtccgtgtcctcttcctcctctggctcgtccacctcctcctcctcaggctccgtgtccacctccagcctctgctcctccgacaacgaggactcgtcctacagctcagacgacgaggacccggctctgctgctgcagacctgcctcacccaccccgtgcccaccctcctggcccagcccgaggccctgcgctccaagggcagcggccctcacgcgcatgcccagcgctgcttcctgtccagggccacggtggctggcaccggtgcgggctcaggccccagcagcagcagcaaatccaagctcaagcgcaaagaggccctgagcttctccaaagccaaagagctctcccggaggcagcggccgccctccgtggaaaaccggccaaagatctcagccttcctgcccgcccggcagctctggaagtggtcggggaatcccacacagcggcgtggcatgaaggggaaggcccggaagctgttctacaaggccatcgtgcggggcgaggagaccctgcgtgtcggggactgtgccgtcttcctgtcagctgggcggcccaacctcccctacatcggccgcatcgagagcatgtgggagtcgtggggcagcaacatggtggtcaaggtcaagtggttctaccaccctgaggagaccaagctgggcaagaggcagtgcgacggcaagaatgcgctgtaccagtcctgccacgaggatgagaacgacgtgcagaccatctcccacaagtgccaggtcgtggcgcgcgagcagtatgagcagatggcccggagccgcaagtgccaggaccggcaggacctctactacctggcgggcacctacgaccccaccaccgggcgcctggtgacggctgatggcgtgcccatcctatgctgagccgccaccgcagatgcctcccacgtgcgccagggaccctgtgtgcggagcctggcgtcggccaagccaccgggcaggaggcagccccggcctcccaagggcgcatctgagcaaatatgcaaaagcccacagggcaagacccaggctttcttacggttttccctggaaagagcgctccaggtgtcggaatccagtcccgtcccatcctctgcggagggtcgggctgtggccctcatgggtccccggcccgcccacccacagcgccctccgtttcccgcaccggcagttcacgggagatttgaatccaagccatattccctagtacctccgactgtctcccaccagggaaagcagaaatcaggtgtgttgtctatttatttctctatgtaaatattgtatttctgcggggaaattttatggtaaaaagtggaaaagggtttttccccatccgcgtgacaaggtgtgtgtgagcgtgtatgtgtgtgcgcgtgtgtggcgatttttgtcctggggtttcctttggaaatgcactgttctcagcccagctgggttccaacgggggcacctgggacgacagaggcatctcggggcagggggcagaggccacgggagggtcaggtgggacccttgacggcaccctctgatctcttggggggacgaccgtgtaagatgaaagtcggtcaagtttatttgctttcagtgcatctcctagaaaagaagtgttggagcagggggtggtgatgaggggcccgtggggaaaggattcaagaggcaaagcccagaccagggagtgtgacaacagccgtgagcatctcacctgtgttcaaaacaagacaaagacgaacaaatattttaaagtattgataagaaaaagcaatgtttggattgtatctgctgaatcatattccaacctatatctgatttctgtttccggggccagttggtctgaggccaaggagtctggcctccacccagagcagggaggggctggcccctcgcccccctcaccctcgccgccctggcacactcgggaagcagggcccagctctgagcccctcctcacccctggggtcctaactttcctgaaagtagtaggtgccgtgagaaggggcagtttggccaggttcctgaactgggcagggctcggggcctatgagggcaggttcacagtcccaccagattctctcctcacccccaagcagaatgcatgcaaaagacaccccttttcccacccaccttattggtgcccccaaacccctggcctgctgcgtagatggtggtgaggccaggccagcagtgctgtggccaggggagaagaaaataaaacgcaggccctgcccttggggaaggcccctttctgggcccccttttccaccagccaaatctgcctggccctcggacccctctgcctgccccaacccctttggaggtttctcggccttttctgtgccacttggtggggcagatggcctgatgggctagtgcttggggcatagaatgagggtccccctgaccacctgagcccaaatcctggccccaggtgcaagcagcacccctcgagggctctgccccagtatccccagagaattcacacccctccccttctcccacagccaaggacagacaggctgcctggacctgagcccaacagccttcagcctcagaaacgcatggggggccacacactccttatatcctcccacactaaggttcccctggccccacgggagcttcaggaaagccccccaagttagccactgctctaggacgagctctgtgtcccccacaccacaggcctcgaagcagggtgctggtgggtgccctgcaccccaatcccaggtccccttggccccctatttttctcgggcccattggggcctgtttctcacctgctggctggaccccctgaagggccgttcccagaggctccccaggaggctcaaggctgggggcttatgttgtggtcgggggtccccgcctccagccccccgctcccacccccgagcctaccctttgtctcgcatgagtgcaatatttcattcccggtggttgtctggggaggtggttggacgaggtcctgcttgaggctcggggatcagaacgatgtcaagtgaagaaaaatgcacgggggcatgctgagccactggagttccagagagggccgaggagggtgcagccacggaggttggatcctctgctccgccgcctcgtcctcgtcccgcttctgctgggttccgctttgtccctggttttttcctttttttttctgtgtgcgtgcgaatggtgcggcccctcccctctcaccgtggttaacgtgacgaaggcacgattcctgtaaatgtgtaaactaaggggatggttggattttttttcaatgtaaacactaaaaacaaaatggacaaaaaaacacacaaaggttttatgaacagcagactctatgtaaaggcattttagtatcaaattttttattgataacttgcttaagaataaatatatggactattgtacaggt

SEQ ID NO: 111736 - DNA, 5345 bp, Homo sapiens
  misc_feature (1244)..(1244): n is a, c, g, or t
  misc_feature (1246)..(1247): n is a, c, g, or t
  misc_feature (1251)..(1251): n is a, c, g, or t
  misc_feature (1281)..(1281): n is a, c, g, or t
  misc_feature (1284)..(1284): n is a, c, g, or t
  misc_feature (1286)..(1286): n is a, c, g, or t
ttcagcccctgtggatcgagggcaggggcctcgaggtaccagttctgagccgggcatcaacagagaggcacctaaccgcccaggggctgtggtttgcagagggcgccctgagagtgcagctgcccctccctgttcacaggagaaggcgcagtgtaagaagagcagctgtcagggcgggctggcgccctccgtggcccacagggtggcccagctgaaacccaaggtcaagagcaaagggctgcccacaggcctcagctctttccagcagaaggaggctacccccggggggcgcatccgggagaagctgtcccgagccaagagtgccaaggtgtctggggccacacggcacccacagcccaagggccacggcagccgggagacacccaggtgcccagcccagccctccgtggctgcgtcccaggaggcaggcagtggctatgacagtgaggactgcgagggtctcctggggacagaggcaccacccagggaagcagggctgctgctgcacgccggggccagtgtggccgtgctggggccctcaccctcctctgtggtcaagatggaggccaaccagaaggccaagaagaagaaggagaggcaggggttgctaggggcctgccgcctgtccagccctgagagtgaggtcaagatcaagaggcggtcggtgaaggccaaggtgggcaccaccctggagcgggccccagggcagaggcccccaggtgcgctgggcaagaagaaagccaagggcaaggccaagggcagcctgcgggcagagccgggggccacccccagcagggacgccctcttcaacccctctcgggccttcgcctgccgtgaggagggcagccagctggccagtgagcgcctcaagagggccacgcgcaagggcacagtgctgcagccagtgctgcggcggaagaacggggccctgtccatcacgctggccacacgcaacgccaaggccatcctggggaagggccggaagctgagcaaggtgaagcacaaggccggcaagcagggcaagggccgggccgtgagccgcctgctggaaagcttcgccgtggaggaagactttgagttcgacgacaacagcagcttctcggaagaggaggaggacgaggaggaagaggaggaggacagcggccctctgagcgcagagcagagcgccgccctagcgcgctcgtgtgccatccacaaggaggacctgcgggacgggctgcccgtgctcatccccagcatcgtcntnnaggncgagagggcaccggcagaggatctactcantgnancagctgctgcaggaagcgttctcgatgtgcggccacagtccagccggtacctcccgcccggcacgcgggtctgcgcctactggagtcagaagtctcgatgtctgtacccgggcaacgtggtccggggggcctccggtgacgaagatgaggacctggactcagtagtggtggaatttgacgatggggatacaggccacatcgccgtctccaacgtcaggctgctgccccctgacttcaagatccagtgcacagagccctctccagccctgctagtgtctagcagctgccggaggaccaagaaggtatccagtgaggcacccccgcctagtgaagccgccacccccagcctgtcccccaaagcacaggacggccccgaagctttgaagacacctgggaaaaaatccattagcaaagacaaagctggtaaagccgaactcctaacctcaggtgccaaatcccccacgggggcctccgaccacttcctgggccgccgtggcagccccttgctgagctggtccgcggtggcgcagaccaagcggaaggcggtggcagcggccagcaaggggccgggggtgctgcagaacctcttccagctcaacggcagcagcaagaagctgcgggcccgcgaggccctgttccccgtgcacagcgtggccacacccatatttggcaacggcttccgcgccgactccttcagcagcctggccagctcctacgcgccctccagcctctgctcctccgacaacgaggactcgtcctacagctcagacgacgaggacccggctctgctgctgcagacctgcctcacccaccccgtgcccaccctcctggcccagcccgaggccctgcgctccaagggcagcggccctcacgcgcatgcccagcgctgcttcctgtccagggccacggtggctggcaccggtgcgggctcaggccccagcagcagcagcaaatccaagctcaagcgcaaagaggccctgagcttctccaaagccaaagagctctcccggaggcagcggccgccctccgtggaaaaccggccaaagatctcagccttcctgcccgcccggcagctctggaagtggtcggggaatcccacacagcggcgtggcatgaaggggaaggcccggaagctgttctacaaggccatcgtgcggggcgaggagaccctgcgtgtcggggactgtgccgtcttcctgtcagctgggcggcccaacctcccctacatcggccgcatcgagagcatgtgggagtcgtggggcagcaacatggtggtcaaggtcaagtggttctaccaccctgaggagaccaagctgggcaagaggcagtgcgacggcaagaatgcgctgtaccagtcctgccacgaggatgagaacgacgtgcagaccatctcccacaagtgccaggtcgtggcgcgcgagcagtatgagcagatggcccggagccgcaagtgccaggaccggcaggacctctactacctggcgggcacctacgaccccaccaccgggcgcctggtgacggctgatggcgtgcccatcctatgctgagccgccaccgcagatgcctcccacgtgcgccagggaccctgtgtgcggagcctggcgtcggccaagccaccgggcaggaggcagccccggcctcccaagggcgcatctgagcaaatatgcaaaagcccacagggcaagacccaggctttcttacggttttccctggaaagagcgctccaggtgtcggaatccagtcccgtcccatcctctgcggagggtcgggctgtggccctcatgggtccccggcccgcccacccacagcgccctccgtttcccgcaccggcagttcacgggagatttgaatccaagccatattccctagtacctccgactgtctcccaccagggaaagcagaaatcaggtgtgttgtctatttatttctctatgtaaatattgtatttctgcggggaaattttatggtaaaaagtggaaaagggtttttccccatccgcgtgacaaggtgtgtgtgagcgtgtatgtgtgtgcgcgtgtgtggcgatttttgtcctggggtttcctttggaaatgcactgttctcagcccagctgggttccaacgggggcacctgggacgacagaggcatctcggggcagggggcagaggccacgggagggtcaggtgggacccttgacggcaccctctgatctcttggggggacgaccgtgtaagatgaaagtcggtcaagtttatttgctttcagtgcatctcctagaaaagaagtgttggagcagggggtggtgatgaggggcccgtggggaaaggattcaagaggcaaagcccagaccagggagtgtgacaacagccgtgagcatctcacctgtgttcaaaacaagacaaagacgaacaaatattttaaagtattgataagaaaaagcaatgtttggattgtatctgctgaatcatattccaacctatatctgatttctgtttccggggccagttggtctgaggccaaggagtctggcctccacccagagcagggaggggctggcccctcgcccccctcaccctcgccgccctggcacactcgggaagcagggcccagctctgagcccctcctcacccctggggtcctaactttcctgaaagtagtaggtgccgtgagaaggggcagtttggccaggttcctgaactgggcagggctcggggcctatgagggcaggttcacagtcccaccagattctctcctcacccccaagcagaatgcatgcaaaagacaccccttttcccacccaccttattggtgcccccaaacccctggcctgctgcgtagatggtggtgaggccaggccagcagtgctgtggccaggggagaagaaaataaaacgcaggccctgcccttggggaaggcccctttctgggcccccttttccaccagccaaatctgcctggccctcggacccctctgcctgccccaacccctttggaggtttctcggccttttctgtgccacttggtggggcagatggcctgatgggctagtgcttggggcatagaatgagggtccccctgaccacctgagcccaaatcctggccccaggtgcaagcagcacccctcgagggctctgccccagtatccccagagaattcacacccctccccttctcccacagccaaggacagacaggctgcctggacctgagcccaacagccttcagcctcagaaacgcatggggggccacacactccttatatcctcccacactaaggttcccctggccccacgggagcttcaggaaagccccccaagttagccactgctctaggacgagctctgtgtcccccacaccacaggcctcgaagcagggtgctggtgggtgccctgcaccccaatcccaggtccccttggccccctatttttctcgggcccattggggcctgtttctcacctgctggctggaccccctgaagggccgttcccagaggctccccaggaggctcaaggctgggggcttatgttgtggtcgggggtccccgcctccagccccccgctcccacccccgagcctaccctttgtctcgcatgagtgcaatatttcattcccggtggttgtctggggaggtggttggacgaggtcctgcttgaggctcggggatcagaacgatgtcaagtgaagaaaaatgcacgggggcatgctgagccactggagttccagagagggccgaggagggtgcagccacggaggttggatcctctgctccgccgcctcgtcctcgtcccgcttctgctgggttccgctttgtccctggttttttcctttttttttctgtgtgcgtgcgaatggtgcggcccctcccctctcaccgtggttaacgtgacgaaggcacgattcctgtaaatgtgtaaactaaggggatggttggattttttttcaatgtaaacactaaaaacaaaatggacaaaaaaacacacaaaggttttatgaacagcagactctatgtaaaggcattttagtatcaaattttttattgataacttgcttaagaataaatatatggactattgtacaggt

SEQ ID NO: 111737 - DNA, 8930 bp, Homo sapiens
  misc_feature (118)..(118): n is a, c, g, or t
  misc_feature (1860)..(1860): n is a, c, g, or t
  misc_feature (1916)..(1916): n is a, c, g, or t
  misc_feature (2071)..(2071): n is a, c, g, or t
  misc_feature (3597)..(3597): n is a, c, g, or t
  misc_feature (3599)..(3600): n is a, c, g, or t
  misc_feature (3604)..(3604): n is a, c, g, or t
  misc_feature (3634)..(3634): n is a, c, g, or t
  misc_feature (3637)..(3637): n is a, c, g, or t
  misc_feature (3639)..(3639): n is a, c, g, or t
  misc_feature (4421)..(4421): n is a, c, g, or t
gttccacacacgcgctggacctggaggctgaggaggagaggacgaggctatgtgatgaccgcctggggcttgccagccgcgagctgctgctgcaggacagcaaagaccgcgtagagtncgcccggatccacccaccgagcagctgccctggggacctggccccccacctcatgatgcagagcggccagctgggcggggacccagccccccacacccacccccatcccccctggctgccccgcacccgcagcccctccctgtggatgggggggcactcctacggcctggggcaccctgccctgcaccagaacctgccccccggcttccccgcctccgtggctggccctgtgccctctgtcttccccctcccacaggacgcccccacacagctggtcatcctgccctcagagcccacaccccacagcgccccccacgcacttgcggatgtcatggaccaggcgtcactgtggccccccatgtacgggggccggggccccgcctctcacatgcagcacccgggccagctccctgtgtactcgaggccgcagctcctccggcagcaggagctctatgctttgcagcagcagagggccgcccagttccagcggaagcccgaagaccagcacctggatctggaggagcccgcccaggagaaggccccaaagtccacccacaagccagttgccttaacccccacggccccgggcgccccctcacccgctgcaggccccaccaagctgccaccttgctgccatccgcccgacccaaagccccccgccagctcccccaccccaccacctcggcccagcgccccgtgcactttaaatgtctgccctgccagcagccccgggcctggctcccgggtgcgcagcgccgaggaaaagaatggggagggtcagcagtccacggccgacatcatcacatccgaaccagtggcacgtgctcactctgttgcccacgctggtctcgaattcctggcctcaaatgatccatccacctcagcctcccaaagttttgggattacagacctgcctcccggatacctgcgccccatggctggcctgggcttctccctaccctcagacgtgcactcttctaacctcgaggaccctgaaactatgcaaaccaccgccccgggggcccagcctgagcccacaaggacattcctgcctggggagccgcctccctgcagccccaggagcctggaggagcccgggctgctctcaggggccagggaggccacccaggaccttgccgccaccccctaccctgccgagcggggaccccaggggaaggcagcggaccccagcccactagaggggctacaagaactgcaatgtgcggccctcctggaggcagggggccccgaggccaccggccaggctcattctactcagggaggggcacgagaagagaggagcagggaggagggggagcaggggccctcgtcaggggcctcctcccaagtcctggagcagcgagcagggagtccgggtgcccttgaggacgagggggagcagccggcccctgaggaggacgagctggaggaagacgagctggggcagcagagcatggaggactcagaggaggactgtggcggagctcccgacaacagccacccacccagggcgctaccaggcctggatgccttggtggccgccaccatcaacctgggggacctgcccagcgacagcccaccggaccctcagcccccagcggcctctgggccccccagcacagtccccctgcctcatagctcagggattcatgggatcgctctgctcagcgagctggctgacctggcaatccagcggcagaggagtgagaggactgtgccagaggaggaagaggacgtgctanccttcaacctgcagcacctggccacgctggccacagcctggtccctggtggaggcngctggcctggacagctccactgccccagcgcagccgcccacagccaacccctgcagcggccccaggctcaccccccgcatgcagatcctgcagcgcaaggacacctggacccccaagaccaagcctgtgtgccccctgaaggccgccatcgaccngctggacacgcaggaggtggggatgcgcgtgcggctggcggagctgcagcggcgctacaaggagaagcagcgggagctggcccgcctgcagcgcaagcacgaccatgagagagacgagagttcacggagccctgcacggcgggggcctggccggccgaggaagcgcaaacactcaagctcgctgcctgccccacgtcccacggggccgctccccaggagcgatggcaagaaagtcaaggcggtgcggacaagcctgggtctgctgtgtgcggagctgcgaggaggcagtgggggcgagcctgcgaagaagcgaagcaagctggagaggagcgtctatgcgggcctgcagactgcctccgtggagaaggcgcagtgtaagaagagcagctgtcagggcgggctggcgccctccgtggcccacagggtggcccagctgaaacccaaggtcaagagcaaagggctgcccacaggcctcagctctttccagcagaaggaggctacccccggggggcgcatccgggagaagctgtcccgagccaagagtgccaaggtgtctggggccacacggcacccacagcccaagggccacggcagccgggagacacccaggtgcccagcccagccctccgtggctgcgtcccaggaggcaggcagtggctatgacagtgaggactgcgagggtctcctggggacagaggcaccacccagggaagcagggctgctgctgcacgccggggccagtgtggccgtgctggggccctcaccctcctctgtggtcaagatggaggccaaccagaaggccaagaagaagaaggagaggcaggggttgctaggggcctgccgcctgtccagccctgagagtgaggtcaagatcaagaggcggtcggtgaaggccaaggtgggcaccaccctggagcgggccccagggcagaggcccccaggtgcgctgggcaagaagaaagccaagggcaaggccaagggcagcctgcgggcagagccgggggccacccccagcagggacgccctcttcaacccctctcgggccttcgcctgccgtgaggagggcagccagctggccagtgagcgcctcaagagggccacgcgcaagggcacagtgctgcagccagtgctgcggcggaagaacggggccctgtccatcacgctggccacacgcaacgccaaggccatcctggggaagggccggaagctgagcaaggtgaagcacaaggccggcaagcagggcaagggccgggccgtgagccgcctgctggaaagcttcgccgtggaggaagactttgagttcgacgacaacagcagcttctcggaagaggaggaggacgaggaggaagaggaggaggacagcggccctctgagcgcagagcagagcgccgccctagcgcgctcgtgtgccatccacaaggaggacctgcgggacgggctgcccgtgctcatccccaaggaggatagcctgctgtacgcgggcagcgtcaggaccctgcagccacccgacatctatagcatcgtcntnnaggncgagagggcaccggcagaggatctactcantgnancagctgctgcaggaagcgttctcgatgtgcggccacagtccagccggtacctcccgcccggcacgcgggtctgcgcctactggagtcagaagtctcgatgtctgtacccgggcaacgtggtccggggggcctccggtgacgaagatgaggacctggactcagtagtggtggaatttgacgatggggatacaggccacatcgccgtctccaacgtcaggctgctgccccctgacttcaagatccagtgcacagagccctctccagccctgctagtgtctagcagctgccggaggaccaagaaggtatccagtgaggcacccccgcctagtgaagccgccacccccagcctgtcccccaaagcacaggacggccccgaagctttgaagacacctgggaaaaaatccattagcaaagacaaagctggtaaagccgaactcctaacctcaggtgccaaatcccccacgggggcctccgaccacttcctgggccgccgtggcagccccttgctgagctggtccgcggtggcgcagaccaagcggaaggcggtggcagcggccagcaaggggccgggggtgctgcagaacctcttccagctcaacggcagcagcaagaagctgcgggcccgcgaggccctgttccccgtgcacagcgtggccacacccatatttggcaacggcttccgcgccgactccttcagcagcctggccagctcctacgcgcccttcgtcggggggaccgggccgggcctccccaggggagcccacaagctgctgcgggctaanaaggccgagagggtggaggccgagaagggtgggcggcggcgggcgggcggtgagttcctggtcaagctggaccacgagggtgtgacctcccccaagaacaagacctgcaaggcgttgctcatgggggacaaggacttcagccccaagctcgggcggcccctgcccagccccagctatgtgcacccggcccttgtgggcaaggacaagaaggggcgggcacccatccccccgctgcccatggggctggcgctgcgcaagtacgcgggccaggcagagttcccgctgccctacgacagcgactgccacagctccttctcggacgaggacgaggacgggccggggctggcggccggcgtgccctcccgcttcctcgcccgcctgtccgtgtcctcttcctcctctggctcgtccacctcctcctcctcaggctccgtgtccacctccagcctctgctcctccgacaacgaggactcgtcctacagctcagacgacgaggacccggctctgctgctgcagacctgcctcacccaccccgtgcccaccctcctggcccagcccgaggccctgcgctccaagggcagcggccctcacgcgcatgcccagcgctgcttcctgtccagggccacggtggctggcaccggtgcgggctcaggccccagcagcagcagcaaatccaagctcaagcgcaaagaggccctgagcttctccaaagccaaagagctctcccggaggcagcggccgccctccgtggaaaaccggccaaagatctcagccttcctgcccgcccggcagctctggaagtggtcggggaatcccacacagcggcgtggcatgaaggggaaggcccggaagctgttctacaaggccatcgtgcggggcgaggagaccctgcgtgtcggggactgtgccgtcttcctgtcagctgggcggcccaacctcccctacatcggccgcatcgagagcatgtgggagtcgtggggcagcaacatggtggtcaaggtcaagtggttctaccaccctgaggagaccaagctgggcaagaggcagtgcgacggcaagaatgcgctgtaccagtcctgccacgaggatgagaacgacgtgcagaccatctcccacaagtgccaggtcgtggcgcgcgagcagtatgagcagatggcccggagccgcaagtgccaggaccggcaggacctctactacctggcgggcacctacgaccccaccaccgggcgcctggtgacggctgatggcgtgcccatcctatgctgagccgccaccgcagatgcctcccacgtgcgccagggaccctgtgtgcggagcctggcgtcggccaagccaccgggcaggaggcagccccggcctcccaagggcgcatctgagcaaatatgcaaaagcccacagggcaagacccaggctttcttacggttttccctggaaagagcgctccaggtgtcggaatccagtcccgtcccatcctctgcggagggtcgggctgtggccctcatgggtccccggcccgcccacccacagcgccctccgtttcccgcaccggcagttcacgggagatttgaatccaagccatattccctagtacctccgactgtctcccaccagggaaagcagaaatcaggtgtgttgtctatttatttctctatgtaaatattgtatttctgcggggaaattttatggtaaaaagtggaaaagggtttttccccatccgcgtgacaaggtgtgtgtgagcgtgtatgtgtgtgcgcgtgtgtggcgatttttgtcctggggtttcctttggaaatgcactgttctcagcccagctgggttccaacgggggcacctgggacgacagaggcatctcggggcagggggcagaggccacgggagggtcaggtgggacccttgacggcaccctctgatctcttggggggacgaccgtgtaagatgaaagtcggtcaagtttatttgctttcagtgcatctcctagaaaagaagtgttggagcagggggtggtgatgaggggcccgtggggaaaggattcaagaggcaaagcccagaccagggagtgtgacaacagccgtgagcatctcacctgtgttcaaaacaagacaaagacgaacaaatattttaaagtattgataagaaaaagcaatgtttggattgtatctgctgaatcatattccaacctatatctgatttctgtttccggggccagttggtctgaggccaaggagtctggcctccacccagagcagggaggggctggcccctcgcccccctcaccctcgccgccctggcacactcgggaagcagggcccagctctgagcccctcctcacccctggggtcctaactttcctgaaagtagtaggtgccgtgagaaggggcagtttggccaggttcctgaactgggcagggctcggggcctatgagggcaggttcacagtcccaccagattctctcctcacccccaagcagaatgcatgcaaaagacaccccttttcccacccaccttattggtgcccccaaacccctggcctgctgcgtagatggtggtgaggccaggccagcagtgctgtggccaggggagaagaaaataaaacgcaggccctgcccttggggaaggcccctttctgggcccccttttccaccagccaaatctgcctggccctcggacccctctgcctgccccaacccctttggaggtttctcggccttttctgtgccacttggtggggcagatggcctgatgggctagtgcttggggcatagaatgagggtccccctgaccacctgagcccaaatcctggccccaggtgcaagcagcacccctcgagggctctgccccagtatccccagagaattcacacccctccccttctcccacagccaaggacagacaggctgcctggacctgagcccaacagccttcagcctcagaaacgcatggggggccacacactccttatatcctcccacactaaggttcccctggccccacgggagcttcaggaaagccccccaagttagccactgctctaggacgagctctgtgtcccccacaccacaggcctcgaagcagggtgctggtgggtgccctgcaccccaatcccaggtccccttggccccctatttttctcgggcccattggggcctgtttctcacctgctggctggaccccctgaagggccgttcccagaggctccccaggaggctcaaggctgggggcttatgttgtggtcgggggtccccgcctccagccccccgctcccacccccgagcctaccctttgtctcgcatgagtgcaatatttcattcccggtggttgtctggggaggtggttggacgaggtcctgcttgaggctcggggatcagaacgatgtcaagtgaagaaaaatgcacgggggcatgctgagccactggagttccagagagggccgaggagggtgcagccacggaggttggatcctctgctccgccgcctcgtcctcgtcccgcttctgctgggttccgctttgtccctggttttttcctttttttttctgtgtgcgtgcgaatggtgcggcccctcccctctcaccgtggttaacgtgacgaaggcacgattcctgtaaatgtgtaaactaaggggatggttggattttttttcaatgtaaacactaaaaacaaaatggacaaaaaaacacacaaaggttttatgaacagcagactctatgtaaaggcattttagtatcaaattttttattgataacttgcttaagaataaatatatggactattgtacaggtaaaaaaaaaaaaaaaaaaaaaaaaaaaaaaaaaaaaaaaaaaaaaaaaaaaaaaaaaaaaaaaaaaaaaaaaaaaaaaaaaaaaaaaaaaaaaaaaaaaaaaaaaaaaaaaaaaagaaaaaagaagaaacaacgaccaacgcaggagatgaaccataaaaacacaaaccaaaatacaagacagacaaagaagaaaagtagagaaaagaatgaaataaatgagagagagcgaagaaatcaaaaaacagagcacaaaaacttgaaaacagaaagaggaatgcaaaacgattgcgctgagaacaacacacagacaagcatagagaaagacagcaagcatgaaagcaagcaccaaacacgccgacaggaaacgagacactaaggaaaacagaaagagccaaaaacagagagcaagacgagaagacaaacaggagaacgtgaagaggatttgaaaccaacatcactaatcagagcaagagaaagaggagaggacagaaaacggaagaaaaaaattacaaatgagaaagaagaaaggcaaagagagtaaagcgacagcaacagagaagcagagaagagcagagaggagagagaaaagacagagagagaaagaagaagaagacaagagagagacaagataagagaagaaagcggaagcgggaagagcgatagaaggaaaggtgagagtgagagaaaggacaacaatatataaagaaggcaccgaagcaacgcagaaca

SEQ ID NO: 111738 - DNA, 6895 bp, Homo sapiens
  misc_feature (118)..(118): n is a, c, g, or t
  misc_feature (1860)..(1860): n is a, c, g, or t
  misc_feature (1916)..(1916): n is a, c, g, or t
  misc_feature (2071)..(2071): n is a, c, g, or t
  misc_feature (3597)..(3597): n is a, c, g, or t
  misc_feature (3599)..(3600): n is a, c, g, or t
  misc_feature (3604)..(3604): n is a, c, g, or t
  misc_feature (3634)..(3634): n is a, c, g, or t
  misc_feature (3637)..(3637): n is a, c, g, or t
  misc_feature (3639)..(3639): n is a, c, g, or t
  misc_feature (4421)..(4421): n is a, c, g, or t
gttccacacacgcgctggacctggaggctgaggaggagaggacgaggctatgtgatgaccgcctggggcttgccagccgcgagctgctgctgcaggacagcaaagaccgcgtagagtncgcccggatccacccaccgagcagctgccctggggacctggccccccacctcatgatgcagagcggccagctgggcggggacccagccccccacacccacccccatcccccctggctgccccgcacccgcagcccctccctgtggatgggggggcactcctacggcctggggcaccctgccctgcaccagaacctgccccccggcttccccgcctccgtggctggccctgtgccctctgtcttccccctcccacaggacgcccccacacagctggtcatcctgccctcagagcccacaccccacagcgccccccacgcacttgcggatgtcatggaccaggcgtcactgtggccccccatgtacgggggccggggccccgcctctcacatgcagcacccgggccagctccctgtgtactcgaggccgcagctcctccggcagcaggagctctatgctttgcagcagcagagggccgcccagttccagcggaagcccgaagaccagcacctggatctggaggagcccgcccaggagaaggccccaaagtccacccacaagccagttgccttaacccccacggccccgggcgccccctcacccgctgcaggccccaccaagctgccaccttgctgccatccgcccgacccaaagccccccgccagctcccccaccccaccacctcggcccagcgccccgtgcactttaaatgtctgccctgccagcagccccgggcctggctcccgggtgcgcagcgccgaggaaaagaatggggagggtcagcagtccacggccgacatcatcacatccgaaccagtggcacgtgctcactctgttgcccacgctggtctcgaattcctggcctcaaatgatccatccacctcagcctcccaaagttttgggattacagacctgcctcccggatacctgcgccccatggctggcctgggcttctccctaccctcagacgtgcactcttctaacctcgaggaccctgaaactatgcaaaccaccgccccgggggcccagcctgagcccacaaggacattcctgcctggggagccgcctccctgcagccccaggagcctggaggagcccgggctgctctcaggggccagggaggccacccaggaccttgccgccaccccctaccctgccgagcggggaccccaggggaaggcagcggaccccagcccactagaggggctacaagaactgcaatgtgcggccctcctggaggcagggggccccgaggccaccggccaggctcattctactcagggaggggcacgagaagagaggagcagggaggagggggagcaggggccctcgtcaggggcctcctcccaagtcctggagcagcgagcagggagtccgggtgcccttgaggacgagggggagcagccggcccctgaggaggacgagctggaggaagacgagctggggcagcagagcatggaggactcagaggaggactgtggcggagctcccgacaacagccacccacccagggcgctaccaggcctggatgccttggtggccgccaccatcaacctgggggacctgcccagcgacagcccaccggaccctcagcccccagcggcctctgggccccccagcacagtccccctgcctcatagctcagggattcatgggatcgctctgctcagcgagctggctgacctggcaatccagcggcagaggagtgagaggactgtgccagaggaggaagaggacgtgctanccttcaacctgcagcacctggccacgctggccacagcctggtccctggtggaggcngctggcctggacagctccactgccccagcgcagccgcccacagccaacccctgcagcggccccaggctcaccccccgcatgcagatcctgcagcgcaaggacacctggacccccaagaccaagcctgtgtgccccctgaaggccgccatcgaccngctggacacgcaggaggtggggatgcgcgtgcggctggcggagctgcagcggcgctacaaggagaagcagcgggagctggcccgcctgcagcgcaagcacgaccatgagagagacgagagttcacggagccctgcacggcgggggcctggccggccgaggaagcgcaaacactcaagctcgctgcctgccccacgtcccacggggccgctccccaggagcgatggcaagaaagtcaaggcggtgcggacaagcctgggtctgctgtgtgcggagctgcgaggaggcagtgggggcgagcctgcgaagaagcgaagcaagctggagaggagcgtctatgcgggcctgcagactgcctccgtggagaaggcgcagtgtaagaagagcagctgtcagggcgggctggcgccctccgtggcccacagggtggcccagctgaaacccaaggtcaagagcaaagggctgcccacaggcctcagctctttccagcagaaggaggctacccccggggggcgcatccgggagaagctgtcccgagccaagagtgccaaggtgtctggggccacacggcacccacagcccaagggccacggcagccgggagacacccaggtgcccagcccagccctccgtggctgcgtcccaggaggcaggcagtggctatgacagtgaggactgcgagggtctcctggggacagaggcaccacccagggaagcagggctgctgctgcacgccggggccagtgtggccgtgctggggccctcaccctcctctgtggtcaagatggaggccaaccagaaggccaagaagaagaaggagaggcaggggttgctaggggcctgccgcctgtccagccctgagagtgaggtcaagatcaagaggcggtcggtgaaggccaaggtgggcaccaccctggagcgggccccagggcagaggcccccaggtgcgctgggcaagaagaaagccaagggcaaggccaagggcagcctgcgggcagagccgggggccacccccagcagggacgccctcttcaacccctctcgggccttcgcctgccgtgaggagggcagccagctggccagtgagcgcctcaagagggccacgcgcaagggcacagtgctgcagccagtgctgcggcggaagaacggggccctgtccatcacgctggccacacgcaacgccaaggccatcctggggaagggccggaagctgagcaaggtgaagcacaaggccggcaagcagggcaagggccgggccgtgagccgcctgctggaaagcttcgccgtggaggaagactttgagttcgacgacaacagcagcttctcggaagaggaggaggacgaggaggaagaggaggaggacagcggccctctgagcgcagagcagagcgccgccctagcgcgctcgtgtgccatccacaaggaggacctgcgggacgggctgcccgtgctcatccccaaggaggatagcctgctgtacgcgggcagcgtcaggaccctgcagccacccgacatctatagcatcgtcntnnaggncgagagggcaccggcagaggatctactcantgnancagctgctgcaggaagcgttctcgatgtgcggccacagtccagccggtacctcccgcccggcacgcgggtctgcgcctactggagtcagaagtctcgatgtctgtacccgggcaacgtggtccggggggcctccggtgacgaagatgaggacctggactcagtagtggtggaatttgacgatggggatacaggccacatcgccgtctccaacgtcaggctgctgccccctgacttcaagatccagtgcacagagccctctccagccctgctagtgtctagcagctgccggaggaccaagaaggtatccagtgaggcacccccgcctagtgaagccgccacccccagcctgtcccccaaagcacaggacggccccgaagctttgaagacacctgggaaaaaatccattagcaaagacaaagctggtaaagccgaactcctaacctcaggtgccaaatcccccacgggggcctccgaccacttcctgggccgccgtggcagccccttgctgagctggtccgcggtggcgcagaccaagcggaaggcggtggcagcggccagcaaggggccgggggtgctgcagaacctcttccagctcaacggcagcagcaagaagctgcgggcccgcgaggccctgttccccgtgcacagcgtggccacacccatatttggcaacggcttccgcgccgactccttcagcagcctggccagctcctacgcgcccttcgtcggggggaccgggccgggcctccccaggggagcccacaagctgctgcgggctaanaaggccgagagggtggaggccgagaagggtgggcggcggcgggcgggcggtgagttcctggtcaagctggaccacgagggtgtgacctcccccaagaacaagacctgcaaggcgttgctcatgggggacaaggacttcagccccaagctcgggcggcccctgcccagccccagctatgtgcacccggcccttgtgggcaaggacaagaaggggcgggcacccatccccccgctgcccatggggctggcgctgcgcaagtacgcgggccaggcagagttcccgctgccctacgacagcgactgccacagctccttctcggacgaggacgaggacgggccggggctggcggccggcgtgccctcccgcttcctcgcccgcctgtccgtgtcctcttcctcctctggctcgtccacctcctcctcctcaggctccgtgtccacctccagcctctgctcctccgacaacgaggactcgtcctacagctcagacgacgaggacccggctctgctgctgcagacctgcctcacccaccccgtgcccaccctcctggcccagcccgaggccctgcgctccaagggcagcggccctcacgcgcatgcccagcgctgcttcctgtccagggccacggtggctggcaccggtgcgggctcaggccccagcagcagcagcaaatccaagctcaagcgcaaagaggccctgagcttctccaaagccaaagagctctcccggaggcagcggccgccctccgtggaaaaccggccaaagatctcagccttcctgcccgcccggcagctctggaagtggtcggggaatcccacacagcggcgtggcatgaaggggaaggcccggaagctgttctacaaggccatcgtgcggggcgaggagaccctgcgtgtcggggactgtgccgtcttcctgtcagctgggcggcccaacctcccctacatcggccgcatcgagagcatgtgggagtcgtggggcagcaacatggtggtcaaggtcaagtggttctaccaccctgaggagaccaagctgggcaagaggcagtgcgacggcaagaatgcgctgtaccagtcctgccacgaggatgagaacgacgtgcagaccatctcccacaagtgccaggtcgtggcgcgcgagcagtatgagcagatggcccggagccgcaagtgccaggaccggcaggacctctactacctggcgggcacctacgaccccaccaccgggcgcctggtgacggctgatggcgtgcccatcctatgctgagccgccaccgcagatgcctcccacgtgcgccagggaccctgtgtgcggagcctggcgtcggccaagccaccgggcaggaggcagccccggcctcccaagggcgcatctgagcaaatatgcaaaagcccacagggcaagacccaggctttcttacggttttccctggaaagagcgctccaggtgtcggaatccagtcccgtcccatcctctgcggagggtcgggctgtggccctcatgggtccccggcccgcccacccacagcgccctccgtttcccgcaccggcagttcacgggagatttgaatccaagccatattccctagtacctccgactgtctcccaccagggaaagcagaaatcaggtgtgttgtctatttatttctctatgtaaatattgtatttctgcggggaaattttatggtaaaaagtggaaaagggtttttccccatccgcgtgacaaggtgtgtgtgagcgtgtatgtgtgtgcgcgtgtgtggcgatttttgtcctggggtttcctttggaaatgcactgttctcagcccagctgggttccaacgggggcacctgggacgacagaggcatctcggggcagggggcagaggccacgggagggtcaggtgggacccttgacggcaccctctgatctcttggggggacgaccgtgtaagatgaaagtcggtcaagtttatttgctttcagtgcatctcctagaaaagaagtgttggagcagggggtggtgatgaggggcccgtggggaaaggattcaagaggcaaagcccagaccagggagtgtgacaacagccgtgagcatctcacctgtgttcaaaacaagacaaagacgaacaaatattttaaagtattgataagaaaaagcaatgtttggattgtatctgctgaatcatattccaacctatatctgatttctggttccgctttgtccctggttttttcctttttttttctgtgtgcgtgcgaatggtgcggcccctcccctctcaccgtggttaacgtgacgaaggcacgattcctgtaaatgtgtaaactaaggggatggttggattttttttcaatgtaaacactaaaaacaaaatggacaaaaaaacacacaaaggttttatgaacagcagactctatgtaaaggcattttagtatcaaattttttattgataacttgcttaagaataaatatatggactattgtacaggt

SEQ ID NO: 111739 - DNA, 540 bp, Homo sapiens
cggcacgagctcatcagtaacatggggagagtggtatcaaccactaagaggattaaatgagtgaatatttgtaaaacacgtagcctagaatagatatttataaagcacaagatctatgtaaagtgtttataacataatacattggaatatgagacttgaacattttgaagattctaataaatgaataatttaatttagtgctcatttgaaaaatattttatcctcatgtttacatttaacacatataatttatatcttagtttttatcccatttatatatatatttaccagaaaaatgttttgtaataccttaattttatgtggagttgaatttaaataattaggccgaatttgtatgtattgttggatgggtatgtgtattgacctgatttataaaataaagtatttattaaactgagttttgcacttccaggtagagtcacatttaagataatcctttgaaatattttagcttttgaaagtagattaagcaagataaataaaatgtatatacgtcattaaaaatacttaaaatgcttt

SEQ ID NO: 111740 - DNA, 445 bp, Homo sapiens
aaagagccagaggaaaaaaatggaactttttctcaagggacttgacttagtggatagctaaatgtccagtttcaaaagcttatccttttgaaatgcttttatacttataaaagcccaaagaaaccttaatatgggccacataactataatgtaatttttccaaggtaggaaaggcagtaatactgtactattagaatatatggattttcataagagcagctgttgtttcactaaggtttacattattttaggtcctagttttctgtttggaggtgtattaatgagttccttggttaatttattcccattctctatatttctgattcttaattgtatgatgtggtttatattcattgttttgacgtgataggaatgccaacaatgtgcctttggttttcttatgcttaaaaaataaaaaaataaataaacattaaatgtaaaatca

SEQ ID NO: 111741 - DNA, 323 bp, Homo sapiens
catcacaactgtcttgtggctcatggagactttcagattgatgcagtggctccaaggcgaagtgacctcaattgctgatgcaaaactagattctataagtgtaaactggtggttcacaaggacaggtgagaagtgctgatggtggcaagggaggcaattataacaatatccctccccttctaccccatcctccaccccacttgtgacagacatagacaaggacttaattgtggcacagaggaagggcaactgactcttgagaccagtgaatctgtagtcaaaacgcactgatcactgttgaataactactggaattatcaaga

SEQ ID NO: 111742 - DNA, 457 bp, Homo sapiens
tgcttaacaaggggcttctgtggctcaggcagctgagttggggaggggaagaacctgttgtctgatttaggcaacagccctccacacccctaccctgcaacctgcactgtccctaccagacccctgctgtgagcatgtgaaggggccaggaacatctgtggcccagaaccaggcaggatgaggagacattcctgtgtcagggtaaccctgggaggttcccatggcaacagccagccagtccagtgtgtgtccttgggcccagccggacgaggctgggagccactctcaaaaggagcaatgtgcctctgaccttccagaagccaataggggtggtcaggctgggaagcgaagtgacccactaccacctatgacccacccaccccatctgtctccaccacctgtcaccccaggatgggtgtgaatgccaggcaatggggaaagcctggggcctagggga

SEQ ID NO: 111743 - DNA, 423 bp, Homo sapiens
gccagttcataaagactggaagaagtggctttttttgtcaagtgcacagatcccaacaaagctttcgagacgtagaagaaacagggaaacatggcccaaagaaaggagcaaaataaatcttcacaaaccaatcctaaagaaacaaagacatgaattacctgacaaagaattcaaaatagccctcataaagatgctgtatgagctcaaggtaacaatgcatgagcaaaatgagaatatcaacaaagagacagaaaatccaaaaaaaaaaaaaaaaaaaaaaagaagaaccaaccaattttggaactgaagaatacaatagctacactgaaaaattcacaataggggttcaacagcagactcagtcaagcagaagagagaaacagcaaactcaagacaagttatttgacattatccacccagagg

SEQ ID NO: 111744 - DNA, 325 bp, Homo sapiens
aaacagttaactacttagaggaagaaataacaccagggagagtaatatggtgtcagaaaaggaagatgactccaaaataatgataaaccacagctctaaaattttaatgtaacttaatgaaaactaattcaattgaagcgtgtttcagtttggtattagctctgaacctgggaaacttgagtcctggcattaggggaatctcttcattttatggaccctggtttcttcatctgtaaactcaggagattggaacagatgatctttaaggctcctttgaacctgtataatttcttgattcagtttcctgaagtaagatgtgcttttt

SEQ ID NO: 111745 - DNA, 476 bp, Homo sapiens
tccttgacccccaaaccacacccaaaggagcccacattttggaattctgcttctagggctgtgatggcacaggatccctctcctttgcccacagcttgagggcagcgtgaggacagtgtgagggagcaagcaccctcagaggtggcccctgccctcactcacaccgctggctgaaacgctggtatctctccatcggacaggatctgttcaacatcaatgctgttctccactggggcatcccgagagacctatataagggggcaactcacatccatctgtgatggcagcaaagtgtggcaagaacctaatgtgccttctgagtcatctttaaactatgcaaggtccctgcctgcaatcaatatattctaatactttagattaatactttctgattaatcaatctatgacaaacccctggatcctcaacaatggcatctaaaaaaaaaatgtagtgcaactggctgagcacagtgact

SEQ ID NO: 111746 - DNA, 1011 bp, Homo sapiens
atgacccaccaatcacatgcctatcatatagtaaagcccagcctatgtctaatagtacattttcagtcactagcttttttaagtacacctgcaatgtattcacttagaaccacaaaaaaagatacaaaaaaaaaagaggagaggatgaaagatggaggaaaaaaggaaagaggaaagaaatagtaaatgttctctgcctcttaaaaccatataatctataacaagaatagggtaaaagagacttaacagtaacaacagggcttaactatctttcatctcatcaattccaatgaaaaccattaccttaaaatttggccttcccgcacagtgggggggtccttcatcattggacttagcaccggtctgaagtcatagcataatcagtcacatgtcaccttaggtagtcaggacagacttccaattccttaaatccatctatccgggattgcaggtcgcacaagcattttccaacaaagagggataatcctagagaatcaatcatattttatgcataacgtaaacagtggaccacagtgacttattggccagttcgctagtgtgccctgttaacctaagttggtaagggcatttggagcacacatttctacttcgccccacattcaccaactgcggcagcaatctccagctggtcacactcgtctttaacctaattccgcaagaacggattctcccaccttcacatgttccacacaatgcacagagcatctgtgtgtactaactattctagaaaaactgttggcaaattaccaaaacaacctggtgggtctcactaaactggggacagatgagcccactatcggtgccccgcggacactataactttccccacgaggatggtttaaacgaccaagatcaaaaacacaacaaagacaacaagagaaacaacaacaacaagcgacaagagacacaacaacgaaagagcaaagaacagcagacgagaccacgaacagacacagacacacgacagcaaacaccaacaagactcagacc

SEQ ID NO: 111747 - DNA, 425 bp, Homo sapiens
agagagaacaggtagagcagaggctctcaggtgggcgggagcacacctgacatgatggggaaactacaaaaagacctgaatatctggagaagattgggcaagggcgagagtgttgggagctgaactcacagagctaaggtgtcgggaaggagaaagcagatcatttagggccttgcagaccattgccagggcactggctttaattttgggaaaaatgaagaattgctatgtgattttgaatgtagtagcagtgaagatgccgaaagatcaatggattgtggatgtattttgaaggtagagctagtggagcctgagaaagggtagtcaaggatgactcctagtttttttatctgagcaaattgcaagatgccagcccaggaaaggctgcagcagggacaggtttaagggagaagatcaggagttcg

SEQ ID NO: 111748 - DNA, 177 bp, Homo sapiens
gtctggggcattgtctggtcttatctgatggccagtatcattcttgatgctttctcttccctggctcctacctctctgtctttcctcatagatcagctgtgtctttttattgatccttagcttccaccctggttaatcagtgctcccaacaattccgagcttcccaagatcccttta

SEQ ID NO: 111749 - DNA, 367 bp, Homo sapiens
tcaccaagtatagctgactatctccataacatctctccagttgtggccttagttccagccttcatcactctgcattctgaggagctgttatctgtctcctgctgccagcccctcacccccagtcggtctccaacatactttttttttttttttttttgagatggagtcttgctctgtcacccaggctggagtgcagtggtgcgatctcagctcactgcaacctctgcctccagggctcaatagattctcgtgcctcagcctctcgagtagctgggattacaggcgtgcaccaccacacctggctaatttttgcatttttagttgagatgaagttttgccatgttgatcaggctggtctcaaactcct

SEQ ID NO: 111750 - DNA, 632 bp, Homo sapiens
ggccaaatcactcttctcaaagaccctcctttctccttaatgaaataatgactattcttggtcttggatgtttatgatctggccccaagcaactttttttgtagtcacatgtcatgatagtcctccttatgcttgttttccaagtatttctttcccactcttattttctatcttagctctctctagagccttaagaacattcctcaagaaagggaaaagtgaggtgaggtgcagggcagaaaaagcagcaattattgtaaagtgaacctggaagggagagtttttcccaaagcaggaataagaaggttaaagccatgaaagcaatacctttcatgttccctcaaaacataactactttggtcagtaaaacatttttgtaagaaatttccttttcattctttgatgccacattaacttggatttactttctaaatgtctgttttttcagttgcctctttttggtagcggaaattgttagggatgattcaaccattctttaatcctgctgtgagcatagtttataaaagtatttttgtctaggaaattcagtgtgccagtaatttgataaaataggagaaaagggcccttgaaatgcttacattatttccacatggctcatttttactgatttg

SEQ ID NO: 111751 - DNA, 237 bp, Homo sapiens
cagaagtgcctggcatgtgtggcttgaatgaacaagggactgttttgccaacccattgtgcaagtattgagtccctgcttatggaggagggaaactgcagatcagagagccagtgactggcccgagctcgagggcggggctgggatctggcaaagcctcagtctctgacctcaaggctcaaatagactgtgggctcctctgcagcctcctcaatgcctggtccaggtctgggacccc

SEQ ID NO: 111752 - DNA, 260 bp, Homo sapiens
tggaaatagtctcccagttgaatttaacaccccttgtgactatacttttagtaatcttttttagctaattagctctttgctttgtcaagtatttattgagtgcccactctgtgtgcgagcatggtgttaagcacttaatataaaacagtgactataaagatgtgtgactcctgccttcatggggcatttaattcacacccccccaacaattttttaatagcgcttttgaaaacattgcataaagtcagatatatatatat

SEQ ID NO: 111753 - DNA, 255 bp, Homo sapiens
agtgtaatgctattgccacagtcttataattttttaaaaaaatgtatctttgaactgtgttttgtaagcaaagttggatggggcaatggaccacatgcatgaggagaagcactatgtgcaatgtgcatgccccaccattcctggccttcccactcacatatgatgtctcatgatcacagaattccagtggactcacaatgcatgggagttcagcaagactcaatatgagtaccaggtacatgtttcaccttagag

SEQ ID NO: 111754 - DNA, 672 bp, Homo sapiens
atcctgaagagacttaatgactaaatataatgtggtatcttgggtgggatctgggaagagaaatcactcctataatcccagcactttggaagtccgaggcggtggatcgcctgaggtcaggagtttgagaccagcctgaccaacatggtgaaaccccatctctagtagaaatacacaaaattggctgggcatggtggcggtgtaatcccagctactcgagaggctggggcgggagaattgcttgagcctgggaggcggaggttgcggtaggctgagattgtaccactgcactccagcctgtgtgacagagggagacttcgtctcaaaaaggaaggaaggaaggaaggaaaaaaaaaaaaaaaaaaaaaaaaaaaacttgttgtggggggccttgggcccttggaaaagtttttataaaccatttggggtgggggggggggccccagtagggaacagcgacacgggcactaaggcgggttcccaaaggggaaaactcgggcgcacagcgacaacggcgcgggagattccacgacagaataaaaaagaccgcccggggggggcaacacgaagggcgttcgagaacaaatcgcggacagggcgtcccagggggacaaacgggggactctacacaaggggggtgctcaagggcacgtccagaattacaaataaccg

SEQ ID NO: 111755 - DNA, 316 bp, Homo sapiens
ccaaaatgccaattttttgccagtttttcatgtacatttcctttttatattccctgtgtcactgcctcagcttagtttttaatcgtctccttcctagctcatagcattggttccttaattgtttaactggatgatgccagtgatactgttcttaatttcattctcttggtgaggttcttaacggtaaccattgtgtaccttgtttgtcctcataatgtttagctactctgatttgtgattctattctagttgacctcacattctattttgaaatagtttttaaaagaatcataaaaaattagggaacttagtattt

SEQ ID NO: 111756 - DNA, 1191 bp, Homo sapiens
ctgatctggtagggctgccagagcaaagtaccagcaagtaggtggcgaaagtaacagaaatttattttctcatggttctggaggctggaagtcccagtcagggtgtcagcagggttggttgcttctgggagatgtaaagagaggagttatccccggcctctctccttcgcttgtaggtgaccgtctcctcccaacgtgtcctcacgtcatcgtctctctgtgcatgtctatctctgtgtctgtttatatagtcagcagtcatattggattagggcccaccctaatgacgtcattttaacttgattacctctgtaaagaccctgtcactaaataaagtcacattctgaggcactggaagttaggatttcaacatataaattttgggaagaagtagtttggcctgtaacattaaggggcagagtaatcagagtgattcagaagtcaggtaaacagaaccagggtacacagatttctgaaaatgggaaaaggggagacagcctaagtaaaacatgaaacataataggctccatggcagctgcaggagtggagcagagcgaagaaaacagggctagcaagcatggggcactgggaaagatgcctctctcatattcatggtgtggtggaaccagtgtggcttcagtaaggcctatacatccctctgtctgtataactctatgaccctgagtcattaaagccattatatggacttaaattgtaatacaaggttgggagtctccaaacagaagagcttatttcctaaggaagcatctttcttcatggcctcctttaaaaacgggagatcgatcatgattggtttcagatggtcaatgcttggcagtatgacacagtctggacaacacccgagtaatccttcaatatatattatttagtgatcctatgagcattcagggcaatgaaaggagcgatttaatcttaacatgcgtgcacacacaaaagcacaaattaaaatgtctgtgacagacttccagttatattaatgatggaagaacctatcttagactaactctcctgcagatagctgttacaaactctggacaaaatacttttgttaaaaaaactattcatagtctaactaaaagaaggcagagaatgtaggaaatttgatccttgaaagagggtcatttgatccttgaaagagtgagaactatgtttatatagcttctcccatga

SEQ ID NO: 111757 - DNA, 849 bp, Homo sapiens
gagattatgttgatcttgcttaccttttaattttcagtgcctaaaacaatgcctggcacagtagcattccatacatttgattgaataaataaatttgtttcttcatcctttacatgttgtctttgccagtgttaccttttttattttttgagacagagtctcactctgttgccaggctggagtgcaatggtgcaatcttggctcactgcaacctctgcttcccaggttcaagctcttctcctgcctcggcctcccaagtagctggaattacaggcacctgccaccatacccagctaatttttgtatttatagtagagacagggtatcaccacattggccaggatggtctcgatctcctgaccttgtgatccaccttgcctcggtctcctaaagtgctgggattacaggcgtgagccactgtggctggcccagtattgcctttttattgtaagatatagaaaggtatttatttgttcatttataaaaaataagacatggtctctgatctcaaggaatttaaaatctggttaaaaagacaagatatatatgcatgaaaaattaaacactcttgatgatacaagaaaatgtgtatcgagtatcaaatgaatagtatggactgtgagtgctgtgagaatttaggagagaggatcatagtgggccaggacaggggaagaaagctttgttgcccatgtgggacctaaattgagtctcaagcgtgagtgggattaaaatagtcagatatgatgaaaggtattccttatagatttcaggtcatggggtagaaagtgtgagcaaagatggagacaactcagcttttttttggagttggggtaaaagctgaagaattca

SEQ ID NO: 111758 - DNA, 313 bp, Homo sapiens
tctttttttttgagacagggtgttgctctgttgcccaggctggagtgcagtggtgggatcaaagctcactcactgtagcttcaaacacctaagctcaagtgatcctcctgccttagcctcccaagttgctgggactacaagtgcccactactatgtctggctaattaaaaaaaaattttttttttaaagatggggtcttgctatattgatcaggctggtctcaaacgcctggcctcaggcgatccacctgcctcagcctcctgagttactgggattataagcaagagtcacgtcacccagcgtatttggtttc

SEQ ID NO: 111759 - DNA, 743 bp, Homo sapiens
ggctgactagtttttcctcctgaggaaagaggagaaatttgattgcaatgcatcgttggactttacaattttcttgacatctgtttctgcaaaagaatgtgtttaaagggtgttatattcttaaaagtgcctaggatggctacataaaatgtttagtaaaagcactgcctgtataaatacatgtaagacctttcagttacatactcagacatgtggagtaaacttgatactattaatagttttctttgactctttataggtgtcgattttgcttgagaatattgaaggtcttgacagaagttgtggatttcagttttaacaaatgtgttttaagtggaagagcattttcctggtcttgtccctccaatttgagaattagaaatgccatgtttatgattattcagctgtatttgttgctaacttgtaaagcaatacaaacattttttggtctgtttgactgaatttgtcccacaactcattgttgctctgttcatttttttccaggtttcttttttctttctgtgtttcattttggatagtttttattgctatgctatgttttcaatttgtctttttatttttggcagcatcctgtctggtatttaactaattcagtgaaattttcaatctcagacattttaaaaaacctttagaactaagttcaaattgagtctttaaaaatacgtttatgctttcctctactttcttgaacatataaaatatagttataatagcagattcaa

SEQ ID NO: 111760 - DNA, 332 bp, Homo sapiens
caacattgcacgaaggatccagtttccccacatccatgtcaatacttgttaaactttctttttttttttttaatttgccagtagcctcataatgagcgtgaggtagtatctcattgtagtgttaatttgcatttacctaacaattcgtgatgtggagcatcttttcatgggcttgttggctgctgtgtctcttctttggagaagtgtctgttgaagttgtttgacattttttaatcaagttgttggacaggttcccttgtttttaagtcagagtaggtgatgtttgtcttgaaggttataaaaagagaacatgtttgctatgacatgtagtt

SEQ ID NO: 111761 - DNA, 459 bp, Homo sapiens
ttgtttcctaagatgtgcttgtgaacagttgcctttgagaagttgaaaataaagaagcagatcagtttactcatatgtaattcaaacaaccagcaggggtatttatctggtgagctactttactgaaaagaattgaatgagttcagtttatgatacttaggttctgtttgtactttcactgagtagcagaacaacaacaacaacaacaacaaccacaacaaaaaaccctcctttttccttcctcctcttcctcctccatcccctgtaatggaataacattcgaatgccgacatcacaaacacagaggacccttcacttcttggcttgccactccctgcctgtcacatgccttctggtttgactggagtaatcctggtagaatccacgtagctctgaagagtgggtattctgaagagcgcaggttctttgaggggatgatacatgttcagttgctctgtt

SEQ ID NO: 111762 - DNA, 376 bp, Homo sapiens
ttcctctgaatgtaaccctttgcttttgaatttctgagtggtagatccattttaccatctccttacagtattagtacccataaagacattacctgtgattgagtctctttgatcaagggctgtaaacccatccaaggtgagaatgtaagggtgggaaaatccatttttctgtgacatcaggaccaaataactgcaaaggaaaggtgcccaaatatattaaatattgtcttagtgacttttactaaaaaacataactgtgagatggagttctgctcgagtactgtcaggcacttaatatattccaaataaatatggctggagttagattgactgaacttattcacagagggagagagtttggaagtgacttactgat

SEQ ID NO: 111763 - DNA, 573 bp, Homo sapiens
tagagctgttggaggattaagtgatgtttaatctacacatggctcaatgccagagaaattcagcatttaaaaaatttccttagaagtttctttttcttttccttcaagaattgttgaggataggaggaggtcatattgagagtttgtcatctcgtagaataatcagtatgagattagaaaaggtagaggttttttggattagaggcagtttagaaattgtgtgactggcttattattaatcgaattagcagtttctgttttctggtttccccatcatttcacctgctactcagccgtaaaagtttatttttgattcaaatgcagagattgagttttgaaacaaatctagattagtaaacatctatacttatatatagatttataaaatataaccagattatctaaaacttataaatgcatcttaaaattttttctttcttttacaggcaggaatttatacgtgcatgtttaaaggcgatacttttcaaatgccagacttcctcagcttgtgctatacttcccgttcacacactgccgtgtctttgctatgccctcccatacaccaaaaaaaaa

SEQ ID NO: 111764 - DNA, 374 bp, Homo sapiens
ctctatgggggcatcagcattgccaattcccagatcagcagactgagtctcgggcgggagacctcactagtccactcacactgcaggtaggtggcggagccaggatcacactccagcctgtctggctctgaagctcgtggtctgcacaccgccaggctgactcctgttcccaggcagtgggtgtgtgtggtgttcgcagggcactggctacaggcctaggttggatgcagagtcggtgtacaggagcttggtgccgagctgggctgggagccgtcagccatggcctgggcgctccgcactgcttccttcatctccgctgggacacgggggctgtggggcaggtagacagactgggattcggatgcctgtgttct

SEQ ID NO: 111765 - DNA, 2518 bp, Homo sapiens
ggcagccagaagcacctgtgctcccaggataagggtgagcactcaggatgactgtggagaaggaggcccctgatgcgcacttcactgtggacaaacagaacatctccctctggccccgagagcctcctcccaagtccggtccatctctggtcccggggaaaacacccacagtccgtgctgcattaatctgcctgacgctggtcctggtcgcctccgtcctgctgcaggccgtcctttatccccggtttatgggcaccatatcagatgtaaagaccaatgtccagttgctgaaaggtcgtgtggacaacatcagcaccctggattctgaaattaaaaagaatagtgacggcatggaggcagctggcgttcagatccagatggtgaatgagagcctgggttatgtgcgttctcagttcctgaagttaaaaaccagtgtggagaaggccaacgcacagatccagatcttaacaagaagttgggaagaagtcagtaccttaaatgcccaaatcccagagttaaaaagtgatttggagaaagccagtgctttaaatacaaagatccgggcactccagggcagcttggagaatatgagcaagttgctcaaacgacaaaatgatattctacaggtggtttctcaaggctggaagtacttcaaggggaacttctattacttttctctcattccaaagacctggtatagtgccgagcagttctgtgtgtccaggaattcacacctgacctcggtgacctcagagagtgagcaggagtttctgtataaaacagcggggggactcatctactggattggcctgactaaagcagggatggaaggggactggtcctgggtggatgacacgccattcaacaaggtccaaagtgcgaggttctggattccaggtgagcccaacaatgctgggaacaatgaacactgtggcaatataaaggctccctcacttcaggcctggaatgatgccccatgtgacaaaacgtttcttttcatttgtaagcgaccctatgtcccatcagaaccgtgacaggacaggctcccaagctcactctttgagctccaacgcttgttaaacatgaggaaatgcctctttcttccccagactccaggatgactttgcacgttaatttttcttgcttcaaaattgtcccacagtggcattctggagtccgtctgtcttggctggaaattctctgacgtcttggaggcagctggaatggaaaggagaattcaggttaaagtgggaggggtgggtagagaggatttagaagttccaattgccctgctaaggaggatcaagacccgtaatccggcacaacaccctggggttttccactctttcagagaaacctcagcttcatcacatcaaagttactccagagcaaccaagcaattctcctgatattgtcatccagggcttttcttggccaaaccccctagaatttccatgtctctgcttagctgtgctggcagctagcagctggctgtgtttgcagtgcaaatagctctgttcttggaaatcctgctcatggtatgtccccagtggtttcttcatccacatcatctaaagcctgaacccgttcttctctggttcaagtcagtggctgacacggacttgtatctccttcagagctcggctggcacccagcctcccttctccttccactcccttagtacactggagtgccgagccctgccttccacccagcgtccatccagcccctgtcctcacctctccggcacctcctcctccttctgcatttcctatcttcctgtgtcttgtgcatgggaagcagccttcagtgccttcatgaattcaccttccagcttcctcagaataaaatgctgcctgggtcaaggacaaaaaaaaaaaaaaaaaaaaaaaaaaaaaaaaaaaaaaaaaaaaaaaaaaaaaaaaaaaaaaaaaaaaaagacaaacaaaaaaaaaaaaaaaaaaagaggagggggcggcagaaaaacactccccagggggaggcaataaaataacgccagccacgatgtatagaaaaacaggagcggccagcaccaacaagggagcggtcattatattatagacacaaacgaacgaggcgggacgcgataacaaaaaacacagcagcagaggagcagagaacagaaaacgcgacaacagagaggagcaacaatggtgaaagaagcagaaacacacacaaaataaggggaggagagacagaaacagaggcgcagcgccccccccccccccaacctggattttatggtcgacagggggagataacgacagacacagaaatagagaagggagaaagagagagtggaggacaaaaccaacccccgcccacccccgcgacagacaaaaaagaaaaaaaaagaaaaagaagaggagcaaggagcaaaggatgagctaagagatagataagtgagaagaagacaaatactatcatcgacacggagagcgagtaggacagcggagtacacacagtaaaagaagaggcagaggcgaagcagactact

SEQ ID NO: 111766 - DNA, 1869 bp, Homo sapiens
ggcagccagaagcacctgtgctcccaggataagggtgagcactcaggatgactgtggagaaggaggcccctgatgcgcacttcactgtggacaaacagaacatctccctctggccccgagagcctcctcccaagtccggtccatctctggtcccggggaaaacacccacagtccgtgctgcattaatctgcctgacgctggtcctggtcgcctccgtcctgctgcaggccgtcctttatccccggtttatgggcaccatatcagatgtaaagaccaatgtccagttgctgaaaggtcgtgtggacaacatcagcaccctggattctgaaattaaaaagaatagtgacggcatggaggcagctggcgttcagatccagatggtgaatgagagcctgggttatgtgcgttctcagttcctgaagttaaaaaccagtgtggagaaggccaacgcacagatccagatcttaacaagaagttgggaagaagtcagtaccttaaatgcccaaatcccagagttaaaaagtgatttggagaaagccagtgctttaaatacaaagatccgggcactccagggcagcttggagaatatgagcaagttgctcaaacgacaaaatgatattctacaggtggtttctcaaggctggaagtacttcaaggggaacttctattacttttctctcattccaaagacctggtatagtgccgagcagttctgtgtgtccaggaattcacacctgacctcggtgacctcagagagtgagcaggagtttctgtataaaacagcggggggactcatctactggattggcctgactaaagcagggatggaaggggactggtcctgggtggatgacacgccattcaacaaggtccaaagtgcgaggttctggattccaggtgagcccaacaatgctgggaacaatgaacactgtggcaatataaaggctccctcacttcaggcctggaatgatgccccatgtgacaaaacgtttcttttcatttgtaagcgaccctatgtcccatcagaaccgtgacaggacaggctcccaagctcactctttgagctccaacgcttgttaaacatgaggaaatgcctctttcttccccagactccaggatgactttgcacgttaatttttcttgcttcaaaattgtcccacagtggcattctggagtccgtctgtcttggctggaaattctctgacgtcttggaggcagctggaatggaaaggagaattcaggttaaagtgggaggggtgggtagagaggatttagaagttccaattgccctgctaaggaggatcaagacccgtaatccggcacaacaccctggggttttccactctttcagagaaacctcagcttcatcacatcaaagttactccagagcaaccaagcaattctcctgatattgtcatccagggcttttcttggccaaaccccctagaatttccatgtctctgcttagctgtgctggcagctagcagctggctgtgtttgcagtgcaaatagctctgttcttggaaatcctgctcatggtatgtccccagtggtttcttcatccacatcatctaaagcctgaacccgttcttctctggttcaagtcagtggctgacacggacttgtatctccttcagagctcggctggcacccagcctcccttctccttccactcccttagtacactggagtgccgagccctgccttccacccagcgtccatccagcccctgtcctcacctctccggcacctcctcctccttctgcatttcctatcttcctgtgtcttgtgcatgggaagcagccttcagtgccttcatgaattcaccttccagcttcctcagaataaaatgctgcctgggtcaaggac

SEQ ID NO: 111767 - DNA, 327 bp, Homo sapiens
ggcaagtcgcttcacctctgttccatctggatcaaatggggatcatcatcctgcctagcacgttgctgggaggatttgagagcagagcggccggccttggccagattcgtgggtgtgcagtgaatcctggcttccttctacaccagccaccccaagtctcccatgctgggaactccagccactgttgaagccccacacatggcaggagcttcatgaacactttgtcgggctcctgcctgtaatcctagcactttgggaggccaaggcgggcagactgcctgagctcaggacttggagaccagcctgggctaaaccctatctctacaa

SEQ ID NO: 111768 - DNA, 2271 bp, Homo sapiens
  misc_feature (984)..(984): n is a, c, g, or t
aacaatttaggggggaaaataaaaatgaaaatgcattctgagttacataagagcatgtttactcttcacaaagccatatttatttatacttccaccaaaagccattttttttaagtctgtagacatatgataaaggacttttagtggacttggaagcatttttcacaatgggctagaatactgaggttgaatgttatgtaggaaacccacataatataaaattattttacacttgaaaaagaaaacaatatgttgtacagtatagctataaacaaatagcattggtgggtctgggactagttaaaattatgaagcaaagtttatatctacaatcaactatcccttgggactcctcctcagttttgcttaactctctcattctgcttcccttttttctgccctgatattcagtgcttttatacggcccaccctatagacatttctttactttcttgtgacatgaattggaataaattacaaataaccctaaatgttctttgcctttctccttctttaaattttaaacttattccacattttagctttttaagatcagacataacttccaaatagaagaaaccatgtttaaaaaaaaatccatgctttttaatcattttcttatgtaaaaagcctcaagtggctggaataaggtctaagtaacaaataaagaactaaacttttcagataaaggctccgaaagtccctcttgttttcagctttcaaaattctttctctctctctatcaatatatggttcacgtgtaaaaatgtgcttacctgtgtagggatgaaattaagactgtctgtcatctactcctcacaaaaggaaggaagtgagattattgtcctactttttccttatcttttctttttttctctgttggaggtataggatcaaccctcatcccttttgttaaatataaatgaatcatttaaaaggttaattattgtaggtaggtaacctgatgcgttaacctaattgcantacccagttgaagaaaatctgatatataatttaccagtatggcaggtttttttggttttgtttggatttttgatgttttttgttttttaattttcctttcaggaccatctttttcattgttctccagagtgtaccttataggtagctactcactctccaaataggtaaaactcccctcaagctatggatgtcaaagatagtaatctatccatttaatcataagcttttcttccagaagttactgaatgaaagaggattagaagatggtctgtgtagcaaaggatttgcttacattttgggccagtttgcttacccgtgaagcaggcatagtaagacttagacccacctcatgaagttgttgtacggatcaaatgagattttaaaaaagcacgttgaagttggtaaagctgaatgtgcttgcaaagcatgacatttacaactgaaaatccaatttgtgcttttgtgttcgtacctggagaaatcacttagcttttcaggtctgcagttttctcactcagattcgaaaggtcccccatcgatttaaaaattgtggactttggccagatgacctcctgaggtcccctgattctgtagttgtaaatgtcctgtgtaaatcagggaagtaattcatatacaagcacagtatactgaggagaagttggaagccaggtatcatgattcctggctgaggactaggctacgtgttcactgaatgagactgcccaaggcttaccagagattagatgctacagaatgagagtggaattgtaatattagagatagagccgtggggaatctggagttccaacccagtcaacatggagaaatccttgttaacttcagttatctagctgagataacacaaaagataggtttgaggaacaaggaccatgctctaatataaggcctactctagacccaggctaagactagtaaaagaaggccccaattaattcttacagggtagaccaaatttggacaatgagtctcaccgagatagagaagcctgggaaatatcctgagctttcagcagatcagcataccaaaggttaaatccaaacctatacaagttcaaggagtcaactattaactgacttatatgtactagaataaaaatcactgctcctcagaagaaattaacagaaccatatttgcaatatatcccatgttgaacttttaattaccagacatgcaaagaatcaggaacatatgatctatagagcagaaaagagcatgcagtagaaatcacctctgaggagtcctatttggtttaacagaaaaaaaaaa

SEQ ID NO: 111769 - DNA, 2217 bp, Homo sapiens
  misc_feature (984)..(984): n is a, c, g, or t
aacaatttaggggggaaaataaaaatgaaaatgcattctgagttacataagagcatgtttactcttcacaaagccatatttatttatacttccaccaaaagccattttttttaagtctgtagacatatgataaaggacttttagtggacttggaagcatttttcacaatgggctagaatactgaggttgaatgttatgtaggaaacccacataatataaaattattttacacttgaaaaagaaaacaatatgttgtacagtatagctataaacaaatagcattggtgggtctgggactagttaaaattatgaagcaaagtttatatctacaatcaactatcccttgggactcctcctcagttttgcttaactctctcattctgcttcccttttttctgccctgatattcagtgcttttatacggcccaccctatagacatttctttactttcttgtgacatgaattggaataaattacaaataaccctaaatgttctttgcctttctccttctttaaattttaaacttattccacattttagctttttaagatcagacataacttccaaatagaagaaaccatgtttaaaaaaaaatccatgctttttaatcattttcttatgtaaaaagcctcaagtggctggaataaggtctaagtaacaaataaagaactaaacttttcagataaaggctccgaaagtccctcttgttttcagctttcaaaattctttctctctctctatcaatatatggttcacgtgtaaaaatgtgcttacctgtgtagggatgaaattaagactgtctgtcatctactcctcacaaaaggaaggaagtgagattattgtcctactttttccttatcttttctttttttctctgttggaggtataggatcaaccctcatcccttttgttaaatataaatgaatcatttaaaaggttaattattgtaggtaggtaacctgatgcgttaacctaattgcantacccagttgaagaaaatctgatatataatttaccagtatggcaggtttttttggttttgtttggatttttgatgttttttgttttttaattttcctttcaggaccatctttttcattgttctccagagtgtaccttataggtagctactcactctccaaataggtaaaactcccctcaagctatggatgtcaaagatagtaatctatccatttaatcataagcttttcttccagaagttactgaatgaaagaggattagaagatggtctgtgtagcaaaggatttgcttacattttgggccagtttgcttacccgtgaagcaggcatagtaagacttagacccacctcatgaagttgttgtacggatcaaatgagattttaaaaaagcacgttgaagttggtaaagctgaatgtgcttgcaaagcatgacatttacaactgaaaatccaatttgtgcttttgtgttcgtacctggagaaatcacttagcttttcaggtctgcagttttctcactcagattcgaaaggtcccccatcgatttaaaaattgtggactttggccagatgacctcctgaggtcccctgattctgtagttgtaaatgtcctgtgtaaatcagggaagtaattcatatacaagcacagtatactgaggagaagttggaagccaggtatcatgattcctggctgaggactaggctacgtgttcactgaatgagactgcccaaggcttaccagagattagatgctacagaatgagagtggaattgtaatattagagatagagccgtggggaatctggagttccaacccagtcaacatggagaaatccttgttaacttcagttatctagctgagataacacaaaagataggtttgaggaacaaggaccatgctctaatataaggcctactctagacccaggctaagactatctcaccgagatagagaagcctgggaaatatcctgagctttcagcagatcagcataccaaaggttaaatccaaacctatacaagttcaaggagtcaactattaactgacttatatgtactagaataaaaatcactgctcctcagaagaaattaacagaaccatatttgcaatatatcccatgttgaacttttaattaccagacatgcaaagaatcaggaacatatgatctatagagcagaaaagagcatgcagtagaaatcacctctgaggagtcctatttggtttaacagaaaaaaaaaa

SEQ ID NO: 111770 - DNA, 429 bp, Homo sapiens
catgtccagctaattttgtatgtggagataacgcttttgccatgttgcctaggctggtcttgaactcctggcctcaagtgatcatcttactcagcctcccaaagtggtgggattacaggtgtgagccactgaacctggctctgtgatctattttgagttagtttttgtgaagagtgtgagggctgagtctagactggttttttgcatatggatgtttagttgttccagcactctttgttgaatagactgtctttgctccattgtattgtctttgttactttgtcagagatcagttttctatgtacagatgtattctgggctattttgttccactgatctatttgttctttcactaataccatattgtcttgataactgtagctttttaggaagtcttgaggtcaagtagggcaaatcctttcactttgt

SEQ ID NO: 111771 - DNA, 451 bp, Homo sapiens
aaactactaacacagaatgtccgtgcttttggactttcttcctcccagactgtatcacgtgtattctctcatttgatgtctcaattatcctgtgcaggaggtagggctgatgttgaggtttagaaaatttaagtgacttgtgcaaaccccagtggccacttagttgcagagctgcaacttgcaccagagctctttccagcccccaactcttttcccacttctacaaccgcccctatctcctccagtggcttctccttcagccgtccttgagaaagactcagcagcagcagctcagccacctgtgagtctgcagcactggctctcaccagctctgtggctcacatcacagtggttaagtgttcactgaccacttggctgtgttacaatcatttaattagtctgtgtcacagaggaaaagatgctttatttagaagcctaatagtgaaaactt

SEQ ID NO: 111772 - DNA, 3311 bp, Homo sapiens
caatcaggagcgcagcttgagaggcggagggggtttccgggatctggcggggcctttgtcttgtgctccagctggagctttggtcccgtattctcggctatttatccccagctgcgggaggccctggtgactctgctgctgcagtgtctggtttccctgtgacctgcaggtactgggagttacatagctaagatgccaggacaccccgaaagccggaaaacgagacgcattctcactatgttgcccaggctggtcttgaactccttccctcaagtgattcttctgcctaatcctcccaaagttcttagattattactcatgaatggattggtgttcttaccactgcagttagtgtgttctctgttagttcatgtgaaagctggttgttaaaaacaaaaacaaacaaacaaaaaactgatattcctcttgctttgtcttttgccatgatacccctttgccttttattatgcataaaagcttcctgaggcctcatcagaagttaagcagatgttgatgtcatgcttgtatagccaacagaactgaggctaataaacctcttttctgtattaatttgccagtgttaagtattcccttctagcagcacaaaatggactaacatcccataggttatatttttatttttttcttttgtaaatactggacaatgatactcttatataatcttcagtataaccattataattgcccactataaaggagtataatgaaaggccatgtattttgaatcacgaatgactatttacaaaatgtcatactacgtttttctttgagcctgtgacccctctggcctgtaaaaacacatacatacatttagttttgattaacatggagttaattttaagtctgtcactctaaacataagtgttagctttaagagaattacagagcatgtaattgtgtttgagtgtaggtgtgtacttttttgagaagaaaacaaaaatattggaacaaaatataatttaaaaagtattggtaatttactagcaaactaggaatctcaaagattctgaaagtaaatatttattctctgctttgtattgaatttacttctgtaaaatcttatggctgctggctcagaatcttctcatgcaaatcctgtttttttcttgtctgttgatcatactaaacctaatgtatagttttctcattccaaagttcatgaaattttctctatattcctgagaaattctaagaataactttcataaaatgtattgatgttcacaagataattttaagatgtaattctacaatatgtgtgttactacattttatttaattagtatattttatttttgtatttcaattggagaaccctattttggccaatttttacttggtttttgtttccattttaatattttacataattgaatttttttcactttattgagccattttgtttagatgtacactgggaaggcttcataattcacaaagttgttttgacatataaatgaggtgaacaaacacaggaaagtgctaggtttcctgggggtataatagatgctctataattagcagtaaatattcttgtttaagtcactttttggctacaagtaagagattagaaatattcagcataaagagatggcattaactctgcatgtaaagaaaacacatgtatacccaggctgtacaactgcctctgaaattaagaggaattgtgtttatttcatagttatctctggtacttcactgttattttattttcacccccaactatgcgtcaatcatagccctttcccttctttgcttattatggctacagatttctcactgttctctgcagcccatgtaatttcatacagtattttgtaggttgtgataaggaatttgaaatttttaatatagtgaaaaattggatttaactggagagtttgaggacatttttaagttagaaatgcaccatttgaatcatttaattggcataattgggatgtactctacacagtttataggattaaattactgagttagtaatgtttgtatgaaagaaatgttattagattctaccacaaaatatagtaaacatgaaatcagttagaataggtaaagcattaataatggtaggctatatatcataatcactatataaagaaacatcagaatttggaaaccccttaagcaaaaatatatcttagaaatcttaaggacacttaatggcaagcaaaaaagtttaaatttagttttttataaattacatatagcacaatttatgtgtacatgtagaatcttttagtttttagtgtttatgtaatatattagacaataataaacatttacatttatgtttacatttatatttaatttttcaaatttaatttaaatttctaaatgcttctgtggatttaaattttggaataatcttttcttccccattgatactggaatcttgggaagtttcttactcatatcacaatatgttttatttaaatggatgcagcttacattgcagagtttatataaataatcacataacaagccaattccttagtcattttctgtattaaaaaactcagagatctagagagcttttggattgaaatatttccttggtgattttggatgcaaacctgatttctgtgttcacaccatggccagagatgggactgttagcaccacctgcttctttaatgtcgtccatatgatcagcatcagcaccagaaactccaggtgtcccaaacttaaagtgaaagccatagagtcctttggtgactcccatgttctgtgctggttctagaacatgctggtaaatatcagagtttctatgcttatggctgataagtagacatttttaaaaatcataaaaactgtattttctatatagttcagctaagtttatgaaaaagatgcagactcagtatttggagcattgctatcgctccatgatgtgtttaaaaattatttttaaattgacaaaattttatatctacatatatatatatcttgtaacacatgatgtttgaaatgcttaattctagccaattaaaaatgctttacctcaatagttatttttattgtgagaaaggtcaacatggtcttggcacttaaaaaaaaaaaacaatatattctcaataactgtattcactctgcactacaataggtctcttgaactaattcctcctagctaacaggcattgtttatcatttaacagataattctctaagcccccttctcctaaaacttcagcatctcttaaccttctttctagtctctacttttatgagatcaacttgtttagattccacgtgagtgagaccatgaggtattcatctttctgtgttctg

SEQ ID NO: 111773 - DNA, 3331 bp, Homo sapiens
tttttagaatgcaatttcttttcataaaacaaaattatttttaatgtgttaagaatattttgcattgaatgaagtatatcttgccacaataattaacctataccaccttacccaaagttgtaggtaacagatagtaacaatacactactgggtaacagtgaaaggacacctctagtaatctcttttcccagtggcttttaatttcaaacaacttggggaggttttttttatgtgatatgctttggtttttttgtgccttacctcatgttgaaatgtgttcccccatgttggaggcggggtctagtggaaggtgtttaggtcatgggtgtagattactcatgaatggattggtgttcttaccactgcagttagtgtgttctctgttagttcatgtgaaagctggttgttaaaaacaaaaacaaacaaacaaaaaactgatattcctcttgctttgtcttttgccatgatacccctttgccttttattatgcataaaagcttcctgaggcctcatcagaagttaagcagatgttgatgtcatgcttgtatagccaacagaactgaggctaataaacctcttttctgtattaatttgccagtgttaagtattcccttctagcagcacaaaatggactaacatcccataggttatatttttatttttttcttttgtaaatactggacaatgatactcttatataatcttcagtataaccattataattgcccactataaaggagtataatgaaaggccatgtattttgaatcacgaatgactatttacaaaatgtcatactacgtttttctttgagcctgtgacccctctggcctgtaaaaacacatacatacatttagttttgattaacatggagttaattttaagtctgtcactctaaacataagtgttagctttaagagaattacagagcatgtaattgtgtttgagtgtaggtgtgtacttttttgagaagaaaacaaaaatattggaacaaaatataatttaaaaagtattggtaatttactagcaaactaggaatctcaaagattctgaaagtaaatatttattctctgctttgtattgaatttacttctgtaaaatcttatggctgctggctcagaatcttctcatgcaaatcctgtttttttcttgtctgttgatcatactaaacctaatgtatagttttctcattccaaagttcatgaaattttctctatattcctgagaaattctaagaataactttcataaaatgtattgatgttcacaagataattttaagatgtaattctacaatatgtgtgttactacattttatttaattagtatattttatttttgtatttcaattggagaaccctattttggccaatttttacttggtttttgtttccattttaatattttacataattgaatttttttcactttattgagccattttgtttagatgtacactgggaaggcttcataattcacaaagttgttttgacatataaatgaggtgaacaaacacaggaaagtgctaggtttcctgggggtataatagatgctctataattagcagtaaatattcttgtttaagtcactttttggctacaagtaagagattagaaatattcagcataaagagatggcattaactctgcatgtaaagaaaacacatgtatacccaggctgtacaactgcctctgaaattaagaggaattgtgtttatttcatagttatctctggtacttcactgttattttattttcacccccaactatgcgtcaatcatagccctttcccttctttgcttattatggctacagatttctcactgttctctgcagcccatgtaatttcatacagtattttgtaggttgtgataaggaatttgaaatttttaatatagtgaaaaattggatttaactggagagtttgaggacatttttaagttagaaatgcaccatttgaatcatttaattggcataattgggatgtactctacacagtttataggattaaattactgagttagtaatgtttgtatgaaagaaatgttattagattctaccacaaaatatagtaaacatgaaatcagttagaataggtaaagcattaataatggtaggctatatatcataatcactatataaagaaacatcagaatttggaaaccccttaagcaaaaatatatcttagaaatcttaaggacacttaatggcaagcaaaaaagtttaaatttagttttttataaattacatatagcacaatttatgtgtacatgtagaatcttttagtttttagtgtttatgtaatatattagacaataataaacatttacatttatgtttacatttatatttaatttttcaaatttaatttaaatttctaaatgcttctgtggatttaaattttggaataatcttttcttccccattgatactggaatcttgggaagtttcttactcatatcacaatatgttttatttaaatggatgcagcttacattgcagagtttatataaataatcacataacaagccaattccttagtcattttctgtattaaaaaactcagagatctagagagcttttggattgaaatatttccttggtgattttggatgcaaacctgatttctgtgttcacaccatggccagagatgggactgttagcaccacctgcttctttaatgtcgtccatatgatcagcatcagcaccagaaactccaggtgtcccaaacttaaagtgaaagccatagagtcctttggtgactcccatgttctgtgctggttctagaacatgctggtaaatatcagagtttctatgcttatggctgataagtagacatttttaaaaatcataaaaactgtattttctatatagttcagctaagtttatgaaaaagatgcagactcagtatttggagcattgctatcgctccatgatgtgtttaaaaattatttttaaattgacaaaattttatatctacatatatatatatcttgtaacacatgatgtttgaaatgcttaattctagccaattaaaaatgctttacctcaatagttatttttattgtgagaaaggtcaacatggtcttggcacttaaaaaaaaaaaacaatatattctcaataactgtattcactctgcactacaataggtctcttgaactaattcctcctagctaacaggcattgtttatcatttaacagataattctctaagcccccttctcctaaaacttcagcatctcttaaccttctttctagtctctacttttatgagatcaacttgtttagattccacgtgagtgagaccatgaggtattcatctttctgtgttctg

SEQ ID NO: 111774 - DNA, 3277 bp, Homo sapiens
tttttagaatgcaatttcttttcataaaacaaaattatttttaatgtgttaagaatattttgcattgaatgaagtatatcttgccacaataattaacctataccaccttacccaaagttgtaggtaacagatagtaacaatacactactgggtaacagtgaaaggacacctctagtaatctcttttcccagtggcttttaatttcaaacaacttggggaggttttttttatgtgatatgctttggtttttttgtgccttacctcatgttgaaatgtgttcccccatgttggaggcggggtctagtggaaggtgtttaggtcatgggtgtagattactcatgaatggattggtgttcttaccactgcagttagtgtgttctctgttagttcatgtgaaagctggttgttaaaaacaaaaacaaacaaacaaaaaactgatattcctcttgctttgtcttttgccatgatacccctttgccttttattatgcataaaagcttcctgaggcctcatcagaagttaagcagatgttgatgtcatgcttgtatagccaacagaactgaggctaataaacctcttttctgtattaatttgccagtgttaagtattcccttctagcagcacaaaatggactaacatcccataggttatatttttatttttttcttttgtaaatactggacaatgatactcttatataatcttcagtataaccattataattgcccactataaaggagtataatgaaaggccatgtattttgaatcacgaatgactatttacaaaatgtcatactacgtttttctttgagcctgtgacccctctggcctgtaaaaacacatacatacatttagttttgattaacatggagttaattttaagtctgtcactctaaacataagtgttagctttaagagaattacagagcatgtaattgtgtttgagtgtaggtgtgtacttttttgagaagaaaacaaaaatattggaacaaaatataatttaaaaagtattggtaatttactagcaaactaggaatctcaaagattctgaaagtaaatatttattctctgctttgtattgaatttacttctgtaaaatcttatggctgctggctcagaatcttctcatgcaaatcctgtttttttcttgtctgttgatcatactaaacctaatgtatagttttctcattccaaagttcatgaaattttctctatattcctgagaaattctaagaataactttcatgttactacattttatttaattagtatattttatttttgtatttcaattggagaaccctattttggccaatttttacttggtttttgtttccattttaatattttacataattgaatttttttcactttattgagccattttgtttagatgtacactgggaaggcttcataattcacaaagttgttttgacatataaatgaggtgaacaaacacaggaaagtgctaggtttcctgggggtataatagatgctctataattagcagtaaatattcttgtttaagtcactttttggctacaagtaagagattagaaatattcagcataaagagatggcattaactctgcatgtaaagaaaacacatgtatacccaggctgtacaactgcctctgaaattaagaggaattgtgtttatttcatagttatctctggtacttcactgttattttattttcacccccaactatgcgtcaatcatagccctttcccttctttgcttattatggctacagatttctcactgttctctgcagcccatgtaatttcatacagtattttgtaggttgtgataaggaatttgaaatttttaatatagtgaaaaattggatttaactggagagtttgaggacatttttaagttagaaatgcaccatttgaatcatttaattggcataattgggatgtactctacacagtttataggattaaattactgagttagtaatgtttgtatgaaagaaatgttattagattctaccacaaaatatagtaaacatgaaatcagttagaataggtaaagcattaataatggtaggctatatatcataatcactatataaagaaacatcagaatttggaaaccccttaagcaaaaatatatcttagaaatcttaaggacacttaatggcaagcaaaaaagtttaaatttagttttttataaattacatatagcacaatttatgtgtacatgtagaatcttttagtttttagtgtttatgtaatatattagacaataataaacatttacatttatgtttacatttatatttaatttttcaaatttaatttaaatttctaaatgcttctgtggatttaaattttggaataatcttttcttccccattgatactggaatcttgggaagtttcttactcatatcacaatatgttttatttaaatggatgcagcttacattgcagagtttatataaataatcacataacaagccaattccttagtcattttctgtattaaaaaactcagagatctagagagcttttggattgaaatatttccttggtgattttggatgcaaacctgatttctgtgttcacaccatggccagagatgggactgttagcaccacctgcttctttaatgtcgtccatatgatcagcatcagcaccagaaactccaggtgtcccaaacttaaagtgaaagccatagagtcctttggtgactcccatgttctgtgctggttctagaacatgctggtaaatatcagagtttctatgcttatggctgataagtagacatttttaaaaatcataaaaactgtattttctatatagttcagctaagtttatgaaaaagatgcagactcagtatttggagcattgctatcgctccatgatgtgtttaaaaattatttttaaattgacaaaattttatatctacatatatatatatcttgtaacacatgatgtttgaaatgcttaattctagccaattaaaaatgctttacctcaatagttatttttattgtgagaaaggtcaacatggtcttggcacttaaaaaaaaaaaacaatatattctcaataactgtattcactctgcactacaataggtctcttgaactaattcctcctagctaacaggcattgtttatcatttaacagataattctctaagcccccttctcctaaaacttcagcatctcttaaccttctttctagtctctacttttatgagatcaacttgtttagattccacgtgagtgagaccatgaggtattcatctttctgtgttctg

SEQ ID NO: 111775 - DNA, 789 bp, Homo sapiens
caatcaggagcgcagcttgagaggcggagggggtttccgggatctggcggggcctttgtcttgtgctccagctggagctttggtcccgtattctcggctatttatccccagctgcgggaggccctggtgactctgctgctgcagtgtctggtttccctgtgacctgcaggtactgggagttacatagctaagatgccaggacaccccgaaagccggaaaacgagacgcattctcactatgttgcccaggctggtcttgaactccttccctcaagtgattcttctgcctaatcctcccaaagttcttagattggactactggcattcagtgatgtggtcatagaattctctccagaggagtgggcatgcctggaccctgcccagcgaaatttgtatagggatgtgatgttcgagaactacagaaacctggtctccctgggacttccaggactatgttaaaatagaagcattgataatgggcacaatatcactttgcattggtgtctgtgcatttgaaggagcaaacacctctaccagtttttataaactggtttatacagctattttatcttattccattcaagaccttttgccagagcaggatatgaaagatttatgccaaaaagtgacactgacaagacatagaagctggggccttgacaatttgcacttagtgaaagactggagaactgtgaatgaaggtaaggggcagaaagaatattgcaatagacttactcaatgttcatcaactaaaagcaaaatctttcaatgtattgaatgtggcagaaat

SEQ ID NO: 111776 - DNA, 700 bp, Homo sapiens
caatcaggagcgcagcttgagaggcggagggggtttccgggatctggcggggcctttgtcttgtgctccagctggagctttggtcccgtattctcggctatttatccccagctgcgggaggccctggtgactctgctgctgcagtgtctggtttccctgtgacctgcaggtactgggagttacatagctaagatgccaggacaccccgaaagccggaaaacgggactactggcattcagtgatgtggtcatagaattctctccagaggagtgggcatgcctggaccctgcccagcgaaatttgtatagggatgtgatgttcgagaactacagaaacctggtctccctgggacttccaggactatgttaaaatagaagcattgataatgggcacaatatcactttgcattggtgtctgtgcatttgaaggagcaaacacctctaccagtttttataaactggtttatacagctattttatcttattccattcaagaccttttgccagagcaggatatgaaagatttatgccaaaaagtgacactgacaagacatagaagctggggccttgacaatttgcacttagtgaaagactggagaactgtgaatgaaggtaaggggcagaaagaatattgcaatagacttactcaatgttcatcaactaaaagcaaaatctttcaatgtattgaatgtggcagaaat

SEQ ID NO: 111777 - DNA, 544 bp, Homo sapiens
catgtggatattaagatacagaagtcataaaatatttgtaatcttcatagtatctgtaggttaagtagtggttctaatttctgggaggaagctcaagtactccttattttgttgaaccatatttaatttaaaagaccaaccagcagttgaaaattttctattgctgtttagaatagattcatcccaactttggtagaggagtccatggctgaatattgccatgagtgaagaaagattctttctcactttcttctggaagctttgttttcatcctcctttggattggcttctgagagaccataaaaagaaatgggtgttgattgcatttaatggttcctactgtgaacaagcagtaggtaccgttcttgccctttcagtatctgcagactcattttatcagaagagtgcaactgataaactttgcataagagaaaatgtactggccaaacattgattttgcttacatacacatacttaacacgcacattcttgacctacatctatttaaaaaaaaaaaaaaaaagaacttgtatataaaaatctg

SEQ ID NO: 111778 - DNA, 814 bp, Homo sapiens
cagatatattttgctcccaaacgccgccctagaagaaggactacactgaaatgaaacggagatgattaaagtctgatttataggctgtacaagccctgaaagcaagaacggggttcacggcatcttgatacccccatgtggggacgttttggcgattttatttacaagaaagggattttacaccggagaggcttttaaatatgctaacagactggaccagctttctcatccccactggctgattaatgattcctccatgccaacccggttctcagagacaccaaggccagctctccaaagacctgggaaaaaattacttcatgtccttgtaaaaacgttttcacaaatttaagtgcaccagctttgaagcaagacagaattgggatcaagtccctgttccacccttaccagaaagtcttttcgtagctcacaaggggacatcaaagatgacaaagaggagtggaagaagacagagagaatcaatgtgaggagcctggaacagggctctgaattgtcttcccacagtgaaatcacttgtctattgctgagccaagaatttgactctgagcatctaggatgagaaagaagaactggcacctacgccatctctgcccctcgggactgactattttggtaagttcagttcacccatggaggaagtggttctcgtactttatctgcatgtaacaacaaaattcaggttcttggggctgatgcttggagattgtgattcagatctgggatggggctcaggaacctgcattttaacaatggaggttctaatgtggtcattggcaggttgttctaatgtggg

SEQ ID NO: 111779 - DNA, 706 bp, Homo sapiens
gtgtgtgatcaacgcgtacacatgtggcgggtgtgcagatgccgcccgtgcccggcacggtgtgatgtgtgtacacggcctggagtgtaggggtggcgtgtcggagccccacactacaccacagggatgagcgtgtatccccttcagaggtgtgcctggggactccgtgtgcgcgactaggtgctctcctggggctggcaggggcatctgtccctttaccggtgcaatggggagggtgcacacggttcaccagctttcgggctagctgggtaggaggtgatgctgccccggtctggcacccacttccccgggcctctcctaacccataggacagtagtgctcctggcttgtgctgcccagaggctacctggctttccctaattcaccgaccccaggattaaccccatggtggttggtatcaggggatgaggccagagccctttgagctgtgcccctcacaggggtagggtcatggcctcagccatcccggtaccatctgtgcccagccggggactgggaacctggtttctccatgaggagccatcccagggcctgcaggagggactagaagccagaggactctgaggctccgcttcctggggactgcagggggatcagaatgtcccaagcttgggacagtctgggaaggcagtggccatcccatccagatgagtacatccctctctccttgcctacttccctccta

SEQ ID NO: 111780 - DNA, 480 bp, Homo sapiens
tgtagttgagccacagctcttgtatattctgttctgggtaggttttcttttttttcagtcttttttctgtttttcagttttggcagtttctattgagatggcttcatgttcagagattttttccttcagctgtgtccagtctactaagaccatcaaaggcattcttcatttctgctacagtgcttttgatctctaccatcttttttggtaccttattaaattatctatctctctgcttacattacctattggtcttttcatgctatctactttatgtgttaaagctcttagtaaattaatcatagttattttaaattagtggtctaataccaacatctctaccatatcttgaatttggttctgatgcttgtactgtctcttcaaactgtgtttttccttttagtatgcctcgtaattttttcttgataactggacataatgtactgggttaaagaaattgctgtgatgttcctttagtaa

SEQ ID NO: 111781 - DNA, 453 bp, Homo sapiens
taaagtgaagggatgcaaactgtagtatgtaaccttgtttgcttcaggtttgtggctatataactcccctcttcacattgttgttgtaaagaaacaatgtaagaaaattgttggaaacatttgtgtggatgtttttgttttttgtttttttaagatagggtctcactttgtcagtcaggctggagtgcagtggcacgatcacagcttactgcagcctcaacctccccttgctcaggtgatccttccacctcagcctcctgagtagctgggactataggcgccaccacgcctgctactttttggatttttagtagagacatttgaaacaatagagcagagtagtctttctgtttggagtctgtactaatgaactgcaatacatgagggatctaaaacattttcctgtaaccaatactatttccatttgacaacccacttaatttttaaaaagca

SEQ ID NO: 111782 - DNA, 306 bp, Homo sapiens
gccttgctgagatggaaagggtcaaagtggacaggagaggaagaggagacccaaatttataagatgagagaagaatttttaccctcagcaaactgcattgttgtcctaagagcagcatatgggcctaggtgctggtgttgtaagtccaggaggaactttagtatggaaggcaccaaggtgtaccaactctactcccaatggtgcccacaggccaagagggcctgaatagtaatcatctttcctgccaattatcactaaagccacaaacagttttctcagaagtgagatcatctgatcacaacttaa

SEQ ID NO: 111783 - DNA, 435 bp, Homo sapiens
agccgggacacagtggggaggctggaatcacagtaaggattaagagacatagctgatgactccaacctagagtcagggtttccctgagaactaagagctggaagtgtgagatgagatcctatagacggaagggcccagttgaaagaagaaaacagggctttgctggcagtctttggagctctcatcaccacaagggtgacaccagtatggtgactaaacttggcttggagattgctgatccagttggtggcccctcacagtgctagcctggggctttgcacatagtaggtgatctatatccctagatggctgctggtcccatgtgcttgccctcattctcaatcacctgacctttccttttcatgcacattcagagtaagttctttaagtgtgaaattctctgagtaacacaatcccagctcccacagggcaagg

SEQ ID NO: 111784 - DNA, 753 bp, Homo sapiens
acaatgggggatcatttttatatgtggtatgaatttggggcctgtattttctccaagtgtttagccaattttcacaataatgttttttaaataatctaccattttctcaatgatctacttaccaagttcttatatacacatggatttgttttagatcctattttattttagattctattctattgtctatttggcatttttagtgtcagtatcacactgaattactagagcttagtaatataccttaatatctagtaagatatttcccaacctctctcttctttttatgaactgttttagctatttgtggatttgcgtgtgaccaattcacctctattggattttttattttagttacattaaatttatattttaatttaggaagaatttatatctttatgttaaatcttccttccacaaatctggtatttctacctaatcagttctttttttaatgtcccttaataatgctttaaaatgtcttccaaaataatttttgcattttaggtcagtttatatatatatatatatatgctattgtaaacagtatcttatcgtctattatattttttaacggctgttggtgtaaaataagtctatttatcattacgtactgatttgtgctcagcaagcaaactgaactctctttttagctttagtcatttgtctgttgattctcttgagttttctatgtacttaaatcatctacgcgtactgacagttttgtctccttccttatagctttatccctta

SEQ ID NO: 111785 - DNA, 1025 bp, Homo sapiens
aggaaaggagggcgttgctagcctctagcagtgccgcgtttattctaagatgtgggagattcttttccttgcaacagtttttgtcatctgcattcttccaaggcttttaaggtgcattttcttctgtgtgaaaggaaattctttgtccttttcctctcagcaccgtggcttcccaaggtagacactattttgtgcctgtcacagagagagggagtgcaggtttgcaatgctcacagacaattgattgtctgccctaatgtgtttcatttacatgtttataacgtcaatggtgctggggtgtccactgtaccattcattcccgcattcccacaagggggcaattgtctgaatggccaagtcagacacctttttgattgctctttggttgtcttttcagagcaaagagataaaggaggaaaatctgtgatgcagaaacactagttgaaaatatacagaattaaatgtcaccacaaaagcagatgttaacataagcccaaatatgctttttagccaagatgtgaaggttgaaaaaaataattcagagcagagggaaggatgatttaaaccaataaatatagccctattccccctctttacttcttttctgtctttagcaatcagaagatgaaatgtaattttccttttcatttttaagccttgaaacatccaggcacctcctcattatttgtatgtttgctgtgatttgtgaattttgtatatatttacatagctctgtttatgccaacagcatcagcttaccacttggaaaatctattgaatgactatttgggctgtggggagggtaaacttttaaaaagtaagatccaagtatttcttcatcaagcagtttttaaaaggaaaacgataataatcagtaggctccatggaagcctttgccttaatagctatgtgccaaatacttttatcttgtgtgacagtcatgtcagagtgaaatctctcaggaaaagtgtaactagtagttacaaagtaaataaaggatttcattttaaggtgaaatgtagtgt

SEQ ID NO: 111786 - DNA, 307 bp, Homo sapiens
cagcctcctgtgaagcgaggaagggtcttcctgccggcctctggagatcagtatgggaatgcacaagtaggaaacgctggatgggaatccctctgccctgtgataccaaggcagtgagtttgtagactatggaattgctgtcggagggctctgtaaccggccaaggtcacacaggtagccattggtagagcagggactggaatcccagacccccaacttccaggactgtgcacctttctttatcccatacagccttacagtcaagtgccagtgcaacacctgattcccaggttccagcctttgtctt

SEQ ID NO: 111787 - DNA, 399 bp, Homo sapiens
gttatgtagcatcacacgttgattctgtttacttttcagcatttttcaagttgttattttaaaatgttatgttaaatgtggttaccaattgcattacagtacactaatgcattttaataacattttaaaatgttatttttaaataacacctttaatggaatcactgcattgtttaaacaatcaaaatgggcagggtgtgatggctcacacctgtaatctcagcactttgggaggcccggcaggcagatcacttgaggtcaggagtttgagaccagcctggccaacatggtaaaatcttgtctctactaaaaacaccaaaagattagctgggcatggtggcacacctgtggtcccagctactcaggagactaaggcaggagaattgcttgaacctggagg

SEQ ID NO: 111788 - DNA, 834 bp, Homo sapiens
acagaaaagggggaacccgctggcccaatggcagcgtcctacagtgtagcctccgcctcccgattgactggcctgcttggcaaggcaagtagcggcggcgcttcaagatgcgctgcctgaccacgcctatgctgctgcgggccctggcccaggctgcacgtgcaggacctcctggtggccggagcctccacagcagtgcagtggcagccacctacaagtatgtgaacatgcaggatcccgagatggacatgaagtcagtgactgaccgggcagcccgcaccctgctgtggactgagctcttccgaggcctgggcatgaccctgagctacctgttccgggaaccggccaccatcaactacccgttcgagaagggcccgctgagccctcgcttccgtggggagcatgcgctgcgccggtacccatccggggaggagcgttgcattgcctgcaagctctgcgaggccatctgccccgcccaggccatcaccatcgaggctgagccaagagctgatggcagccgccggaccacccgctatgacatcgacatgaccaagtgcatctactgcggcttctgccaggaggcctgtcccgtggatgccatcgtcgagggccccaactttgagttctccacggagacccatgaggagctgctgtacaacaaggagaagttgctcaacaacggggacaagtgggaggccgagatcgccgccaacatccaggctgactacttgtatcggtgacgccccaccggcccgcagcccctgctgcccaataaaaccactccgaccccaaaaaaaaaaacaacaacatactcacagtgcactgaagaaacga

SEQ ID NO: 111789 - DNA, 816 bp, Homo sapiens
acagaaaagggggaacccgctggcccaatggcagcgtcctacagtgtagcctccgcctcccgattgactggcctgcttggcaaggcaagtagcggcggcgcttcaagatgcgctgcctgaccacgcctatgctgctgcgggccctggcccaggctgcacgtgcaggacctcctggtggccggagcctccacagcagtgcagtggcagccacctacaagtatgtgaacatgcaggatcccgagatggacatgaagtcagtgactgaccgggcagcccgcaccctgctgtggactgagctcttccgaggcctgggcatgaccctgagctacctgttccgggaaccggccaccatcaactacccgttcgagaagggcccgctgagccctcgcttccgtggggagcatgcgctgcgccggtacccatccggggaggagcgttgcattgcctgcaagctctgcgaggccatctgccccgcccaggccatcaccatcgaggctgagccaagagctgatggcagccgccggaccacccgctatgacatcgacatgaccaagtgcatctactgcggcttctgccaggaggcctgtcccgtggatgccatcgtcgagggccccaactttgagttctccacggagacccatgaggagctgctgtacaacaaggagaagttgctcaacaacggggacaagtgggaggccgagatcgccgccaacatccaggctgactacttgtatcggtgacgccccaccggcccgcagcccctgctgcccaataaaaccactccgaccccaatcgaccaaaaaaaaaaaaaacaac

SEQ ID NO: 111790 - DNA, 982 bp, Homo sapiens
acagaaaagggggaacccgctggcccaatggcagcgtcctacagtgtagcctccgcctcccgattgactggcctgcttggcaaggcaagtagcggcggcgcttcaaggtgggtgttcacgttttggccgtgaaagtcgggcttgggcagcgtggcgtcgggggcgagtgtggtgtccccgttggcgccgccagctctgcgcctgggcttcccctcggctcactcaggatccgcggcctccgtgtccttcaggtgcagcggggagccggctctcagggcgcatgcgccgcccgctctgcgccaccggcctagttagggtcggagatcactgggaaggtggggaaggtgctgggttgggtccctggaactgcagtcagtgatccaaaggagtgggcctgttagggggttcacaggtcgtgggatgagctcttatgagcgccggctaagtgccgggctctggggtgcccttggcatgtacgggctcccctaattcccaagaccaaccgcccccaacccacttcataggtgagaagacggaggtcaggtcacatcatctgcccaaggtcacgcggcaggctgggggacagttccaggagggccttgaagctggggaaaggaatgtggtaccgaggactgttcaggccttgaagagtttccagcagggcagggctgggttccgatcctcggcccacctccttatcgtgtgacttccgacaagtcacttttttatcttttttttgagacaaggtctcactctgtcgcccaggttggagggcagtggtgcagtctgggctcactgcaacttctgcctcctgggttcaagcgattctcctacctcaactcccgagtagctgggattataagtgcccaccaccacacctggctaatttctgtatattttggtagggacggggttccaccatgttagccaggctggtctcaaactcctgacctcaggtgatccacctgcctcagcctcccaa

SEQ ID NO: 111791 - DNA, 3978 bp, Homo sapiens
  misc_feature (907)..(907): n is a, c, g, or t
  misc_feature (1383)..(1383): n is a, c, g, or t
acagaaaagggggaacccgctggcccaatggcagcgtcctacagtgtagcctccgcctcccgattgactggcctgcttggcaaggcaagtagcggcggcgcttcaagatgcgctgcctgaccacgcctatgctgctgcgggccctggcccaggctgcacgtgcaggacctcctggtggccggagcctccacagcagtgcagtggcagccacctacagtgagtacctgggtggcctctagcctcaggtgttcctgactggtcctgctggagtaggggaagagacctgagttccagtcctggctttgtcaggggcgttcttctctgagcctgtttccacttttaaaatgattatggtgatggagactgactctgattcacaggggcagggtccatcattgccgaggttagcatgtgtgatctcagagctccctgggtgtgatggggagggggttgccaggtgtgagccatgggtacctgtgcctattgccagtccctggtgaaggcaaaggctcaagccccccacctaccccccttgattcctctttcaagccctgttgggcagggaagtgcgtctgggctccaatggccacccaagcacagggagaggtaggcacggacgggctcaggccagaggcggcctccagggtccttgctgaggctggggagaggtgtggtgagtgtacagcccctttgtagcccagcagttgcacctggaagtgagggccaggctgctctccctgaggctccagggagacagtgtgtgaggcctcttgccatggcctccctgcccgcctctctgcagagtatgtgaacatgcaggatcccgagatggacatgaagtcagtgactgaccgggcagcccgcaccctgctgtggactgagctcttccgaggtgcgtcctgggcangaggggacagggaaggtgccgggtgggcacggatgcatgggggaggagggtgcccctgcccaccacacccgtgctgcccacaggcctgggcatgaccctgagctacctgttccgggaaccggccaccatcaactacccgttcgagaagggcccgctgagccctcgcttccgtggggagcatgcgctgcgccggtacccatccggggaggagcgttgcattgcctgcaagctctgcgaggccatctgccccgcccaggtgagcccctgccccaaccggccaccacgccagcccctgccactgggagagggaggccaggcagccctaggcccaaaccctagcccctgcttgatgtgcgtccccaggaagtccctttccccctctgagccacttccctcgtgaatgggaatgatgagggcttgttaccagagcacagagtcagtgagttggcagagtgaagcttccagccctgggcagncgcctgacacacagaggttcccccttggggtctggccaagggtgtgacccctgggcctctgagccatggggtgacacctgaggccatccacgcctccctggatgtagccaccgtttccggagtcctgcttgtgtgcctgttgcagcttcccttccccagtggctgctcccctgaggcccggctttccgttctcttagtgggtctcgtgcttacccgtgggggccaggcctgccagcacgggaacaatatgactcggtcagagctctggtcagacccctgtgtgtgcctggcaggagccccggcagccgccgtcgctactttctgtgtgcacagcaacccctcccagtgttctgtgactcgggtggctcctgtccagatcctagtttgtcctctggagcactcccaggtcctccaggccatgagctgcggccctgatgtctctactccagccacggactgagagtgcataggagtgtccccaaacagcagtcacgatggtcacaaccttggcttccagacagtgagtgctgtccacagacagacccgttgctgtgccatgtgtgtgactcacagcctctcctgtaatctccacaacccctcgaggaggtcgaggttattgtctccatctttataagcactaaaggatgagcctgccagccacaggtcccactgtgagttgtggacactacatttctgggatgggggcatatgagagtccttgccaagcacatttgaaggttttcccagccagcccctcccccagcgggctacccaggaactgagagttaggacgtgcccttgagtttgggctgtgcccccacttgctgtgtagctttggggagcccctcaacctctcggaaccttgtttttctcatccatcaaatggagagaagtagatttaaggcacaggattgcacccaacagtgtaggcattcttggcgatgttgcaggttcggctccagaccatcggggtaaactgagtcacacagctgttttggttttccagtgcatttaaaagttagatttagaccgggcacagtggctcatgcctgtaattccagcactttgagaagccgaggtgggcggatcacttgaggtcaagagttcgagaccagcctggccaacatagtgaaaccccgtctctactaaaaataacaaaacttagccgggcacgttggcaggtccctgtaatctcagctacttgctaggctgaggcacgataatcacttgaaccgggaggtgggggttgcagtgagccaaaattgaaaaaaaaaaaaaattagggccggttgcggtggctcacgcctgtaatcccagcactttgggaggccaaggtgggcggatcacaaggtcaggaattcaagaccagcctggccaacatgttgaaaccccgtctctagtaaaaatacaaaaattagccgggtgtggggttgcacacctgtagtcccagctactcaagaggctgaggcaggagaattgcttgaacctgggaggcggaggttgcagtgaactatgattgcaccaccatactccatcctgggccacagagcaagacttcgtctcaaaaaaaaaaaaggatttacactgtactgtaggctgcgaagtgtctaaaacacaatgtatataccttaattaaaaatactttaggggccaggcacagtggctcacacctgtagtccaagtgctttgggaggtcaaggtgaggggattacttgagcccaggagtttgagaccagcctgggcaacatggcaaaaccccgactctacaacaacaacaaaaaatacaaaaaattagcccctgtaggcccagttacttgggaggttgaggtgggaggatcgcttgagcctgggaggttgaggctgcagtgagctatgagctgcaccactgtactccagcctgggtgacagggcaagactctgtctcaaaaaacaaaaacaacaacaaaaactttattcctaaaaagtgctgacccagagataagaagcaagcacatggttggtaaaatgacatcagtgagcttgctttatgcagggttgccccaaaccttcaatttgtaaaactcaaaatatctggaaagcttggtgaggcgaggcgggactgtaactcagcactcaccgcagggtgagacccttagggcagcgggtgctacactgaacaaagcggtgaacagccccctcgtgagagggggttcttggcagatgacgccagcagctgacaaacaggcaaggcaggccgggccacggtggctcacgcttgtaatcccagcactttgggagtccaaggccatcaccatcgaggctgagccaagagctgatggcagccgccggaccacccgctatgacatcgacatgaccaagtgcatctactgcggcttctgccaggaggcctgtcccgtggatgccatcgtcgagggccccaactttgagttctccacggagacccatgaggagctgctgtacaacaaggagaagttgctcaacaacggggacaagtgggaggccgagatcgccgccaacatccaggctgactacttgtatcggtgacgccccaccggcccgcagcccctgctgcccaataaaaccactccgacccca

SEQ ID NO: 111792 - DNA, 1208 bp, Homo sapiens
acagaaaagggggaacccgctggcccaatggcagcgtcctacagtgtagcctccgcctcccgattgactggcctgcttggcaaggcaagtagcggcggcgcttcaaggtgggtgttcacgttttggccgtgaaagtcgggcttgggcagcgtggcgtcgggggcgagtgtggtgtccccgttggcgccgccagctctgcgcctgggcttcccctcggctcactcaggatccgcggcctccgtgtccttcaggtgcagcggggagccggctctcagggcgcatgcgccgcccgctctgcgccaccggcctagttagggtcggagatcactgggaaggtggggaaggtgctgggttgggtccctggaactgcagtcagtgatccaaaggagtgggcctgttagggggttcacaggtcgtgggatgagctcttatgagcgccggctaagtgccgggctctggggtgcccttggcatgtacgggctcccctaattcccaagaccaaccgcccccaacccacttcatagatgcgctgcctgaccacgcctatgctgctgcgggccctggcccaggctgcacgtgcaggacctcctggtggccggagcctccacagcagtgcagtggcagccacctacaagtatgtgaacatgcaggatcccgagatggacatgaagtcagtgactgaccgggcagcccgcaccctgctgtggactgagctcttccgaggcctgggcatgaccctgagctacctgttccgggaaccggccaccatcaactacccgttcgagaagggcccgctgagccctcgcttccgtggggagcatgcgctgcgccggtacccatccggggaggagcgttgcattgcctgcaagctctgcgaggccatctgccccgcccaggccatcaccatcgaggctgagccaagagctgatggcagccgccggaccacccgctatgacatcgacatgaccaagtgcatctactgcggcttctgccaggaggcctgtcccgtggatgccatcgtcgagggccccaactttgagttctccacggagacccatgaggagctgctgtacaacaaggagaagttgctcaacaacggggacaagtgggaggccgagatcgccgccaacatccaggctgactacttgtatcggtgacgccccaccggcccgcagcccctgctgcccaataaaaccactccgacccca

SEQ ID NO: 111793 - DNA, 1105 bp, Homo sapiens
tttccacccctgggcacggttcctgggggaggagagctaacaaagttcgctctcagtgcatgctggcgggggctggtaatgttgtttttggttagatttggggaggatgaagggaggagcagaaaggtgggaaacaggatctctgggagggagaaaggaaggatggatttaaaaggtttcttaggtgaggcagaacttggggtccacagaaactgaattgtagctcagccaagctgaatcagatggaaagctgggaggcgctgggaacaggaaagccatctgtgcctctgacagcaatggggtgcgagtagagggcaaagtgacacatgtcagtggagacttgggatccttgcggtgccagtctcagaagaggatggttcttgggcacaccccaccctccatccctttttatgccaccagaatgcgctgcctgaccacgcctatgctgctgcgggccctggcccaggctgcacgtgcaggacctcctggtggccggagcctccacagcagtgcagtggcagccacctacaagtatgtgaacatgcaggatcccgagatggacatgaagtcagtgactgaccgggcagcccgcaccctgctgtggactgagctcttccgaggcctgggcatgaccctgagctacctgttccgggaaccggccaccatcaactacccgttcgagaagggcccgctgagccctcgcttccgtggggagcatgcgctgcgccggtacccatccggggaggagcgttgcattgcctgcaagctctgcgaggccatctgccccgcccaggccatcaccatcgaggctgagccaagagctgatggcagccgccggaccacccgctatgacatcgacatgaccaagtgcatctactgcggcttctgccaggaggcctgtcccgtggatgccatcgtcgagggccccaactttgagttctccacggagacccatgaggagctgctgtacaacaaggagaagttgctcaacaacggggacaagtgggaggccgagatcgccgccaacatccaggctgactacttgtatcggtgacgccccaccggcccgcagcccctgctgcccaataaaaccactccgacccca

SEQ ID NO: 111794 - DNA, 953 bp, Homo sapiens
acagaaaagggggaacccgctggcccaatggcagcgtcctacagtgtagcctccgcctcccgattgactggcctgcttggcaaggcaagtagcggcggcgcttcaagatgcgctgcctgaccacgcctatgctgctgcgggccctggcccaggctgcacgtgcaggacctcctggtggccggagcctccacagcagtgcagtggcagccacctacaagtatgtgaacatgcaggatcccgagatggacatgaagtcagtgactgaccgggcagcccgcaccctgctgtggactgagctcttccgaggcctgggcatgaccctgagctacctgttccgggaaccggccaccatcaactacccgttcgagaagggcccgctgagccctcgcttccgtggggagcatgcgctgcgccggtacccatccggggaggagcgttgcattgcctgcaagctctgcgaggccatctgccccgcccagggtgagacccttagggcagcgggtgctacactgaacaaagcggtgaacagccccctcgtgagagggggttcttggcagatgacgccagcagctgacaaacaggcaaggcaggccgggccacggtggctcacgcttgtaatcccagcactttgggagtccaaggccatcaccatcgaggctgagccaagagctgatggcagccgccggaccacccgctatgacatcgacatgaccaagtgcatctactgcggcttctgccaggaggcctgtcccgtggatgccatcgtcgagggccccaactttgagttctccacggagacccatgaggagctgctgtacaacaaggagaagttgctcaacaacggggacaagtgggaggccgagatcgccgccaacatccaggctgactacttgtatcggtgacgccccaccggcccgcagcccctgctgcccaataaaaccactccgacccca

SEQ ID NO: 111795 - DNA, 3822 bp, Homo sapiens
  misc_feature (1227)..(1227): n is a, c, g, or t
acagaaaagggggaacccgctggcccaatggcagcgtcctacagtgtagcctccgcctcccgattgactggcctgcttggcaaggcaagtagcggcggcgcttcaagatgcgctgcctgaccacgcctatgctgctgcgggccctggcccaggctgcacgtgcaggacctcctggtggccggagcctccacagcagtgcagtggcagccacctacagtgagtacctgggtggcctctagcctcaggtgttcctgactggtcctgctggagtaggggaagagacctgagttccagtcctggctttgtcaggggcgttcttctctgagcctgtttccacttttcgaggttagcatgtgtgatctcagagctccctgggtgtgatggggagggggttgccaggtgtgagccatgggtacctgtgcctattgccagtccctggtgaaggcaaaggctcaagccccccacctaccccccttgattcctctttcaagccctgttgggcagggaagtgcgtctgggctccaatggccacccaagcacagggagaggtaggcacggacgggctcaggccagaggcggcctccagggtccttgctgaggctggggagaggtgtggtgagtgtacagcccctttgtagcccagcagttgcacctggaagtgagggccaggctgctctccctgaggctccagggagacagtgtgtgaggcctcttgccatggcctccctgcccgcctctctgcagagtatgtgaacatgcaggatcccgagatggacatgaagtcagtgactgaccgggcagcccgcaccctgctgtggactgagctcttccgaggcctgggcatgaccctgagctacctgttccgggaaccggccaccatcaactacccgttcgagaagggcccgctgagccctcgcttccgtggggagcatgcgctgcgccggtacccatccggggaggagcgttgcattgcctgcaagctctgcgaggccatctgccccgcccaggtgagcccctgccccaaccggccaccacgccagcccctgccactgggagagggaggccaggcagccctaggcccaaaccctagcccctgcttgatgtgcgtccccaggaagtccctttccccctctgagccacttccctcgtgaatgggaatgatgagggcttgttaccagagcacagagtcagtgagttggcagagtgaagcttccagccctgggcagncgcctgacacacagaggttcccccttggggtctggccaagggtgtgacccctgggcctctgagccatggggtgacacctgaggccatccacgcctccctggatgtagccaccgtttccggagtcctgcttgtgtgcctgttgcagcttcccttccccagtggctgctcccctgaggcccggctttccgttctcttagtgggtctcgtgcttacccgtgggggccaggcctgccagcacgggaacaatatgactcggtcagagctctggtcagacccctgtgtgtgcctggcaggagccccggcagccgccgtcgctactttctgtgtgcacagcaacccctcccagtgttctgtgactcgggtggctcctgtccagatcctagtttgtcctctggagcactcccaggtcctccaggccatgagctgcggccctgatgtctctactccagccacggactgagagtgcataggagtgtccccaaacagcagtcacgatggtcacaaccttggcttccagacagtgagtgctgtccacagacagacccgttgctgtgccatgtgtgtgactcacagcctctcctgtaatctccacaacccctcgaggaggtcgaggttattgtctccatctttataagcactaaaggatgagcctgccagccacaggtcccactgtgagttgtggacactacatttctgggatgggggcatatgagagtccttgccaagcacatttgaaggttttcccagccagcccctcccccagcgggctacccaggaactgagagttaggacgtgcccttgagtttgggctgtgcccccacttgctgtgtagctttggggagcccctcaacctctcggaaccttgtttttctcatccatcaaatggagagaagtagatttaaggcacaggattgcacccaacagtgtaggcattcttggcgatgttgcaggttcggctccagaccatcggggtaaactgagtcacacagctgttttggttttccagtgcatttaaaagttagatttagaccgggcacagtggctcatgcctgtaattccagcactttgagaagccgaggtgggcggatcacttgaggtcaagagttcgagaccagcctggccaacatagtgaaaccccgtctctactaaaaataacaaaacttagccgggcacgttggcaggtccctgtaatctcagctacttgctaggctgaggcacgataatcacttgaaccgggaggtgggggttgcagtgagccaaaattgaaaaaaaaaaaaaattagggccggttgcggtggctcacgcctgtaatcccagcactttgggaggccaaggtgggcggatcacaaggtcaggaattcaagaccagcctggccaacatgttgaaaccccgtctctagtaaaaatacaaaaattagccgggtgtggggttgcacacctgtagtcccagctactcaagaggctgaggcaggagaattgcttgaacctgggaggcggaggttgcagtgaactatgattgcaccaccatactccatcctgggccacagagcaagacttcgtctcaaaaaaaaaaaaggatttacactgtactgtaggctgcgaagtgtctaaaacacaatgtatataccttaattaaaaatactttaggggccaggcacagtggctcacacctgtagtccaagtgctttgggaggtcaaggtgaggggattacttgagcccaggagtttgagaccagcctgggcaacatggcaaaaccccgactctacaacaacaacaaaaaatacaaaaaattagcccctgtaggcccagttacttgggaggttgaggtgggaggatcgcttgagcctgggaggttgaggctgcagtgagctatgagctgcaccactgtactccagcctgggtgacagggcaagactctgtctcaaaaaacaaaaacaacaacaaaaactttattcctaaaaagtgctgacccagagataagaagcaagcacatggttggtaaaatgacatcagtgagcttgctttatgcagggttgccccaaaccttcaatttgtaaaactcaaaatatctggaaagcttggtgaggcgaggcgggactgtaactcagcactcaccgcagggtgagacccttagggcagcgggtgctacactgaacaaagcggtgaacagccccctcgtgagagggggttcttggcagatgacgccagcagctgacaaacaggcaaggcaggccgggccacggtggctcacgcttgtaatcccagcactttgggagtccaaggccatcaccatcgaggctgagccaagagctgatggcagccgccggaccacccgctatgacatcgacatgaccaagtgcatctactgcggcttctgccaggaggcctgtcccgtggatgccatcgtcgagggccccaactttgagttctccacggagacccatgaggagctgctgtacaacaaggagaagttgctcaacaacggggacaagtgggaggccgagatcgccgccaacatccaggctgactacttgtatcggtgacgccccaccggcccgcagcccctgctgcccaataaaaccactccgacccca

SEQ ID NO: 111796 - DNA, 3111 bp, Homo sapiens
  misc_feature (516)..(516): n is a, c, g, or t
acagaaaagggggaacccgctggcccaatggcagcgtcctacagtgtagcctccgcctcccgattgactggcctgcttggcaaggcaagtagcggcggcgcttcaagatgcgctgcctgaccacgcctatgctgctgcgggccctggcccaggctgcacgtgcaggacctcctggtggccggagcctccacagcatgagccctcgcttccgtggggagcatgcgctgcgccggtacccatccggggaggagcgttgcattgcctgcaagctctgcgaggccatctgccccgcccaggtgagcccctgccccaaccggccaccacgccagcccctgccactgggagagggaggccaggcagccctaggcccaaaccctagcccctgcttgatgtgcgtccccaggaagtccctttccccctctgagccacttccctcgtgaatgggaatgatgagggcttgttaccagagcacagagtcagtgagttggcagagtgaagcttccagccctgggcagncgcctgacacacagaggttcccccttggggtctggccaagggtgtgacccctgggcctctgagccatggggtgacacctgaggccatccacgcctccctggatgtagccaccgtttccggagtcctgcttgtgtgcctgttgcagcttcccttccccagtggctgctcccctgaggcccggctttccgttctcttagtgggtctcgtgcttacccgtgggggccaggcctgccagcacgggaacaatatgactcggtcagagctctggtcagacccctgtgtgtgcctggcaggagccccggcagccgccgtcgctactttctgtgtgcacagcaacccctcccagtgttctgtgactcgggtggctcctgtccagatcctagtttgtcctctggagcactcccaggtcctccaggccatgagctgcggccctgatgtctctactccagccacggactgagagtgcataggagtgtccccaaacagcagtcacgatggtcacaaccttggcttccagacagtgagtgctgtccacagacagacccgttgctgtgccatgtgtgtgactcacagcctctcctgtaatctccacaacccctcgaggaggtcgaggttattgtctccatctttataagcactaaaggatgagcctgccagccacaggtcccactgtgagttgtggacactacatttctgggatgggggcatatgagagtccttgccaagcacatttgaaggttttcccagccagcccctcccccagcgggctacccaggaactgagagttaggacgtgcccttgagtttgggctgtgcccccacttgctgtgtagctttggggagcccctcaacctctcggaaccttgtttttctcatccatcaaatggagagaagtagatttaaggcacaggattgcacccaacagtgtaggcattcttggcgatgttgcaggttcggctccagaccatcggggtaaactgagtcacacagctgttttggttttccagtgcatttaaaagttagatttagaccgggcacagtggctcatgcctgtaattccagcactttgagaagccgaggtgggcggatcacttgaggtcaagagttcgagaccagcctggccaacatagtgaaaccccgtctctactaaaaataacaaaacttagccgggcacgttggcaggtccctgtaatctcagctacttgctaggctgaggcacgataatcacttgaaccgggaggtgggggttgcagtgagccaaaattgaaaaaaaaaaaaaattagggccggttgcggtggctcacgcctgtaatcccagcactttgggaggccaaggtgggcggatcacaaggtcaggaattcaagaccagcctggccaacatgttgaaaccccgtctctagtaaaaatacaaaaattagccgggtgtggggttgcacacctgtagtcccagctactcaagaggctgaggcaggagaattgcttgaacctgggaggcggaggttgcagtgaactatgattgcaccaccatactccatcctgggccacagagcaagacttcgtctcaaaaaaaaaaaaggatttacactgtactgtaggctgcgaagtgtctaaaacacaatgtatataccttaattaaaaatactttaggggccaggcacagtggctcacacctgtagtccaagtgctttgggaggtcaaggtgaggggattacttgagcccaggagtttgagaccagcctgggcaacatggcaaaaccccgactctacaacaacaacaaaaaatacaaaaaattagcccctgtaggcccagttacttgggaggttgaggtgggaggatcgcttgagcctgggaggttgaggctgcagtgagctatgagctgcaccactgtactccagcctgggtgacagggcaagactctgtctcaaaaaacaaaaacaacaacaaaaactttattcctaaaaagtgctgacccagagataagaagcaagcacatggttggtaaaatgacatcagtgagcttgctttatgcagggttgccccaaaccttcaatttgtaaaactcaaaatatctggaaagcttggtgaggcgaggcgggactgtaactcagcactcaccgcagggtgagacccttagggcagcgggtgctacactgaacaaagcggtgaacagccccctcgtgagagggggttcttggcagatgacgccagcagctgacaaacaggcaaggcaggccgggccacggtggctcacgcttgtaatcccagcactttgggagtccaaggccatcaccatcgaggctgagccaagagctgatggcagccgccggaccacccgctatgacatcgacatgaccaagtgcatctactgcggcttctgccaggaggcctgtcccgtggatgccatcgtcgagggccccaactttgagttctccacggagacccatgaggagctgctgtacaacaaggagaagttgctcaacaacggggacaagtgggaggccgagatcgccgccaacatccaggctgactacttgtatcggtgacgccccaccggcccgcagcccctgctgcccaataaaaccactccgacccca

SEQ ID NO: 111797 - DNA, 791 bp, Homo sapiens
acagaaaagggggaacccgctggcccaatggcagcgtcctacagtgtagcctccgcctcccgattgactggcctgcttggcaaggcaagtagcggcggcgcttcaagatgcgctgcctgaccacgcctatgctgctgcgggccctggcccaggctgcacgtgcaggacctcctggtggccggagcctccacagcagtgcagtggcagccacctacaagtatgtgaacatgcaggatcccgagatggacatgaagtcagtgactgaccgggcagcccgcaccctgctgtggactgagctcttccgaggcctgggcatgaccctgagctacctgttccgggaaccggccaccatcaactacccgttcgagaagggcccgctgagccctcgcttccgtggggagcatgcgctgcgccggtacccatccggggaggagcgttgcattgcctgcaagctctgcgaggccatctgccccgcccaggccatcaccatcgaggctgagccaagagctgatggcagccgccggaccacccgctatgacatcgacatgaccaagtgcatctactgcggcttctgccaggaggcctgtcccgtggatgccatcgtcgagggccccaactttgagttctccacggagacccatgaggagctgctgtacaacaaggagaagttgctcaacaacggggacaagtgggaggccgagatcgccgccaacatccaggctgactacttgtatcggtgacgccccaccggcccgcagcccctgctgcccaataaaaccactccgacccca

SEQ ID NO: 111798 - DNA, 1065 bp, Homo sapiens
acagaaaagggggaacccgctggcccaatggcagcgtcctacagtgtagcctccgcctcccgattgactggcctgcttggcaaggcaagtagcggcggcgcttcaagatgcgctgcctgaccacgcctatgctgctgcgggccctggcccaggctgcacgtgcaggacctcctggtggccggagcctccacagcagtgcagtggcagccacctacaagtatgtgaacatgcaggatcccgagatggacatgaagtcagtgactgaccgggcagcccgcaccctgctgtggactgagctcttccgaggcctgggcatgaccctgagctacctgttccgggaaccggccaccatcaactacccgttcgagaagggcccgctgagccctcgcttccgtggggagcatgcgctgcgccggtacccatccggggaggagcgttgcattgcctgcaagctctgcgaggccatctgccccgcccaggccatcaccatcgaggctgagccaagagctgatggcagccgccggaccacccgctatgacatcgacatgaccaagtgcatctactgcggcttctgccaggaggcctgtcccgtggatgccatcgtcgagggccccaactttgagttctccacggagacccatgaggagctgctgtacaacaaggagaagttgctcaacaacggggacaagtgggaggccgagatcgccgccaacatccaggctgactacttgtatcggtgacgccccaccggcccgcagcccctgctgcccaataaaaccactccgaccccagaaaaaacaaaaacacaacacaaaaaacaaaaacaaaaaaagtggttgtcgcgccccgccgggcacccaagaagaaaatttctaacaacccatctccggtggggcgcgcgcggcggcggccacgtatgggttcgtcgtcaaacacgggcgcacaagagggtgtccacgagagaaaaaccggggtcacaagacacaggggtccgggtcttctctccccaatataaaaaagccccgggggcaaacccggggcttccgtgaacaatccccgatgggg

SEQ ID NO: 111799 - DNA, 935 bp, Homo sapiens
acagaaaagggggaacccgctggcccaatggcagcgtcctacagtgtagcctccgcctcccgattgactggcctgcttggcaaggcaagtagcggcggcgcttcaaggtgggtgttcacgttttggccgtgaaagtcgggcttgggcagcgtggcgtcgggggcgagtgtggtgtccccgttggcgccgccagctctgcgcctgggcttcccctcggctcactcaggatccgcggcctccgtgtccttcagatgcgctgcctgaccacgcctatgctgctgcgggccctggcccaggctgcacgtgcaggacctcctggtggccggagcctccacagcagtgcagtggcagccacctacaagtatgtgaacatgcaggatcccgagatggacatgaagtcagtgactgaccgggcagcccgcaccctgctgtggactgagctcttccgaggcctgggcatgaccctgagctacctgttccgggaaccggccaccatcaactacccgttcgagaagggcccgctgagccctcgcttccgtggggagcatgcgctgcgccggtacccatccggggaggagcgttgcattgcctgcaagctctgcgaggccatctgccccgcccaggccatcaccatcgaggctgagccaagagctgatggcagccgccggaccacccgctatgacatcgacatgaccaagtgcatctactgcggcttctgccaggaggcctgtcccgtggatgccatcgtcgagggccccaactttgagttctccacggagacccatgaggagctgctgtacaacaaggagaagttgctcaacaacggggacaagtgggaggccgagatcgccgccaacatccaggctgactacttgtatcggtgacgccccaccggcccgcagcccctgctgcccaataaaaccactccgacccca

SEQ ID NO: 111800 - DNA, 716 bp, Homo sapiens
cggcacgaggcttaagctgcgctggttcatgaatgcgctgcctgaccacgcctatgctgctgcgggccctggcccaggctgcacgtgcaggacctcctggtggccggagcctccacagcagtgcagtggcagccacctacaagtatgtgaacatgcaggatcccgagatggacatgaagtcagtgactgaccgggcagcccgcaccctgctgtggactgagctcttccgaggcctgggcatgaccctgagctacctgttccgggaaccggccaccatcaactacccgttcgagaagggcccgctgagccctcgcttccgtggggagcatgcgctgcgccggtacccatccggggaggagcgttgcattgcctgcaagctctgcgaggccatctgccccgcccaggccatcaccatcgaggctgagccaagagctgatggcagccgccggaccacccgctatgacatcgacatgaccaagtgcatctactgcggcttctgccaggaggcctgtcccgtggatgccatcgtcgagggccccaactttgagttctccacggagacccatgaggagctgctgtacaacaaggagaagttgctcaacaacggggacaagtgggaggccgagatcgccgccaacatccaggctgactacttgtatcggtgacgccccaccggcccgcagcccctgctgcccaataaaaccactccgacccca

SEQ ID NO: 111801 - DNA, 1682 bp, Homo sapiens
  misc_feature (699)..(699): n is a, c, g, or t
acagaaaagggggaacccgctggcccaatggcagcgtcctacagtgtagcctccgcctcccgattgactggcctgcttggcaaggcaagtagcggcggcgcttcaagatgcgctgcctgaccacgcctatgctgctgcgggccctggcccaggctgcacgtgcaggacctcctggtggccggagcctccacagcagtgcagtggcagccacctacaagtatgtgaacatgcaggatcccgagatggacatgaagtcagtgactgaccgggcagcccgcaccctgctgtggactgagctcttccgaggcctgggcatgaccctgagctacctgttccgggaaccggccaccatcaactacccgttcgagaagggcccgctgagccctcgcttccgtggggagcatgcgctgcgccggtacccatccggggaggagcgttgcattgcctgcaagctctgcgaggccatctgccccgcccaggtgagcccctgccccaaccggccaccacgccagcccctgccactgggagagggaggccaggcagccctaggcccaaaccctagcccctgcttgatgtgcgtccccaggaagtccctttccccctctgagccacttccctcgtgaatgggaatgatgagggcttgttaccagagcacagagtcagtgagttggcagagtgaagcttccagccctgggcagncgcctgacacacagaggttcccccttggggtctggccaagggtgtgacccctgggcctctgagccatggggtgacacctgaggccatccacgcctccctggatgtagccaccgtttccggagtcctgcttgtgtgcctgttgcagcttcccttccccagtggctgctcccctgaggcccggctttccgttctcttagtgggtctcgtgcttacccgtgggggccaggcctgccagcacgggaacaatatgactcggtcagagctctggtcagacccctgtgtgtgcctggcaggagccccggcagccgccgtcgctactttctgtgtgcacagcaacccctcccagtgttctgtgactcgggtggctcctgtccagatcctagtttgtcctctggagcactcccaggtcctccaggccatgagctgcggccctgatgtctctactccagccacggactgagagtgcataggagtgtccccaaacagcagtcacgatggtcacaaccttggcttccagacagtgagtgctgtccacagacagacccgttgctgtgccatgtgtgtgactcacagcctctcctgtaatctccacaacccctcgaggaggtcgaggttattgtctccatctttataagcactaaaggatgagcctgccagccacaggtcccactgccatcaccatcgaggctgagccaagagctgatggcagccgccggaccacccgctatgacatcgacatgaccaagtgcatctactgcggcttctgccaggaggcctgtcccgtggatgccatcgtcgagggccccaactttgagttctccacggagacccatgaggagctgctgtacaacaaggagaagttgctcaacaacggggacaagtgggaggccgagatcgccgccaacatccaggctgactacttgtatcggtgacgccccaccggcccgcagcccctgctgcccaataaaaccactccgacccca

SEQ ID NO: 111802 - DNA, 3477 bp, Homo sapiens
  misc_feature (882)..(882): n is a, c, g, or t
acagaaaagggggaacccgctggcccaatggcagcgtcctacagtgtagcctccgcctcccgattgactggcctgcttggcaaggcaagtagcggcggcgcttcaagatgcgctgcctgaccacgcctatgctgctgcgggccctggcccaggctgcacgtgcaggacctcctggtggccggagcctccacagcagtgcagtggcagccacctacagtgagtacctgggtggcctctagcctcaggtgttcctgactggtcctgctggagtaggggaagagacctgagttccagtcctggctttgtcaggggcgttcttctctgagcctgtttccacttttaaaatgattatggtgatggagactgactctgattcacaggggcagggtccatcattgcagtatgtgaacatgcaggatcccgagatggacatgaagtcagtgactgaccgggcagcccgcaccctgctgtggactgagctcttccgaggcctgggcatgaccctgagctacctgttccgggaaccggccaccatcaactacccgttcgagaagggcccgctgagccctcgcttccgtggggagcatgcgctgcgccggtacccatccggggaggagcgttgcattgcctgcaagctctgcgaggccatctgccccgcccaggtgagcccctgccccaaccggccaccacgccagcccctgccactgggagagggaggccaggcagccctaggcccaaaccctagcccctgcttgatgtgcgtccccaggaagtccctttccccctctgagccacttccctcgtgaatgggaatgatgagggcttgttaccagagcacagagtcagtgagttggcagagtgaagcttccagccctgggcagncgcctgacacacagaggttcccccttggggtctggccaagggtgtgacccctgggcctctgagccatggggtgacacctgaggccatccacgcctccctggatgtagccaccgtttccggagtcctgcttgtgtgcctgttgcagcttcccttccccagtggctgctcccctgaggcccggctttccgttctcttagtgggtctcgtgcttacccgtgggggccaggcctgccagcacgggaacaatatgactcggtcagagctctggtcagacccctgtgtgtgcctggcaggagccccggcagccgccgtcgctactttctgtgtgcacagcaacccctcccagtgttctgtgactcgggtggctcctgtccagatcctagtttgtcctctggagcactcccaggtcctccaggccatgagctgcggccctgatgtctctactccagccacggactgagagtgcataggagtgtccccaaacagcagtcacgatggtcacaaccttggcttccagacagtgagtgctgtccacagacagacccgttgctgtgccatgtgtgtgactcacagcctctcctgtaatctccacaacccctcgaggaggtcgaggttattgtctccatctttataagcactaaaggatgagcctgccagccacaggtcccactgtgagttgtggacactacatttctgggatgggggcatatgagagtccttgccaagcacatttgaaggttttcccagccagcccctcccccagcgggctacccaggaactgagagttaggacgtgcccttgagtttgggctgtgcccccacttgctgtgtagctttggggagcccctcaacctctcggaaccttgtttttctcatccatcaaatggagagaagtagatttaaggcacaggattgcacccaacagtgtaggcattcttggcgatgttgcaggttcggctccagaccatcggggtaaactgagtcacacagctgttttggttttccagtgcatttaaaagttagatttagaccgggcacagtggctcatgcctgtaattccagcactttgagaagccgaggtgggcggatcacttgaggtcaagagttcgagaccagcctggccaacatagtgaaaccccgtctctactaaaaataacaaaacttagccgggcacgttggcaggtccctgtaatctcagctacttgctaggctgaggcacgataatcacttgaaccgggaggtgggggttgcagtgagccaaaattgaaaaaaaaaaaaaattagggccggttgcggtggctcacgcctgtaatcccagcactttgggaggccaaggtgggcggatcacaaggtcaggaattcaagaccagcctggccaacatgttgaaaccccgtctctagtaaaaatacaaaaattagccgggtgtggggttgcacacctgtagtcccagctactcaagaggctgaggcaggagaattgcttgaacctgggaggcggaggttgcagtgaactatgattgcaccaccatactccatcctgggccacagagcaagacttcgtctcaaaaaaaaaaaaggatttacactgtactgtaggctgcgaagtgtctaaaacacaatgtatataccttaattaaaaatactttaggggccaggcacagtggctcacacctgtagtccaagtgctttgggaggtcaaggtgaggggattacttgagcccaggagtttgagaccagcctgggcaacatggcaaaaccccgactctacaacaacaacaaaaaatacaaaaaattagcccctgtaggcccagttacttgggaggttgaggtgggaggatcgcttgagcctgggaggttgaggctgcagtgagctatgagctgcaccactgtactccagcctgggtgacagggcaagactctgtctcaaaaaacaaaaacaacaacaaaaactttattcctaaaaagtgctgacccagagataagaagcaagcacatggttggtaaaatgacatcagtgagcttgctttatgcagggttgccccaaaccttcaatttgtaaaactcaaaatatctggaaagcttggtgaggcgaggcgggactgtaactcagcactcaccgcagggtgagacccttagggcagcgggtgctacactgaacaaagcggtgaacagccccctcgtgagagggggttcttggcagatgacgccagcagctgacaaacaggcaaggcaggccgggccacggtggctcacgcttgtaatcccagcactttgggagtccaaggccatcaccatcgaggctgagccaagagctgatggcagccgccggaccacccgctatgacatcgacatgaccaagtgcatctactgcggcttctgccaggaggcctgtcccgtggatgccatcgtcgagggccccaactttgagttctccacggagacccatgaggagctgctgtacaacaaggagaagttgctcaacaacggggacaagtgggaggccgagatcgccgccaacatccaggctgactacttgtatcggtgacgccccaccggcccgcagcccctgctgcccaataaaaccactccgacccca

SEQ ID NO: 111803 - DNA, 910 bp, Homo sapiens
acagaaaagggggaacccgctggcccaatggcagcgtcctacagtgtagcctccgcctcccgattgactggcctgcttggcaaggcaagtagcggcggcgcttcaaggtgggtgttcacgttttggccgtgaaagtcgggcttgggcagcgtggcgtcgggggcgagtgtggtgtccccgttggcgccgccagctctgcgcctgggcttcccctcggctcactcaggatccgcggcctccgtgtccttcaggtgcagcggggagccggctctcagggcgcatgcgccgcccgctctgcgccaccggcctagttagggtcggagatcactgggaagagtatgtgaacatgcaggatcccgagatggacatgaagtcagtgactgaccgggcagcccgcaccctgctgtggactgagctcttccgaggcctgggcatgaccctgagctacctgttccgggaaccggccaccatcaactacccgttcgagaagggcccgctgagccctcgcttccgtggggagcatgcgctgcgccggtacccatccggggaggagcgttgcattgcctgcaagctctgcgaggccatctgccccgcccaggccatcaccatcgaggctgagccaagagctgatggcagccgccggaccacccgctatgacatcgacatgaccaagtgcatctactgcggcttctgccaggaggcctgtcccgtggatgccatcgtcgagggccccaactttgagttctccacggagacccatgaggagctgctgtacaacaaggagaagttgctcaacaacggggacaagtgggaggccgagatcgccgccaacatccaggctgactacttgtatcggtgacgccccaccggcccgcagcccctgctgcccaataaaaccactccgacccca

SEQ ID NO: 111804 - DNA, 375 bp, Homo sapiens
cctggctaatttttgtattttttgtagagatagggtttcaccagggttgttcaggctggtctcgaactcctgggcctcctagagtgctggaattaaagccagcctgggtgtgagccattgcacccagccaaaacttttaattatgaaattattttagattcacagtaaatttgcaaaaatatgcagaagatttctgcatacccttcacccagttcccctaatgttagcatcttacatagctatagtagaatgtttgaaactaggcaataagaaatactgaatactgatatagtgctattaggtaaaatataggccttattttaaatttcattttttccagtaatgtctttttctctattctgaatcccatactgt

SEQ ID NO: 111805 - DNA, 569 bp, Homo sapiens
aacacagccatgcgtcgacgtttatgtgttatgtagggctgcctgagttaagtagttggctacaaagcctatcatggcctataaagcctgaaatacttactatctggtcctttatagaaagtgttttctgaccctgtactagactagcttgtctcaaaattcttcaatgaatttggaagttttctcaccacattttctgaccataatgcacttgagttagaagtaaataagcagataaacaacaaaatcctcatgcatttggaaattaaaaataacacttaaataattcatattcaaagaaaaaatcaaactggaaattaaaaaaaattttaaacctacagataactacattaatatgcattaacatttttagaacttagggatagttacaatgatatacattaaaactggtaagaggctgggtgcgttggctcacgcctgtaatcccagcactttgggaggccgaggctgggggatcacgaggtcaagagattgaaaccatcctggccaacatggtgaaaccccgtctctactaaaaatacaaaaatcagctgggcgtggtggcacgc

SEQ ID NO: 111806 - DNA, 352 bp, Homo sapiens
acacccctcattccttaggaggcaattcgaatcaaaaacgtaatggacattcacagagctttcgttccctgccaggtactctgctaagcacacgtcttatattaccgtatttaattctcacagcaaccataagagataggctttacttttactttaaagagatcttgagaggtaagataaattttcctaggtcactcacctgttaagtggtagagttagaatttaaacctgggcagtgtatctatactcaaccactgtgctatactggcttcactgtagtctactaaaatactgtcctaaaaataaaaataaagctaaaagagcactttcaaagccaccatttgttattatg

SEQ ID NO: 111807 - DNA, 218 bp, Homo sapiens
tgaatgttattaataaaatacataaattatttaaattgtgtgacactgtaagattttttccacatcagataactttaaaaaatgtatctttcaggccaggtgcggtggctcatgcctgtaatcccagcactttggaggctgaggcagaagaatcacttgaacccgagaggtggaggttgcagtgagctgagatcacaccactgcactccagcatgggt

SEQ ID NO: 111808 - DNA, 351 bp, Homo sapiens
tgcaaggctataggtggaagttcaaaatggtacaacttctttgcaggggaattttgcaatatctaattacatatgcatttgtcgtttgatgaagcaatctcctcctcatctaagaagatttcaagaataccaaaaaaatacatacacaaagtaattctctggggcattgtataaaatagctaaatattgaaaacaatctaaatacccaaccacagaagactggtttactcaattatggtaaaaccaagtaatggagtactatacagcaataagaaatgaatgaagaaggtttctgtgaactgatacagaatgatttccaagatatattgttaagtaaacaaaacatagtac

SEQ ID NO: 111809 - DNA, 637 bp, Homo sapiens
acattttatatgttaaagaatattgatctcagaccaataaccaatattatacttagcaataaaacattagaagcatttccactgatgttagtaattcaactataattaccattatttaacattattctggaagtgctcatcaatgtaacaatgagaaaaggaaatgagggaggtataaatatttgataggaagagataaaattatcatttttccaagatgatatggttgcttgagaaactattagacttaagacacttagaaagtttggcaattataacagaaatattaaaaaactaatagctttcctatatatatcagcaatactctgttaagatagataatggaagaaagaactcatatatgacagcaataaaaaaatcaaagcacctaggaataaacttaatgataaatgtacatatctacaaaactttaccatgaaatctagaaagaaatttgaatacagggaaaggcagtccacatttctgtattagaaaatttaaaattgtaaaggtattaaatttcctcaagctaaacctataaatttaacaaaatcccaataaaaatacctgggaactatttttagaatgtgaaaaaaaaactattttaaggcttatttagaaaaataaatgaagaatg

SEQ ID NO: 111810 - DNA, 654 bp, Homo sapiens
gaacccaccctgtctgctgagactaagttattaggtcaaagagatgcttgatatatgtggaatttgaatacagattcattgtgtgagccagctctgatttgttggttgcggctgcctggaactcctatgtttgggagcatctgagctcatcaggaaagagagctgtgatcccatagtgatttctgctttaggtgcaggagaacagtaacccaggatcctctatccttcaactagaacagtgttagatgtttcaaagacatttctgttagactggggttaatacggtggattgcttttctcaactataggaataattccttaagggattatgctgatgtttagcattagaacatcttcagtgctggccaaataccctgcctttctgtagattgcattcaaggcctagcccttgtatcactccttggtaaattcttaattgatttagttgtatttttctttacatttcattcccaagaatattctttgggctctgatcataattggatatttctcaagtttctttgcttataatttatgtaccatttaaaaagatcatttagttttgtctattatatgtttactttgacaagttttactgtcaatgggtgactttctcatgacaataaactcaaattctagaagttgaaatgtgtg

SEQ ID NO: 111811 - DNA, 248 bp, Homo sapiens
cgtgagccaccgcacccggcctccatatcccccttttaaaattctgtagtgtatggtaagtcatatcagatatcagacctaatttaaatttcattttagctttacaagtccaaaaacacagaatttatatattcagatactctagcactaattttagtcttaaaatattcccacgatattctgtacacaaaatgttctttttgttacaagagctgagttgcatatactgtagataaatcatattattt

SEQ ID NO: 111812 - DNA, 468 bp, Homo sapiens
tttcttgaatgtggtatcttcacatcttggaccttggtcagttgtactattaattattaaaaactaaaactttggcagttcctgcatttaaaaaaaaaaagcacccacatgttaaaagtaaaaatgtaatgtcaggaaattattaagaaaatattttagcctcttcctttgcccgcttactttattctttacttttttgtgtgtgtgttccatagacatttattcacttctccaaagagacataaaatcaaatttttaatattttaagatttaggatataatggctatatgtgtatgtatacatcataggaacagaaaaaaatgtacagcagtccccccttattcatgggggatgtgtcccaataccctcaatggatgcctgaaactgtggatagtaccaagccctaacatgtactatgttcttttaatctgataactgagatggtaactaagttattaatgggcagg

SEQ ID NO: 111813 - DNA, 794 bp, Homo sapiens
ctttaatataagaactcaaatttgacttcataggtttacttctgaataaacattgaacaatgaggtaacaaaaaaagctcaccctaggagtgctttctaagcacccggcccagagttcaggctttgcattgatcgtgtaatcctcgccacagccttttgaggtggtttatggcatcatcccatcttcacagaggaggaaatggacacgtagaagggttgcatctatgatgtgtgagtgggaagtcaggggcccacattcacagccagaccctctaacccggagcccacactcttcaccccagtgcctgctgcctttcacacatctgtgtcggaatgaaacagacacaggcccgctccggcctcctggcattctgctgatccatgatgcctacaatgcctgtgcatgtcagatgccctgcacccacatgccaggctgtgtgaagggcacccaagatgtgttttaatcaaacacaaagacacacagtcatggaaatgactgtcatgaagggaaaggttcatgctctcgggtccctgggaacaggaggcacacatggcccaccatgcagggccacacagagaagcaccggggttggtcaggaggccgagggaacctttattgtcgattccaagagaaagaatgggtgagagagagtagtatgaataagtgtagtgggatctgggagggaggagctgtccctaattatctggtgtctgcccggggattggttaagtcaggggacagggaccaggacatgagagcctgaaggacctggttggggtgtgagctttaggtg

SEQ ID NO: 111814 - DNA, 764 bp, Homo sapiens
gaaatttgtgtaggaagagagcagtttgaagatagatgttggagatgtttccattgttatgtgattttattgttgaatcaatgccaatatgtcacctgttaaaaattcttgtgtctgcgcttttaaaacatttacaaacagctttctaagctattttaaaaaaatcttccaaatacagagtttttgtctttttaaatccacttgttaaaaacgtaaaatgcaataccttctggttagttttcatttactgtttaaaatctagaaagatagaaatttgctggtctaattcaacaaaatttgtgaataatcgagggatgtaattaaaaagtaaattttgtgattttgtaaatacagccaatgatgcatttatttcatctgatgtagacataattgtgaaaaattatttttgtttaaaaaagctgtcaaaaaccaaatatcaaaacatgttgatctttaaactagattttttatcaaattcaagcttttcagtaaatgcaaactaatcagaaggtgttatgtaatctcaatttttaacatgcggggggacttttgggactgtggggcattcctaactggagatgtccaccaaagacatgtccaggccgggcgcagtggctcatgcctgtaatcctagcactttgagaggccgaggcaggcggatcacgaggtcaggagattgagaccatcctggctaacacagtgaaaccccgtctctactaaaaacacaaaaaattagttgggcgtggtggcgggcgcttgtggtc

SEQ ID NO: 111815 - DNA, 285 bp, Homo sapiens
gatgagaaacaggctagtcacatagtttcaaagcatctccttgaaaagtatccatcacaaaggtaaatatagtagctttacagtggaaaagtctggcagatccaccaaaaccaagtcatcaaagctaacgtcaccagaagtgagacggacatcatgtgactcccaataaaacacacagcagaagacacacatggcttcttgatattctggccaaaaatgcatgcctggctataatcgtgaggaaacatcagacacacccaaattgagaaacattgtcaaaaccac

SEQ ID NO: 111816 - DNA, 344 bp, Homo sapiens
ttatgtttcagacgcaccctgtccctactagaatgtgcggggaggttgtatggggtcgtgactgggtctcctctgacgtggctgctgggtgactgtaaaaagtctgggatgtatctatgaagtatggttccttgcatcatgagggattgaggctagagggcaggaataaattgttctgaaacagttggtacaggttccccatgggatttcttctggggagctttgagtggtggaggcagggaaagtgtggatggcattctcagatcccacctcactttgaggttcagtgatttgccatcagctctagttagtgagagcccatagtcggtgggtcagaacataag

SEQ ID NO: 111817 - DNA, 296 bp, Homo sapiens
ctggtatgttaatagttcattgcttttttttcttgtgacagggtcttctgtcactctggctggagtaccgtgttgcaaacgtggctcattgcagccttgacctttcagggtccagcgatcctccttcctctacctccctagtagctgggacatgcaccaccgtgtatggccaattaaaaaaaatttttttttgtagagatggggtctcatgttgcccaggctggttgcaagctcctggactcaagcaatcctcccatctcagcctcccaaagtattctgggattacaggtgtgagc

SEQ ID NO: 111818 - DNA, 342 bp, Homo sapiens
cccggctggtctcgaactcctggcttcaagcagtcctcctacctcagcctctcacatggtgggattacaggtgtgagccactgcaacagccccaggtagtttcaaagccagtattcttaactacctcaccaaagtgaatgtggaaaagagaaaaagggaatagtacttttaaaaaacagttaactatagaaaacccaatcaaaattcattttccaattaagttattgcttagtaaatgaaaatattaaataaagaaccggctactgctccacatggcaaggaagtgtacttcagtgctgacaaccccattactcaggagaacagtttaactgtgatatatgg

SEQ ID NO: 111819 - DNA, 259 bp, Homo sapiens
gggaagtccaaagttgaagggacacaacttgtaagtgccttcttgctggtggggactctgcagagccctaaggtggcagagggcatcaaggtgaaaagctgagtgtgctagtttaggtctccttataaagtcactaatgccactcctgtgataatccattcaagggggtagagccctcatgacccaatcacctcttaaaggcctcacctttcaacaatgccacactggggattcagctttttttttttttttttttttg

SEQ ID NO: 111820 - DNA, 2589 bp, Homo sapiens
  misc_feature (1)..(1): n is a, c, g, or t
  misc_feature (66)..(66): n is a, c, g, or t
naagaacacacacaaacaaatgtgtatagagcgcgacgcgcgcgttacatcaagcgacgaggcaanccggtccccgcccccagacacgccgggctctcggggcaccacagccatgtgctcgttagcgtcaggcgctaccggcggccggggcgctgtggagaatgaggaggacctgccagaactgtcggacagcggggacgaggccgcctgggaggatgaggacgatgcagatctcccccacggcaagcagcagaccccctgcctgttctgtaacaggttattcacatctgctgaagaaacattttcacactgtaagtctgagcatcagtttaatattgacagcatggttcataaacatggacttgaattttatggatacattaagctaataaattttattagacttaagaatcctacagttgagtacatgaattccatatacaacccagtgccttgggagaaagaagagtatttgaagccagtattagaagatgaccttttacttcaatttgatgtagaagatctttatgaaccggtgtcagtacccttctcataccccaatggactcagtgaaaatacatctgttgttgaaaaattgaaacatatggaagccagggcactgtctgctgaagccgcattggccagagcacgtgaggatctgcaaaaaatgaaacaatttgctcaggattttgtgatgcacacagatgtcagaacctgctcgtcatctactagtgtcattgcggacctccaggaggatgaggatggtgtttatttcagctcatacgggcattatgggatacatgaagaaatgctaaaggacaaaatacgaacagaaagctaccgagatttcatataccaaaatccacatatcttcaaagacaaggtagttttggatgttgggtgtggaactggaattctctctatgtttgctgctaaagctggggcgaagaaggttcttggagttgatcaatctgaaatactttaccaggcaatggatattataagactaaataaacttgaagatactattacactaattaaaggaaagattgaagaagttcatcttcctgtagaaaaagtagatgttatcatatctgagtggatgggctattttcttctgtttgagtctatgttagattctgtcctttatgcaaagaacaaatacttggcaaaaggaggctcggtctaccctgacatttgcactatcagccttgtagcagtgagtgatgtgaataaacatgctgatagaattgctttttgggatgatgtctatggcttcaagatgtcctgcatgaagaaagcagttattccagaagctgttgtggaagttttagatccgaagactcttatttcagaaccttgtggtattaagcatatagattgccatacgacgtctatctcagatttggaattttcatcagattttaccctgaaaatcacaaggacatccatgtgcacggcaattgctggctactttgatatatattttgagaagaattgccacaacagggtcgtgttctctacgggccctcagagcaccaaaacacactggaaacaaacagtatttctactggaaaaaccattttcagttaaagcaggtgaagccttgaaaggaaaggtcacagttcacaagaataagaaagatccacgttctctcaccgtgaccctcacgttgaataattcaactcaaacttatggtctccagtgaaacagccataaaagcacactaccttgtagtttttaatgtgggggtagagtgggtcagcaggagggagctggttttatgtgagcagatggatggatgatggaccctttcctaatgagcctcctcaataagagagaagttctcattgtgggaatctgacatagttcagctgaggaagagaatcagctgatcctcatggtctgccacgtaatcattttcttagacgtttgctccaccagatttaaccaaatgtaactcccacattgagtttatctatattgaaaatcatttacattggcctatatttggaagagagatagtcttttgtttttaataagtttcttactataaattttaaacaaattggttagttatttggatattttattaaactagtaacacaggtactacacattttattatggactcctctgaggaggagtttttaattgtatttgctagaaaatcaggatgtaataaagatttgtataaaaaaactaaaatatggaaaagagcttcagccttcatatacaaatcatatatgcagacagcctagttgattatctagcatacttagggttctcattttgtagtttcttccctctttgtgactattccttagccttatagatttctagtactgcccaggaaatctaatttcaatacatttatcctaggtttcatgaaagtttttaaagattgggataaatatgtacttatttactaacgtattatctttttcaaaccagatttatgtgcaaaggttaaacatgtaactgttactaagcagtctataaagttgtcatttacaattactgattcaatttgaaatgtagaataaaattttaataaaatgtatccttataaaatattttaaaaatatt

SEQ ID NO: 111821 - DNA, 2653 bp, Homo sapiens
cgcctcgaggccggaagcgattgcgagccagcgcgcgcgcttcggcgttcccggcggtctgcgaagtttccggagccccggtcccgccgcgggttcgcgcttgtgctcgcgctcgttcctggagtcggcggccgctgcgcgcgctcgttgcccaacccggtccccgcccccagacacgccgggctctcggggcaccacagccatgtgctcgttagcgtcaggcgctaccggcggccggggcgctgtggagaatgaggaggacctgccagaactgtcggacagcggggacgaggccgcctgggaggatgaggacgatgcagatctcccccacggcaagcagcagaccccctgcctgttctgtaacaggttattcacatctgctgaagaaacattttcacactgtaagtctgagcatcagtttaatattgacagcatggttcataaacatggacttgaattttatggatacattaagctaataaattttattagacttaagaatcctacagttgagtacatgaattccatatacaacccagtgccttgggagaaagaagagtatttgaagccagtattagaagatgaccttttacttcaatttgatgtagaagatctttatgaaccggtgtcagtacccttctcataccccaatggactcagtgaaaatacatctgttgttgaaaaattgaaacatatggaagccagggcactgtctgctgaagccgcattggccagagcacgtgaggatctgcaaaaaatgaaacaatttgctcaggattttgtgatgcacacagatgtcagaacctgctcgtcatctactagtgtcattgcggacctccaggaggatgaggatggtgtttatttcagctcatacgggcattatgggatacatgaagaaatgctaaaggacaaaatacgaacagaaagctaccgagatttcatataccaaaatccacatatcttcaaagacaaggtagttttggatgttgggtgtggaactggaattctctctatgtttgctgctaaagctggggcgaagaaggttcttggagttgatcaatctgaaatactttaccaggcaatggatattataagactaaataaacttgaagatactattacactaattaaaggaaagattgaagaagttcatcttcctgtagaaaaagtagatgttatcatatctgagtggatgggctattttcttctgtttgagtctatgttagattctgtcctttatgcaaagaacaaatacttggcaaaaggaggctcggtctaccctgacatttgcactatcagccttgtagcagtgagtgatgtgaataaacatgctgatagaattgctttttgggatgatgtctatggcttcaagatgtcctgcatgaagaaagcagttattccagaagctgttgtggaagttttagatccgaagactcttatttcagaaccttgtggtattaagcatatagattgccatacgacgtctatctcagatttggaattttcatcagattttaccctgaaaatcacaaggacatccatgtgcacggcaattgctggctactttgatatatattttgagaagaattgccacaacagggtcgtgttctctacgggccctcagagcaccaaaacacactggaaacaaacagtatttctactggaaaaaccattttcagttaaagcaggtgaagccttgaaaggaaaggtcacagttcacaagaataagaaagatccacgttctctcaccgtgaccctcacgttgaataattcaactcaaacttatggtctccagtgaaacagccataaaagcacactaccttgtagtttttaatgtgggggtagagtgggtcagcaggagggagctggttttatgtgagcagatggatggatgatggaccctttcctaatgagcctcctcaataagagagaagttctcattgtgggaatctgacatagttcagctgaggaagagaatcagctgatcctcatggtctgccacgtaatcattttcttagacgtttgctccaccagatttaaccaaatgtaactcccacattgagtttatctatattgaaaatcatttacattggcctatatttggaagagagatagtcttttgtttttaataagtttcttactataaattttaaacaaattggttagttatttggatattttattaaactagtaacacaggtactacacattttattatggactcctctgaggaggagtttttaattgtatttgctagaaaatcaggatgtaataaagatttgtataaaaaaactaaaatatggaaaagagcttcagccttcatatacaaatcatatatgcagacagcctagttgattatctagcatacttagggttctcattttgtagtttcttccctctttgtgactattccttagccttatagatttctagtactgcccaggaaatctaatttcaatacatttatcctaggtttcatgaaagtttttaaagattgggataaatatgtacttatttactaacgtattatctttttcaaaccagatttatgtgcaaaggttaaacatgtaactgttactaagcagtctataaagttgtcatttacaattactgattcaatttgaaatgtagaataaaattttaataaaatgta

SEQ ID NO: 111822 - DNA, 2607 bp, Homo sapiens
cgcctcgaggccggaagcgattgcgagccagcgcgcgcgcttcggcgttcccggcggtctgcgaagtttccggagccccggtcccgccgcgggttcgcgcttgtgctcgcgctcgttcctggagtcggcggccgctgcgcgcgctcgttgcccaacccggtccccgcccccagacacgccgggctctcggggcaccacagccatgtgctcgttagcgtcaggcgctaccggttattcacatctgctgaagaaacattttcacactgtaagtctgagcatcagtttaatattgacagcatggttcataaacatggacttgaattttatggatacattaagctaataaattttattagacttaagaatcctacagttgagtacatgaattccatatacaacccagtgccttgggagaaagaagagtatttgaagccagtattagaagatgaccttttacttcaatttgcagaaagcaaaacagaaactggccaaacagtttgaagaattttgaaatcaaaatacaaaatgagatgtagaagatctttatgaaccggtgtcagtacccttctcataccccaatggactcagtgaaaatacatctgttgttgaaaaattgaaacatatggaagccagggcactgtctgctgaagccgcattggccagagcacgtgaggatctgcaaaaaatgaaacaatttgctcaggattttgtgatgcacacagatgtcagaacctgctcgtcatctactagtgtcattgcggacctccaggaggatgaggatggtgtttatttcagctcatacgggcattatgggatacatgaagaaatgctaaaggacaaaatacgaacagaaagctaccgagatttcatataccaaaatccacatatcttcaaagacaaggtagttttggatgttgggtgtggaactggaattctctctatgtttgctgctaaagctggggcgaagaaggttcttggagttgatcaatctgaaatactttaccaggcaatggatattataagactaaataaacttgaagatactattacactaattaaaggaaagattgaagaagttcatcttcctgtagaaaaagtagatgttatcatatctgagtggatgggctattttcttctgtttgagtctatgttagattctgtcctttatgcaaagaacaaatacttggcaaaaggaggctcggtctaccctgacatttgcactatcagccttgtagcagtgagtgatgtgaataaacatgctgatagaattgctttttgggatgatgtctatggcttcaagatgtcctgcatgaagaaagcagttattccagaagctgttgtggaagttttagatccgaagactcttatttcagaaccttgtggtattaagcatatagattgccatacgacgtctatctcagatttggaattttcatcagattttaccctgaaaatcacaaggacatccatgtgcacggcaattgctggctactttgatatatattttgagaagaattgccacaacagggtcgtgttctctacgggccctcagagcaccaaaacacactggaaacaaacagtatttctactggaaaaaccattttcagttaaagcaggtgaagccttgaaaggaaaggtcacagttcacaagaataagaaagatccacgttctctcaccgtgaccctcacgttgaataattcaactcaaacttatggtctccagtgaaacagccataaaagcacactaccttgtagtttttaatgtgggggtagagtgggtcagcaggagggagctggttttatgtgagcagatggatggatgatggaccctttcctaatgagcctcctcaataagagagaagttctcattgtgggaatctgacatagttcagctgaggaagagaatcagctgatcctcatggtctgccacgtaatcattttcttagacgtttgctccaccagatttaaccaaatgtaactcccacattgagtttatctatattgaaaatcatttacattggcctatatttggaagagagatagtcttttgtttttaataagtttcttactataaattttaaacaaattggttagttatttggatattttattaaactagtaacacaggtactacacattttattatggactcctctgaggaggagtttttaattgtatttgctagaaaatcaggatgtaataaagatttgtataaaaaaactaaaatatggaaaagagcttcagccttcatatacaaatcatatatgcagacagcctagttgattatctagcatacttagggttctcattttgtagtttcttccctctttgtgactattccttagccttatagatttctagtactgcccaggaaatctaatttcaatacatttatcctaggtttcatgaaagtttttaaagattgggataaatatgtacttatttactaacgtattatctttttcaaaccagatttatgtgcaaaggttaaacatgtaactgttactaagcagtctataaagttgtcatttacaattactgattcaatttgaaatgtagaataaaattttaataaaatgtatccttataaaatattttaaaaatatt

SEQ ID NO: 111823 - DNA, 2316 bp, Homo sapiens
cgcctcgaggccggaagcgattgcgagccagcgcgcgcgcttcggcgttcccggcggtctgcgaagtttccggagccccggtcccgccgcgggttcgcgcttgtgctcgcgctcgttcctggagtcggcggccgctgcgcgcgctcgttgcccaacccggtccccgcccccagacacgccgggctctcggggcaccacagccatgtgctcgttagcgtcaggcgctaccggcggccggggcgctgtggagaatgaggaggacctgccagaactgtcggacagcggggacgaggccgcctgggaggatgaggacgatgcagatctcccccacggcaagcagcagaccccctgcctgttctgtaacaggttattcacatctgctgaagaaacattttcacactgtaagtctgagcatcagtttaatattgacagcatggttcataaacatggacttgaattttatggatacattaagctaataaattttattagacttaagaatcctacagttgagtacatgaattccatatacaacccagtgccttgggagaaagaagagtatttgaagccagtattagaagatgaccttttacttcaatttgatgtagaagatctttatgaaccggtgtcagtacccttctcataccccaatggactcagtgaaaatacatctgttgttgaaaaattgaaacatatggaagccagggcactgtctgctgaagccgcattggccagagcacgtgaggatctgcaaaaaatgaaacaatttgctcaggattttgtgatgcacacagatgtcagaacctgctcgtcatctactagtgtcattgcggacctccaggaggatgaggatggtgtttatttcagctcatacgggcattatgggatacatgaagaaatgctaaaggacaaaatacgaacagaaagctaccgagatttcatataccaaaatccacatatcttcaaagacaaggtagttttggatgttgggtgtggaactggaattctctctatgtttgctgctaaagctggggcgaagaaggttcttggagttgatcaatctgaaatactttaccaggcaatggatattataagactaaataaacttgaagatactattacactaattaaaggaaagattgaagaagttcatcttcctgtagaaaaagtagatgttatcatatctgagtggatgggctattttcttctgtttgagtctatgttagattctgtcctttatgcaaagaacaaatacttggcaaaaggaggctcggtctaccctgacatttgcactatcagccttgtagcagtgagtgatgtgaataaacatgctgatagaattgctttttgggatgatgtctatggcttcaagatgtcctgcatgaagaaagcagttattccagaagctgttgtggaagttttagatccgaagactcttatttcagaaccttgtggtattaagcatatagattgccatacgacgtctatctcagatttggaattttcatcagattttaccctgaaaatcacaaggacatccatgtgcacggcaattgctggctactttgatatatattttgagaagaattgccacaacagggtcgtgttctctacgggccctcagagcaccaaaacacactggaaacaaacagtatttctactggaaaaaccattttcagttaaagcaggtgaagccttgaaaggaaaggtcacagttcacaagaataagaaagatccacgttctctcaccgtgaccctcacgttgaataattcaactcaaacttatggtctccagtgaaacagccataaaagcacactaccttgtagtttttaatgtgggggtagagtgggtcagcaggagggagctggttttatgtgagcagatggatggatgatggaccctttcctaatgagcctcctcaataagagagaagttctcattgtgggaatctgacatagttcagctgaggaagagaatcagctgatcctcatggtctgccacgtaatcattttcttagacgtttgctccaccagatttaaccaaatgtaactcccacattgagtttatctatattgaaaatcatttacattggcctatatttggaagagagatagtcttttgtttttaataagtttcttactataaattttaaacaaattggttagttatttggatattttattaaactagtaacacaggtactacacattttattatggactcctctgaggaggagtttttaattgtatttgctagaaaatcaggatgtaataaagatctggcctcgttggcctcagcggtggagctctcggcca

SEQ ID NO: 111824 - DNA, 2679 bp, Homo sapiens
cgcctcgaggccggaagcgattgcgagccagcgcgcgcgcttcggcgttcccggcggtctgcgaagtttccggagccccggtcccgccgcgggttcgcgcttgtgctcgcgctcgttcctggagtcggcggccgctgcgcgcgctcgttgcccaacccggtccccgcccccagacacgccgggctctcggggcaccacagccatgtgctcgttagcgtcaggcgctaccggcggccggggcgctgtggagaatgaggaggacctgccagaactgtcggacagcggggacgaggccgcctgggaggatgaggacgatgcagatctcccccacggcaagcagcagaccccctgcctgttctgtaacaggttattcacatctgctgaagaaacattttcacactgtaagtctgagcatcagtttaatattgacagcatggttcataaacatggacttgaattttatggatacattaagctaataaattttattagacttaagaatcctacagttgagtacatgaattccatatacaacccagtgccttgggagaaagaagagtatttgaagccagtattagaagatgaccttttacttcaatttgatgtagaagatctttatgaaccggtgtcagtacccttctcataccccaatggactcagtgaaaatacatctgttgttgaaaaattgaaacatatggaagccagggcactgtctgctgaagccgcattggccagagcacgtgaggatctgcaaaaaatgaaacaatttgctcaggattttgtgatgcacacagatgtcagaacctgctcgtcatctactagtgtcattgcggacctccaggaggatgaggatggtgtttatttcagctcatacgggcattatgggatacatgaagaaatgctaaaggacaaaatacgaacagaaagctaccgagatttcatataccaaaatccacatatcttcaaagacaaggtagttttggatgttgggtgtggaactggaattctctctatgtttgctgctaaagctggggcgaagaaggttcttggagttgatcaatctgaaatactttaccaggcaatggatattataagactaaataaacttgaagatactattacactaattaaaggaaagattgaagaagttcatcttcctgtagaaaaagtagatgttatcatatctgagtggatgggctattttcttctgtttgagtctatgttagattctgtcctttatgcaaagaacaaatacttggcaaaaggaggctcggtctaccctgacatttgcactatcagccttgtagcagtgagtgatgtgaataaacatgctgatagaattgctttttgggatgatgtctatggcttcaagatgtcctgcatgaagaaagcagttattccagaagctgttgtggaagttttagatccgaagactcttatttcagaaccttgtggtattaagcatatagattgccatacgacgtctatctcagatttggaattttcatcagattttaccctgaaaatcacaaggacatccatgtgcacggcaattgctggctactttgatatatattttgagaagaattgccacaacagggtcgtgttctctacgggccctcagagcaccaaaacacactggaaacaaacagtatttctactggaaaaaccattttcagttaaagcaggtgaagccttgaaaggaaaggtcacagttcacaagaataagaaagatccacgttctctcaccgtgaccctcacgttgaataattcaactcaaacttatggtctccagtgaaacagccataaaagcacactaccttgtagtttttaatgtgggggtagagtgggtcagcaggagggagctggttttatgtgagcagatggatggatgatggaccctttcctaatgagcctcctcaataagagagaagttctcattgtgggaatctgacatagttcagctgaggaagagaatcagctgatcctcatggtctgccacgtaatcattttcttagacgtttgctccaccagatttaaccaaatgtaactcccacattgagtttatctatattgaaaatcatttacattggcctatatttggaagagagatagtcttttgtttttaataagtttcttactataaattttaaacaaattggttagttatttggatattttattaaactagtaacacaggtactacacattttattatggactcctctgaggaggagtttttaattgtatttgctagaaaatcaggatgtaataaagatttgtataaaaaaactaaaatatggaaaagagcttcagccttcatatacaaatcatatatgcagacagcctagttgattatctagcatacttagggttctcattttgtagtttcttccctctttgtgactattccttagccttatagatttctagtactgcccaggaaatctaatttcaatacatttatcctaggtttcatgaaagtttttaaagattgggataaatatgtacttatttactaacgtattatctttttcaaaccagatttatgtgcaaaggttaaacatgtaactgttactaagcagtctataaagttgtcatttacaattactgattcaatttgaaatgtagaataaaattttaataaaatgtatccttataaaatattttaaaaatatt

SEQ ID NO: 111825 - DNA, 2543 bp, Homo sapiens
cgcctcgaggccggaagcgattgcgagccagcgcgcgcgcttcggcgttcccggcggtctgcgaagtttccggagccccggtcccgccgcgggttcgcgcttgtgctcgcgctcgttcctggagtcggcggccgctgcgcgcgctcgttgcccaacccggtccccgcccccagacacgccgggctctcggggcaccacagccatgtgctcgttagcgtcaggcgctaccggttattcacatctgctgaagaaacattttcacactgtaagtctgagcatcagtttaatattgacagcatggttcataaacatggacttgaattttatggatacattaagctaataaattttattagacttaagaatcctacagttgagtacatgaattccatatacaacccagtgccttgggagaaagaagagtatttgaagccagtattagaagatgaccttttacttcaatttgatgtagaagatctttatgaaccggtgtcagtacccttctcataccccaatggactcagtgaaaatacatctgttgttgaaaaattgaaacatatggaagccagggcactgtctgctgaagccgcattggccagagcacgtgaggatctgcaaaaaatgaaacaatttgctcaggattttgtgatgcacacagatgtcagaacctgctcgtcatctactagtgtcattgcggacctccaggaggatgaggatggtgtttatttcagctcatacgggcattatgggatacatgaagaaatgctaaaggacaaaatacgaacagaaagctaccgagatttcatataccaaaatccacatatcttcaaagacaaggtagttttggatgttgggtgtggaactggaattctctctatgtttgctgctaaagctggggcgaagaaggttcttggagttgatcaatctgaaatactttaccaggcaatggatattataagactaaataaacttgaagatactattacactaattaaaggaaagattgaagaagttcatcttcctgtagaaaaagtagatgttatcatatctgagtggatgggctattttcttctgtttgagtctatgttagattctgtcctttatgcaaagaacaaatacttggcaaaaggaggctcggtctaccctgacatttgcactatcagccttgtagcagtgagtgatgtgaataaacatgctgatagaattgctttttgggatgatgtctatggcttcaagatgtcctgcatgaagaaagcagttattccagaagctgttgtggaagttttagatccgaagactcttatttcagaaccttgtggtattaagcatatagattgccatacgacgtctatctcagatttggaattttcatcagattttaccctgaaaatcacaaggacatccatgtgcacggcaattgctggctactttgatatatattttgagaagaattgccacaacagggtcgtgttctctacgggccctcagagcaccaaaacacactggaaacaaacagtatttctactggaaaaaccattttcagttaaagcaggtgaagccttgaaaggaaaggtcacagttcacaagaataagaaagatccacgttctctcaccgtgaccctcacgttgaataattcaactcaaacttatggtctccagtgaaacagccataaaagcacactaccttgtagtttttaatgtgggggtagagtgggtcagcaggagggagctggttttatgtgagcagatggatggatgatggaccctttcctaatgagcctcctcaataagagagaagttctcattgtgggaatctgacatagttcagctgaggaagagaatcagctgatcctcatggtctgccacgtaatcattttcttagacgtttgctccaccagatttaaccaaatgtaactcccacattgagtttatctatattgaaaatcatttacattggcctatatttggaagagagatagtcttttgtttttaataagtttcttactataaattttaaacaaattggttagttatttggatattttattaaactagtaacacaggtactacacattttattatggactcctctgaggaggagtttttaattgtatttgctagaaaatcaggatgtaataaagatttgtataaaaaaactaaaatatggaaaagagcttcagccttcatatacaaatcatatatgcagacagcctagttgattatctagcatacttagggttctcattttgtagtttcttccctctttgtgactattccttagccttatagatttctagtactgcccaggaaatctaatttcaatacatttatcctaggtttcatgaaagtttttaaagattgggataaatatgtacttatttactaacgtattatctttttcaaaccagatttatgtgcaaaggttaaacatgtaactgttactaagcagtctataaagttgtcatttacaattactgattcaatttgaaatgtagaataaaattttaataaaatgtatccttataaaatattttaaaaatatt

SEQ ID NO: 111826 - DNA, 1527 bp, Homo sapiens
gtgcaggtactccgtggttccgcccaacaagaagaagagctagggctattttcttctgtttgagtctatgttagattctgtcctttatgcaaagaacaaatacttggcaaaaggaggctcggtctaccctgacatttgcactatcagccttgtagcagtgagtgatgtgaataaacatgctgatagaattgctttttgggatgatgtctatggcttcaagatgtcctgcatgaagaaagcagttattccagaagctgttgtggaagttttagatccgaagactcttatttcagaaccttgtggtattaagcatatagattgccatacgacgtctatctcagatttggaattttcatcagattttaccctgaaaatcacaaggacatccatgtgcacggcaattgctggctactttgatatatattttgagaagaattgccacaacagggtcgtgttctctacgggccctcagagcaccaaaacacactggaaacaaacagtatttctactggaaaaaccattttcagttaaagcaggtgaagccttgaaaggaaaggtcacagttcacaagaataagaaagatccacgttctctcaccgtgaccctcacgttgaataattcaactcaaacttatggtctccagtgaaacagccataaaagcacactaccttgtagtttttaatgtgggggtagagtgggtcagcaggagggagctggttttatgtgagcagatggatggatgatggaccctttcctaatgagcctcctcaataagagagaagttctcattgtgggaatctgacatagttcagctgaggaagagaatcagctgatcctcatggtctgccacgtaatcattttcttagacgtttgctccaccagatttaaccaaatgtaactcccacattgagtttatctatattgaaaatcatttacattggcctatatttggaagagagatagtcttttgtttttaataagtttcttactataaattttaaacaaattggttagttatttggatattttattaaactagtaacacaggtactacacattttattatggactcctctgaggaggagtttttaattgtatttgctagaaaatcaggatgtaataaagatttgtataaaaaaactaaaatatggaaaagagcttcagccttcatatacaaatcatatatgcagacagcctagttgattatctagcatacttagggttctcattttgtagtttcttccctctttgtgactattccttagccttatagatttctagtactgcccaggaaatctaatttcaatacatttatcctaggtttcatgaaagtttttaaagattgggataaatatgtacttatttactaacgtattatctttttcaaaccagatttatgtgcaaaggttaaacatgtaactgttactaagcagtctataaagttgtcatttacaattactgattcaatttgaaatgtagaataaaattttaataaaatgtatccttataaaatattttaaaaatatt

SEQ ID NO: 111827 - DNA, 561 bp, Homo sapiens
gcggccgctgcgcgcgctcgttgcccaacccggtccccgcccccagacacgccgggctctcggggcaccacagccatgtgctcgttagcgtcaggcgctaccggtgggtaccctggcccctcagcacccggctcgtccagccccaggccgcgccgctgtggggccggtggaagaccctccgggacacgggcccgggcagggtggggggctcgcagggatcatgaaggaggtgctgagtgagggccgcgggcgaacggggcggaggagagcccatcgtcacctgctcctcgagcccccgggccgcaccggtgtccgaggccgatctgattgttgtgtgtgtgtgttaggcggccggggcgctgtggagaatgaggaggacctgccagaactgtcggacagcggggacgaggccgcctgggaggatgaggacgatgcagatctcccccacggcaagcagcagaccccctgcctgttctgtaacaggttcgtccgcctcagcgcctggcctctgccctagggtgcccgggcgcgtggggtctgtgtgcccaggaacgccttcgg

SEQ ID NO: 111828 - DNA, 424 bp, Homo sapiens
aaaaaaacaactgtacaatgactatcatataagttattcctataaaagtattcaattgggtgaccctgctgcccaaggcaggctgtttttacgaggctgtttgacaggaaggttctgagcagcccatggggtgagagctgacttgccctgcatatgctgtctccctgacctgctcacctcactccagatcccttcctgtcttccgcagtgccctgggtcccggagagcttcacactcagcaggcaagccaactgggtgcacaaaccttgggtcctctgtacttaggcacagcctgctgtcttttctgggtgcctcagggctctttttctttgaagtgcaaatgctaaccagggaggtttctgggtaacacagattcagttccccctcactgcagggagatgcacttccattacaaaatacttcc

SEQ ID NO: 111829 - DNA, 740 bp, Homo sapiens
cgaggtgggtggattgcctgagcccaggagttcgagaccacatgggcaacatggcgaaacctgtctctactaaaaatacaaaaattagccaggcgtggtggcgcacgcctgtaatcccagctactcaggaggctgaggcacaaagaatcgcttgaacctgggagacggaggttgcagtgagccgagatcacaccactgcactccaagcctgggtgacacagtgagactcagtctcaaacaaaatcaaagttgcatgattatttttaacataagagcttaggctcatatgataggccatgacttttgaaaagctcataaaaagcatgttgatatatttttttgtgggttagaggctgaagtgcgaccccaaaacaagtcactacaagtgaaaaggtgctgtagcctggggtctgggctgaaaggacatcctcctttctggtggggcaagccatcgggagtcctggcgtagctgtggccgggcccgggaggccaagggggagccaaggagctgcacctacttgtcacatgaccaaacatcactctcaggtcacgtgcagtgagagaacacagctgggcaggagcgagcctgggcactgcagagcccatctgctctgtcccttcaacatctgtgctgtctgcccgacagggagaccacactggtgctgctgctccggagtccagcagtccctcagctgctgcttcatgggctgtgtggcccggtgagtcagcccaccctttga

SEQ ID NO: 111830 - DNA, 577 bp, Homo sapiens
gtacagcagcacttaacgataacatttgtaatagcacttacaatactgtcctccttttctttccattggcatttggaggacagggttcctgttggactgaaaaaaaacatgggtaacgtgcctctattttcatattgctcttatgtctagatgttctatccattattgaaggtgaaatattgaggtctgcaactacaagagtaaaactatctagttctcccttcaattatgtcaatgctggtgtcacatattttgaggctctgttgtttgctgcatatatgttacagttgttatagcttcttgatggatttaccctattgttaatagagatggtgtctgatttacaatggtttgacttgcaattttttggttctacaatggtgtaaaaccattgcacttttgacttaatgtgtagtagtcaataaattacattaagatactcaacactttagtatacaataagctttgtgttagattattttgcccaattgtaagctaatatacattttggacttaggatattttcaattaatgatggaaatataaaagaatttatcccaaggaaaataatttcttt

SEQ ID NO: 111831 - DNA, 356 bp, Homo sapiens
aatatttaaatcatgaatgttgaacaaccaatattttaacaatttattgcatagagctactaataatattaaataaaactatggaaaaaaaggacattttactttgtgccaggtatgcttctaagcatagttctacatcttaacttctagtccctgtctacatattttcccttatgtgtagccttagttatactattttgtattcttttctgttttaaaatatatataaactctttcctgttcttttacataagataaataaacttaattttttagctgcatagtattttctcatgttaatgtattgtagtttactaagtcataactttatttttatttaatttgtgaacaataaa

SEQ ID NO: 111832 - DNA, 445 bp, Homo sapiens
tattcaaataaccagacagtttctatttccctaagtggatcttaactgctgcagcacaaattcaattcaactcctcaatgactgcacctggttctcttttagggccacaaataggagcgtggtggaattcctgcctgtccacctaaacctctgtcacctgatccttgttacctttcctgacgcacccgctgcaaactccacccaacctggtctggctcatagcactacttgtgtgctcctaacctggcattttcccccatagttccatgcctcttaccccaactctactgaaacaggacaatgggaaaatgaggcaccctggcatttgaggaagcattgtagagaaggagggaaagttagggcttttctggtgtttattttatacattgatagaaacgacatcagcaaaaaagaatgatttatgctgaggttgatcttcctgacc

SEQ ID NO: 111833 - DNA, 366 bp, Homo sapiens
cacatagtagttgcttaatcaatgtctttaaaatgaatgaggatatgatataatacgttttcagatgtaataagtaagctgcgaacccaaagcacagtggaatcaatttcatcaaccctgctcataacctctgctgctaccaccttatttcaaactaccagtctcccatctgaccttccgctgtgacttctgagctcctgcagccattgccgttgtagacccctgaggatctgtcttccacacagctgcatgtcccgcctctgctcaaaactctccagcaacatcttcaactcacctcttagcataagagccacagtctttgtagaacatgcatggttccacatcatctgcccctaccgtgtgtca

SEQ ID NO: 111834 - DNA, 142 bp, Homo sapiens
aaatgaggggctgggtcaccttggacctccatgcagcatatgcatcttctgtctgctgcttcctcaaaacacaatacagctggacatggggtgcagggctcacgcctgtaattccagctacttgggaggccagggcaggggg

SEQ ID NO: 111835 - DNA, 433 bp, Homo sapiens
tttagtagggatggggtttcactgtgttagccaggatggtctcaatctcctgacctcatgatccgcctgccttggcctcccaaagtgctgggattacaggtgtgagccactgagcctggccctatttatttgttttttaaagagaccaggtcacgctgtgttgcctaggctgcgttagaactcctgggctcaagagatgctcctgcctcagcctccaaagtagccgcgatatagcacgtaccaccatgcctggctctctttcagttaactttaaagaaatctggtgtttttgtttttgttttttgagacagagtctcgctctgtcacccaggcaggagtgcagtggcactatctcagctcactgcaacctctgcctcctgggttcaaacaattcttgtgcctcagcgttctgattagctgggattacaggcgc

SEQ ID NO: 111836 - DNA, 366 bp, Homo sapiens
gtcagtttctccagaaaggcctgcacaatggagttttcatgtaaaaaatttcttacatcctgattttaaaaaatcagatgatcaggaaacattgagttccgattcctttgttacaacctccactaaagctaagtaacagctgctgtattaagatggggctccccctctccatcccacacctgcctcccttacatgcctaactcctgttgtaaatagggaccctaatctgatgtttttgtagtccctttcctaggggcactgtggggaggtggaaggaatttcacctttgttgttggacagacttagatttgagaactggttctactacttactgtttgtgtggtctgggacaagtcacttggtcca

SEQ ID NO: 111837 - DNA, 414 bp, Homo sapiens
aaaaaaagaaaagttgaacttacacacctggctcacgcttgtggctctcgttacgtttcccttgggcaacatcactggggggtagaagtcgacacactttttctataaaagaccagactgtaaatattgtcaactttgcagggtgcacagtctctgttgtagtgactccactctgcagttgcagaggtgaagctgccacacataaaatatatacaaataggcatggctgtgttccaagaaaacattatttgcaaaaacaggtgttgggctggatttggcccatggactgtatttcactgacctctgctgtagaaaaaaaatcagctgtgaactgttagcagccagtactcatattggctggggatggcggtgggggaggggtgcacctgcctggtaaaaggatctgggggagga

SEQ ID NO: 111838 - DNA, 341 bp, Homo sapiens
ggagccaagatcaaggggtcaaccatggaggggctggacaggaggtggcactgtgctcccagcacacccagatgggacatttcactcactggggcccggagtagacaacaagctttctatgtggcagctcagcgaagccctgctccagggtctccttctgaggcctgaagtcatttaaaaatctgctttgcccctaaccccaacctggctcttagctccagcagctgtcacagagcctggtcaggctgttttcccaccctctacttccccttgtcctggcccatgtccacccttctccctgcccatgtccaccattctccctatcccagcctcactctgac

SEQ ID NO: 111839 - DNA, 640 bp, Homo sapiens
gaagcaggctttttggtttttgccagaaagcccaaaataaaagaaaagactcccagccctttgtgaggccaaggtgggtggatcacttgaggtcaggagtttgagaccagcctggccaacatggtgaaaccctgtctctactaaaaatacaaaaattagccaggcatggtggtgggcacttgtaatcccttccgagtagctgggagtacaggcgcccgccgtcatccctggctaattttttgtgtttttagtagagacgtggtttcactgtgttagccaggatggtctcgatctcctaaccttgtgatccacccgcctcggcctcccaaagtgctggaattacaggtgcaagccaccgctcccggcctagagacaatttcaaaagcaaattgttcagttatcttttgagtagtggtattaaatttatactcaaccatctacatgatcacagtttgacccatttgtgacaaatttcagacaattctaggattagaatggctacctataattttcggttatagaagagagtgaaacttacctgttggcaccaggcttttacccaatggtagatgtttccttcttataatttgttaacattttgggtgatcatggagaagtaccttctaaggacttgagaatg

SEQ ID NO: 111840 - DNA, 337 bp, Homo sapiens
gacagggtttcaccatgttagccacgatggtctcgatctcctgacctcgtgatccgcccgccttggcctcccaaagtgctgggattacaggtgtgagccaccgcgcccagcctggtttccattcattctgagggaggagcaaagggctgtgttcctggatgcgggttcctgcttggctgttatttatttttttttaaagagacagggtctcgctctgttgcccaggttggagtgtagtggcacgatcatagctcactgcaactttgaacccctgggctcaaagcagtccttctgcctcagccagtcaaagtgctgggatcacaaggtgtgagccact

SEQ ID NO: 111841 - DNA, 180 bp, Homo sapiens
caacagacacacacacacaaacatgacattgcacttggcctaacgttggcaacacacacacaaacatgacatcgcacttggcctaacattggcaacagacacacacacaaacatgacatcgcactcggcctaacgttggcaacagacacacacacaaacatgacatcgcactcggcctaa

SEQ ID NO: 111842 - DNA, 407 bp, Homo sapiens
accactgaatcttgttaaacaaaatcttcccctctaatgtgaggggatgctggtggtcatggtaaccaagagaaagaggctcttactgttagcagctccgatgaggtagctgacctgggctgaccaagtttgaagtttcagggcccgtgttcacttctccacctcccttcccctcccccacctaccagatcatactggggtgacatgcagtgtgtatttgatgatcattagtctctgaaacaccagaaacaacctctttgggttttttttggttggtctttaccagtgagagggtctggatcctctctcttcctgaagaggaaggaatcccaacagcccctggaacgctggactggtcttaaggccaagactgtagccactggctttcctcaccacctctgtccacg

SEQ ID NO: 111843 - DNA, 476 bp, Homo sapiens
taaacaatccttacaggtagcagctcatcatcatagttgtactgacacaagtttaagcctttgagccaatttttgtagatgtgtttccttggatgacctgattagagacaaagggaaaggttcattaatatttcctctctattaattaattcattcattcttaatcagctttctcaggttgactgttttctctctgtttagaaaagagctattggaaagtaacaaaattttactagattctttctaggagagaaagatggcctggttttttctcattgttactatcaaacagcaacctcagacctcttcagcggaaggtgtagcatgcgtgagagcagacttataagtatcatggggccagttttaggccatttgtgattcatgggccccctcacacaatgctgacctttgaatgaatttggaaatttgctcagaaccaaagattaattttagtggaggaaatatacttgagaata

SEQ ID NO: 111844 - DNA, 186 bp, Homo sapiens
ggggagaaaagaatgccgccctcacacaggcaaggaagctgggcacccgggggtggggtgctgagaatagacatttttgcattggggccttcctccatatcacccctacttccaaccccacttaaggtgcctttcttggaggagtctccgatgtctaaaatgtgcccatgctgagctccagggact

SEQ ID NO: 111845 - DNA, 198 bp, Homo sapiens
ttcgagttcactgttgcctgttgggatggccctgccctggatctgtggaatgagcagccgctcctgtttgcaccaactgaaatcctctcttctgcttgaaatttttggtagccttgctggcagctcagaatgaggctcagttaggacggggagctcatgaaccccagggtgcaagtactggatgtggtcctaactagc

SEQ ID NO: 111846 - DNA, 471 bp, Homo sapiens
cacattgcctttgtcacagcaccacctagtggtaattaacagcactttcttccaataattcagtaatctattacgctaataatctgcatacttttctgtcacaattcattaagtttctttctttctccttaagctattactcttgttgcacatttcctttgttacagcaacacctagtgggaattaacagcactaacttctcccaccggctgaacttccaagtggactggagaaaactcatgaggaatttaaaagatcacctaatctaatatacggcacagtacagtcttaacctattcccagcacttaatctgcagatgtttggccaggcacggtggctcacgcctgtaatcccagcactttgaggggccgaggcaggcggatcacgaggtcagatcgagaccatcctggctaacacggtgaaaccccgtctctactaaaaatacaaaaaaaaatagccagacttggtgg

SEQ ID NO: 111847 - DNA, 455 bp, Homo sapiens
taaaagtgtttggcattttcagggaggtttgttttttgttttgttttttgaggctcatgttgcccaggctggagtgcaatggtgcagttctcggctcactgcaacctctgcctcctgggttcaggggattctactgcctcagcctcccaggtagctgggattacaggtgcatgccaccatgcccagctaatttttgtatttttagtagagacgggatttcaccatgttggccaggctggtctcatactcctgacctcagatgatccgcccccctcagccttccaaagtgctggggattacaggcatgagccactgcacctggccaggagagtttttttctgataatagaagtaatactttctcactttagaaaatgtgaaaagttcagatatataaggaagtcaaacaaaacgtctcctatatatgaagaagaaaagaagcaagtttaaaaaaaa

SEQ ID NO: 111848 - DNA, 334 bp, Homo sapiens
  misc_feature (2)..(2): n is a, c, g, or t
tnaagacctgggcccctgctcagtgcctttgctctagaatgggtccagcttggctttggctactgggaacagggatcctggcctctgtccactgtcagccccttcttgcccatggagataaaagtctgcaggggcctcaaccccccaggcatcagctctcagagccagcccccgcctaccacagaatcacacccaccattaccaattttgctttgcgtttgtataaagagctggcagcagacgcccccggaaacatcttcttctcgccagtgagcatctccaccaccctggccctgctctctcttggggcccaagctaacacctcagctctgat

SEQ ID NO: 111849 - DNA, 406 bp, Homo sapiens
ttttggagggcaagaagttttcagttttcagtggcaagaatcaggtttttgaaagctggaatttgttttgttctttcgataggcttgcccttcatgtaatttaaattgtgactgtttaaatgtgacctgcttgcctagctcctgcaataggtcagtggctacattgtaaggaagcagaattctcttggtagagtggctcttttcaggatcattgttactgaatagcaattcggtatcttagccatggattagggtcaaaacttttcaaagcttcatctaacaccaaagcaaagattatgcatgcacaaagcttattctttctcaacttggtgcagtttaaatgcagaagtcaaagggtttttttttttttcctttctcattttttttaagtcaagaaggattttac

SEQ ID NO: 111850 - DNA, 441 bp, Homo sapiens
tgaggagtggaggagcatgtgggcaggactgggaggggctcccctatcctgggcagggcgtgccctaccgcccttcttgacctccaggaacctgaacacatcagcgctggtgactcgtcccaccctctcctcaaggcttctctaggttcagccctgcacaggacacccagcagacctactaaggctgcagctcctggcactctggctctgtgggtctgcttggctctccctagccctacccagcagccgagatcctggccaagctgcagagactccccagctccctgaaagtcagttctcccctcagaaagcaggagcttgtggctggtgggaagaaagaagacaactttatagtccaggcctgactcacacgtagtggctctgtggtctctcagcctcactgagctttgcttttctcttctgtaaaatgggtgtaatgac

SEQ ID NO: 111851 - DNA, 479 bp, Homo sapiens
ggcctcaccatacctgaataataacaaaacctacattgtaaaacaccttcaaaaggtttttagaaagagtagatgtaaaagtactttttaactacaataatccctcctccaaaatcagagatttaaaggtaaaaccaaaaataacaaaagtgccagaggaaaaaaataggacaatatctgtataaatttatatggaatagacaacagacaggtatcatatataaaaagaactgctttaaaaatataaaactttgatgtgacaaaaacaaaagaaagcagaaatgtaagacataaacagaaaatgtgggtcaggcatggtggctcacacctattatcccagtatttcaggaggccgaggtgggtggatcacctaaggtcaggagttcaagatcagtctggccaacatggcgaaaccctgtctctactaaaaatacaaaaattaaccaggcgtggtggtgcatgcctgtagtcccagctac

SEQ ID NO: 111852 - DNA, 286 bp, Homo sapiens
atgcaaaatatacaaagaaataatagcctgcgtttgtgtagccatttataagtttcaagcattttcatgtacattcctgcatttcaacaccaccatgactatgagtgggctacgctgctactggtagccccattttacagataagccaattagaggtgacttgccttaggtcacacagctggtgacaaaaccagaattagagtaatgagatctttgattctgctataccacatttcaaaatcatttttaaactagaaaatatctcatgcttttaatgtaaagtata

SEQ ID NO: 111853 - DNA, 112 bp, Homo sapiens
gttgccatgaggacatgctaaaacataaaacatactgttttccgttgagaaaagaaactgatggtagtccatgtgagcgtgtatacatctcacaccaagagaccacttataa

SEQ ID NO: 111854 - DNA, 788 bp, Homo sapiens
gctttatttttcaggcccatgggttgaaatacaagaaaaacaacacattcgtgatacatcaaatttaggatataactgctagagcaggaggaagataaatggcgtcaaggagaggttcatgggggttttttgttagtgaaactgagaatgttaacagtgataaaattgagtacatgagttttcattatattgtactatgttttgtttcgtttatttattttatttttgttttgtttttaaatagagatgggggtcttgctacaatgtccaggctggtcttgaactcctaagctcaagtcatcctccagccttggcttcccaaatttctgggattacaggtgtgagccaccgagtctggccctgtgatccatcttgaagtaatgtttgtatattgactctatttttgtttgcttttactttaccctcacctgactgataaagttgagagatcctcattattttcttcttgtggggtaatggcagaagactgctctgtaacttttaccaaacactttaccgagttgctgcagccaattcgtttatatgtcactgaaaactcagacaaatcgagtcatttctctgctttttaaaataattactcctcatcacactttcagggcctccaggggcctggtttgaaagcagaacattcaggaaagccataggaaaacagcatcctggcttaaaagttaccacctgaaataataaatattacatgtgaacagatgcttatttaatggattttgatggcttctttaccttttatttaagcaccttgtatattgcta

SEQ ID NO: 111855 - DNA, 345 bp, Homo sapiens
tcagacagagtctggctctgtcatctaggctggagtgcagtggtgcgatcttgcctcctccgggctcaagcaatcctcccacctgagcctctgggactacaggcatgtaccaccacacccggctaatttctgtattttttgtagagatggagtttcaacatgttgcccaggctggtctcatcctgagctcaagcaaactgcccgcctcggcctcccaaagtgctggaataacaagggtgagccactgcacgcagccctgtgaagggtttaagctaagaagtagcccaaattaattcattttccccagagatgccttattgggaaatacaattttaaatttacatg

SEQ ID NO: 111856 - DNA, 447 bp, Homo sapiens
ccccacagacccccatactccgcatgaaccatgtgaatatatcagtgaccacctctcagtcacagcagacactcacggctgcttgcattaaaccaaagtggacctccctgtaggaaacctgctcagatagcaccttacatcccaataaaggcttccactcccaggtccctccctctctctcgctattgctccccaaccatcagtcaagcacaggtcttcttgatggctctcccttccagttagccctgcaaagtgtgctgccctcttctctctggaattaataaaaaaactgcttcggttatttcatgtgttgtactgtgctgccttctctgtgtttcacccaactgagtcacccaaacctaactcttcccagtcagtgcttccagctacttgggaggctgaagtgggaggattgcttgagcccaggaggttgaagctgcagttagc

SEQ ID NO: 111857 - DNA, 286 bp, Homo sapiens
cagtggcaatctgcatggaaaggaagattagagactgacaaggcttcttttgggctgaagatggcatttagtagtcctcagaggcacagtgccagctacttgctcaaaagcccagacagttaggggccaaagagataagtgtctccgggtgaatattcatatgcttttcctgattccactctttaataaaaataaccccatacctccttaagagataacattaatggctgggcgcggtggctcatgcctataatcccagcactttgggaggcggaggtaggcagat

SEQ ID NO: 111858 - DNA, 361 bp, Homo sapiens
cagagttgaagggccagggggaagaagcattcggggcacacagcatctgcttcaagaattaaattttccacaagtccaactgctgaaccagccttctgtatccctaagaccagttttacctaatagctgctaaaatgaactgccatgactctaagactggttttacctaccaccatcgctcaccaatcagagcttgctagctcccacaagctctagtgtgaatgagctttcttccaaaacagtatgtaatactgttctttctcataaaacccggaaccttctctttttttttttttgagatggaattttgctcttgttgcccaggctggagtgcaatggcgcgatctcggctcactgcaac

SEQ ID NO: 111859 - DNA, 446 bp, Homo sapiens
ggacatgggcatatttggggagggggacctccaatcaactcactactatcgtcaagtgcatactcttaagcagttcaaagttcgcaactcggttatttttcacctattttagaaagaggttgattttacacaccacattgttctttcagtgaccgacatcttataaaacccagaagtaagtaaagagcatttattgccatggtagccagttttgtcactgagaaacagcccaatgtatgttcacactgtcgtattaggaaagcaaaaagagtaattatattaaaataaaatacagcttcctctcttctttctttcctttattatttctgtgactgacagtctatcagatgaggctttttttttttttttgctgaggttgctcatacagaccatgttgatgtctctagaggttctgcatgtaaggaaagccagatttttcacctttg

SEQ ID NO: 111860 - DNA, 232 bp, Homo sapiens
gtagctgggattacaggcatgcaccacctcgcccggctaattttgtatttttagtagatacaggttttcttcatgttggccaggctagtctcgaactcccgacctcaagtgatccatccaccctggcctcctagagtcctgggattataggcgtgagccaccatacccagcctacatgctggtttttctctggtgcttgtaaatactgtcaggaagtgtttctgaaaaattg

SEQ ID NO: 111861 - DNA, 373 bp, Homo sapiens
ctagaacttaatcaaaaggaaaaccccacctctccacacccacataacaaaaggatcagaggctactccttttacactgcatagccgatgaaaaatggaaagtacccctgattggtcccctcctgcaaccaatcagacaggtcgtggcccaagtcttcatgtctaactttgtaacttcacttcagcctctgattggtcacctcctgtgaccagagtggtcgtcggccaagtcttcatttatggagagtgtaaccaagtaaccaatgggaaacctgtagtgggtatttaaaccccagaaaattctgtaaccagtgctcttgagtggagtgtactttcatttcaataaatctgtgctttcattgcttcattcttt

SEQ ID NO: 111862 - DNA, 418 bp, Homo sapiens
agtgctctccacaaacagtgaaacctaacttaaactataaacatgaggttacagttatagttaaataacaatgtatctctctctttcttttgcgatggggtctcactatgttgcccaggctagactccaattcctgagctcaagtgagccccacctggagtagctgagactacaggtacccacacccagcttataataatgaatcattattggttcatcagttgtaacaaatgtacaacactaatgcaagttttttttactttttgtagagatggagtttcaccatgttgcctaggttgttatcgaagtcctgacctcaagtgatctgcccacctcaggataccaaaatctccataaagttgagattacaggcttaagccatcatgcccaacctcaatgtatgaattctgggaatact

SEQ ID NO: 111863 - DNA, 629 bp, Homo sapiens
taatttatggaaaactggaaaatacccctttaaatttagtcaacgtgtttgcacacagaattttttttgcaagattagtttttacaaaccttccacaacttgttcaaaccgtgagcttattcttatctaatttaaaaatcacataaccctctcaactaggtgaaatttgacattctcctgccttttaaaaatattttaccaaaaacatgtttcactcttctcacacactttccatgtaaaactattttttcagtagtttcaatcatatgttataatggtaactagcaacttttacttttggtggcttaaatttcctttcacgaaccctttcacgactttcccagaccatctacaacatgctttgactttctgacttctccttagcatcccctttttgaacaaaccagttattttactttagaacaacaatttaccatacaagatgctttcttatagaccaaggagtctaacatgtacacgagtcagtggctcacacgaaagctgccatggcacaatgaaggtgaaggccagcgtgctatccggctgaggtgggatcccatggcctcttcagtccactgagggtgcaccatctcacctgctgtgctgggtaggcggagcacaaccacctg

SEQ ID NO: 111864 - DNA, 311 bp, Homo sapiens
aggtgctctagaggatcctccgtcagcactccttgctgtctccctctctccttcctgctcctccaaggtttgggagctaaactggccctagagaagttagatgctgtcacctacttgactaaaagtcttgtcactgctcagatactctgaatactgctgatggtatggaactgctcatagtatttatcttctttgatatgactactacctgggttggatccaagttaatgccatgtcttcaaacactcatctgtaagtagtggccattctctctgagtggcaagacttttagtcaaggaggtgctgacggt

SEQ ID NO: 111865 - DNA, 459 bp, Homo sapiens
ttctgggtgctggttatgattcctttgaactatggagcaggtaaactactatgaatctctgcctgtttttctggtgtttcggaaactccttccttcatttgttctttcactcatcaagtaattattgatctctgctatatgccaggcataatactagatgcttccaagtttgcttagaccttgctgtctccctctctccttcctgctcctccaaggtttgggagctaaactggccctagagaagttagatgctgtcacctacttgactaaaagtcttgtcactgctcagatactctgaatactgctgatggtatggaactgctcatagtatttatcttctttgatatgactactacctgggttggatccaagttaatgccatgtcttcaaacactcatctgtaagtagtggccattctctctgagtggcaagacttttagtcaaggaggtgctgacggt

SEQ ID NO: 111866 - DNA, 548 bp, Homo sapiens
tagatgcttccaagtttgcttagaccttgctgtctccctctctccttcctgctcctccaaggtttgggagctaaactggccctagagaagttagatgctgtcacctacttgactaaaagtcttgtcactgctcagatactctgaatactgctgatggtatggaactgctcatagtatttatcttctttgatatgactactacctgggttggatccaagttaatgccatgtcttcaaacactcatctgtaagtagtggccattctctctgagtggcaacccttttccacattagtcacctggcttcctctagtcctgttacaatccctatttgtaaggcccacattaaactcccagtaagcagctgattatgaccattccattcatttctgaatctccatgtcattaccctcatcaaaacagggctgactacaaaaaggataaaaaagtctcaggtgaggttttgaaggcaaatttcctgtactaaagctttctctacagtcattaaagtcccaaatgccttaaaattgaataattaaaatgatttctg

SEQ ID NO: 111867 - DNA, 735 bp, Homo sapiens
gtctttatgcatatatttaaaatttcttaatttagttttattctttcccacccctttctgtttctcaatttcattttggattcatctcaattctagctggtattgattaattatttacttttgggtatgtgaacaattacaaaaaatcagaactacctaaaaaggtatattcagagatgtgccactgcactcttaccctactacactcttctcatttccagacattttacattacatttccatccaacccttttatgtagccaagctcattagtttctggtttatgtgtcccgtatttcttttgtacaaatgagtatgcacattttcttatattctttcttaaatgaagggtagtacgctataaacacaattcttttgcattttgcttttttacatagcaatgtattctggaaatcactccatatcagctcataaggaacttctccttttttgtgtgtacaagtacataatatgccatttagggatatgtcaactttcaacaaccctccaatgtatgggtatttgagttgtttccagtatttcattatgtaaacaacactgcaatgaataacctatgtatttttgtattgttgaaggtttatcttttcaggtgaattcctacatgtgtgattggtagatcaaaaagtaagtatgcatgttgttttcttagatgttgccaaatttctctccagaaaaggtggaccagtttgaattaccactagtaacatatgaaat

SEQ ID NO: 111868 - DNA, 557 bp, Homo sapiens
caccaggccccacctgcaacattcaggattacaattccacatgagtttaggtagggatacacagctaaaccatattattctgaccctgatcccctgaatatcatatccttctcacagagtaaaatacaatcacgccttttcaaaagttgctgaaagtcttaagtcatttcaacattaactcaaatgtaaaaagttcaacgtctcacctgagaaaaggctacagtcccttttgcctatgagtccctgaatttaaaagggagttcttttctttcaaggtatgatgatggtagaggcattgggcaagttttctcaatccaaagggtttgaggtttgccaggaaaataacacaaatgagatgacagggccaatgcaagtccaaaacccagaaggccagtatccattcaatctcacagctccaaaaccatcacgagaactcaccatcgtgaggaaaacattaaggagacagtgtttaaccatttgtgagggatcctgcctccacccctacctttcacccctcacctccaccaaaatccacccatgctccccaatccccacct

SEQ ID NO: 111869 - DNA, 150 bp, Homo sapiens
gtgtattgctgctgttgttcctctggagacagttttctgcaggctacattaacaggcaatggaaatgcatgccaggctacatcctaacggttgtgtcttcccatcagaaaaagatccttttacccctccctgtcaaatgaaggcttagat

SEQ ID NO: 111870 - DNA, 358 bp, Homo sapiens
cacccccagcactcaagccttactgctatgtgatcttgggcatccttcagccccactctgggctaccaccagctctgagcacctctcatcttggaatttggggcctttctccaacagaggggatgtggtcagagggctgggctgtgtgatcctgagcaagacctggggcctctcagaccctcactctgatctctgaaatgggggaacatggtccttccaggagcacgttgtaagagactggcaaagcctgcaggcatggggtgaacccggcgggcactcagggtcgaggtgggggccatcactcccttgagccctgaggtccctactggagggtcaccccaccaggggacaggttgaa

SEQ ID NO: 111871 - DNA, 271 bp, Homo sapiens
ccgagttaaagaaggaagggctttattcagccgggagcttcggcaagactcacgtctccaacaaccaagctccctgagtgagcaattcctgtcccttttaagggctcacagctctaagggggtctgcatgagagggtcgtgatcgactgagcaagcagggggtacgtgactgggggctgcatgcaccggtaattagaacagaacagaacaggacacggattttcacagtgcttttctgtacaatgtctgtaatctatagataacataactg

SEQ ID NO: 111872 - DNA, 520 bp, Homo sapiens
gcgcactctggccctcgagtgcccattctgcaggcgagcttgccggggctgcgacaccagcgactgcctgccggtgctgcacctcatagagctcctgggctcagcgcttcgccagtccccggccgcccatcgcgccgcccccagcgcccccggagccctcacctgccaccacaccttcggcggctgggggaccctggtcaaccccaccggactggcgctttgtcccaagacggggcgtgtcgtggtggtgcacgacggcaggaggcgtgtcaagatttttgactcagggggaggatgcgcgcatcagtttggagagaagggggacgctgcccaagacattaggtaccctgtggatgtcaccatcaccaacgactgccatgtggttgtcactgacgccggcgatcgctccatcaaagtgtttgatttttttggccagatcaagcttgtcattggaggccaattctccttaccttggggtgtggagaccacccctcagaatgggattgtggtaactgatgcg

SEQ ID NO: 111873 - DNA, 422 bp, Homo sapiens
agctcctcgcactgtacattttaattttagtagtaatggtatcctctttgggctttcataggactgagtccacagcactagtctagcacggataaacaatgacataagtagctattgggtatgtttctcttctcagaagtctgaaggctcctcaaggaacaatattcctgtcaatctttctatgccaagcacttcacatagtacataagataaacacacacatactctctcactctctaaataatgaatataagtaaatgagtagttgaaaccaatagaattggatgggataatttttctccatgaaggaaaaaattggcttcacctattttaggcttatctctgcccccatgagactgtgctttgacttcttgtgacatggtgggtctttaaaattatttaataatttaaaattcttaaag

SEQ ID NO: 111874 - DNA, 368 bp, Homo sapiens
gtcactgtggatcctttttggaaacaggagaagaaaatatctatctgtatgtctgcctatctgtctatctatctgtccatcatccaatgttttgattttttttttggagaaattatttcccatttttccaaagccttggtaatacttagagttaaatttcttaactagattaattgcagaatggattcaagagatgctaaatggagatccttaagaaagtgggctatatattgtgtacagtgcacattgctcaggtgacaggtacaacaaaacctcagaaatcaccactaaagaacttactgtacccctaaaactgttgaaataaaaatttaaaattaaaaaaatatttttaagttaaaaaaaagaga

SEQ ID NO: 111875 - DNA, 371 bp, Homo sapiens
agtctcaggaatgtgggagccacgaaaccctgtgggaatctgacatttttcagacataaaaaatatgcgcattaaaaaaatgcacacggttgccagaggttgggggttgagagtatgaatcagcggagcaaagaaaatttttttggcagtgaaactactgtgtatgagacgacgatggtagatacatgtcattatacatttgtccaaacccacagaatgcatactaccagaggtgaacccgaaagtaaactatggactctgggtgataaggatgtgtcaatgcagggtcatctgttgcaacaaatttaccactctgggttgggcacagtggctcacacctgcagtcccctgaccctgggaggtcgaggcag

SEQ ID NO: 111876 - DNA, 369 bp, Homo sapiens
cggcctcccaaagtgctaggattacaggcgtgagccaccgtctccggctgcctactactttctaagcaccattacagttctgcctctgccctgcctcaaatgcatcttgtcaaaaccccagtcctcattctttatccaggctaaaatatctactcctctctgtgtgctttcagaacacgttgttcacatggctattatagcacttgtcacttattacaattaatatgtttatgtttctataataaaattaagggccaaaattatgatacatatttgggttcattcactgccttagcgtatagtgatgtgtctgtttatttgttgaaatgaaagaatgtgttttgtctgcatatgaatgctgtcgtggaa

SEQ ID NO: 111877 - DNA, 398 bp, Homo sapiens
agatccattgactttggtcgcatagtgagaacaggaaactctcatgaatcatgtttgttagccaatgtttttgtgtagaggggtgggcaaaatctgagtaaaagacatgaattcacttgagtggttaggtcacaacagaatctatcagggattttttgattcagtgtatttttaggaatgaatgctacaaaaagagcattcagcttaataagagggagtaaagataaatgcaatcaagctaaattacagaggcacacaaatctgattgtagggttcttttttttttcccttctccaggaagaaaaaatgtttatcatggggacaacaattcattttttgctatatcctatttgtagagttggtgatagaacaggcaaatgtactagcacttgaaatat

SEQ ID NO: 111878 - DNA, 335 bp, Homo sapiens
cctactttccccaggataacatcaactccagccagcacagtcctctccccttcccacctgaccacccatggcactgaattctgaccgtatggtggtcagacagtagcctcctcactggtcttggtctcaggtacacaggagccctgccaagccactcttactgagctctctacaagaacagagatgggttccacctcttcctctctctgagttctctggatcttttccagggcagctccaccttcctaatactacatgtaatgttccaggaagggcctctcttgtcctagaagttttatatcaaataatatttttctatcttcattttctctctt

SEQ ID NO: 111879 - DNA, 342 bp, Homo sapiens
tttgggcataggaagatgacatcctcaggagttatacaaaaaaggctaatcttattcccatgaagccacactgcctgtaaaatacatctctacatgtaaactattcagcatttactgctttgaggaaaccatgtgggattccacatataccagcagaccaggaggcctgcatattagtctttcttcttccactcacggggatgctgcactgctagtgttgctaccaatatgctgggaaggctattatcattatcatgctgtatgtgcaaagggaaagaaaataagagtgatgtagaaagagcagagaaagaggtttcagttctaggtctgccgtcaagtagc

SEQ ID NO: 111880 - DNA, 159 bp, Homo sapiens
agcccttgatgcaagtattcactttaaattttcctttaaaaagaaacaggcttctgcttacacatctacccagctgagggggctttttgctttgctcattttaatttttttgttgaagattaacagttctgttgttctggctactgttgcctggaagaa

SEQ ID NO: 111881 - DNA, 209 bp, Homo sapiens
tgtggaaataaaaagaacaatttttatttttttacttggcacaattttgatagaacaggaagaggaataaagtcttgagtttatgttttagtatagtttttagattgtcaatgtatttccattttgtatgctaacttgaatctctaacaatttattttgataattaaaaataattgctatcatttattgactatacattgtcatagatc

SEQ ID NO: 111882 - DNA, 438 bp, Homo sapiens
tcatcctataaaagtcttttctcaatcatacatttgtagatcaagagcagtctgaacagatcattggagcataaaagactagggaacagattcgtacctctaaaaagcaaagttaaaggaaacaaacatgacaacttcatgatagttataaagaaaaaaacgatatgttatcttaattatgtaaggccagaaattactgcaataaatatttcaactccgtggacaatttcctagtgtgatcaaaagatgaaagtaattcactagttcagaagtccatccagtatagtgaccatcattctgaaaggaaaaagaaatgtttttgagggaaatgtaatggaacaatactcatttttaggcttgagatctgcaggagaggggaatcaatactagagactgctacgcattttggaaatcaaagtacagttaagccactttcct

SEQ ID NO: 111883 - DNA, 247 bp, Homo sapiens
ggggtggacctctgtttgtccgtttgtaaccacttctgtctggcatgggctccaagagttgatgctgcatgcaggcctcatgtactttgacacaagtgtgagagtgctgggggttggaagactcatgtgtgccagcctccaggtacagctagcctgtttcctccatgccaaggccttgtctcccttgaggcagagtggtgtggtggagcgagtactggactaagtcagaaggtccaggtatgcaggc

SEQ ID NO: 111884 - DNA, 335 bp, Homo sapiens
ggtagattgcttgagcccgggcgtttgagaccagcctgggcaacatagcgagaccctgtctctaaaaaaacaaaaaaacctacgtaatttccaggatatggtctgtggttggtgtacttgcaggttaatctccaacacttcctgcaccattgtgcagtggtcactgacagtcacagtgatcctttggtactttactttgttcctcagaggaggattaaaacatgttagggtactctgtcactcaagggagaaaggtatactgagttttaaaataaatttcagtaacaaaagttggaatcaaaatggtttccttgttaactttcatttaagcaaaa

SEQ ID NO: 111885 - DNA, 397 bp, Homo sapiens
cagtgactattcctttatagttcttgggctcagactctgtaaaaggatttgccacttatttttgaagctcttgtcacaattactttgtcagtaacttatgaaaccactagaaactgtatgttcctgctaaacctcttcttaaaaggagttttgccatttttcttttcagttattacagtacaatgcatttttctctaaggaaaatttataaaatagattcttttcatattgatagaatattttttcattaattggaaaatgctgtacaacttttagcaattctaattgctaacttaacagatgtaatagttaaaatgttctctgacttaagctatatttatgatcatgcaaataagcatgtgcttttctagaccattcataaattctaaaaattctt

SEQ ID NO: 111886 - DNA, 176 bp, Homo sapiens
aggagtctcagtaatagatatgtaacaaaggagcagagcaggactctttataagagctagatgtcgtaaggagattctgcatgaaccactgctgtgccaatcctctccttacgaccatctagctcttataaagagtcctgctctgctcctttgttacatatctattactgagactc

SEQ ID NO: 111887 - DNA, 653 bp, Homo sapiens
cacggtggctcacgcctgtaatcccaacactttgggaggctgaggcgggcggatcacaaggtcaggagttcgagaacatcctggctaacacggtgaaaccccatctctacctaaaatacaaagaaaaattagctgggcatggtggcgagcgcctgtagtcccagctactcgggaggctgaggcaggagaatggcgtgaacccggaaggcggagcttgcagtgagcctcgatcgcgccactgcactccagcctgggtgacagagcgagactccgtctcaaaaaaaaaatactagatccagaacttactgtgtgaacctgggcaaggttcttaaacacctttgtcctgttttctcatctataataccaggatattaacagtatctatgtcatagggaggtgtgaagagaaaatgagttaccacttggtgcagtgcccggcacatggcaaattaaataaatgttagctaaaaaaatataaacttaatagtctgctttttaaaagattcaacatggtatcataaaccaaaagtatactattaaagtttcataagaaaaatacttaaaaaaaaaactttagcatatgttacattgactgtttttaaaacatatctccctaccatccctttgtctagatatttacagtaatagaatcag

SEQ ID NO: 111888 - DNA, 378 bp, Homo sapiens
gcaatgggttctgggatactggaggaaagttacccagtacaatggattctgggatcccgtgaagagagctgcccagggtgatagattctgagttgcatttctgaaggcaaagaaaagtgggctttttatcaggcgctgactgaaaagcagcaggtgtgtgcatatgaaggagggaagagtgcagtgaacaggaaagcatccaagtgggaaatgatcttcaaggaggaaaaatggccaattggggctgggctgtgagtaggcagagtcgtgagaacagcaggcatggctgagtgtgtgtagaagcaccaagtcccagacagctatttttttcatgagctgctggatgggaggggcggggagtcaacactgcactcgggg

SEQ ID NO: 111889 - DNA, 379 bp, Homo sapiens
gccactgcgcccggccaactggcccaaattacttaagcagtaagagacaaacaaaagcatactaaaatcttcatcttcatcttagatcatgtttatctattagatcaccttgatcttagagaggtgaccataaattctgtttaactttttatgctgataaatataagttcaatatgttcattaaaaatataagtaataacagtattactaaaactaatattagttaacatgtatcaagtatttataatggatgtgacagacactattttaaaggctttgcatacaataatccagccaggcacggtagctcacgcctggaatcccagcactttgggaggccaaggcaggtggatcacttgaggccaggagtttgagacca

SEQ ID NO: 111890 - DNA, 340 bp, Homo sapiens
acgagatagttaataaacgtagttactcaattagcatttcccctctctatgcaaccttcctcagctccctggcagacagtggcagcagtgtcctctgtgtccccacagcactctgcattcacctccaatggcacatttcaatactgctatggctatatgtctgctacacactcaggggcagcaattttttgtatcttccatctagttcatagtaagttcttacattctcaatgaatggctgacttgaagtcctagaaaggatttcacagaagatttcacagaagagaaagaggaaatgcactgaacctatcatctgaaggactgtgcttaaagataagga

SEQ ID NO: 111891 - DNA, 402 bp, Homo sapiens
acagctcagcccagggggcagttcccggccaggagatgccccagtggctctggtgcatttctgctcaggtgcctccatttatgatacacctacctggccgaaccaaaacttaaccaaggctcttgtttctctgccaaagcctggaggctcattctcttggttctgtgtgctgttgttttccttcattctctcaaagcctcagtgataagccaggacttccaactgcctgggcactgtggtcagaggatggggacaggagagggacacgccctgtgtctggtccaccaagaagatgaataaggggctcaaaagacaatggaggccgaggggcacacagcaggtggaccgaggggctaggtccgcctcagccccctctgtcccatgtggcttcctcaagagggg

SEQ ID NO: 111892 - DNA, 338 bp, Homo sapiens
cttttacctaataggttctgctaatggaattgttcagcatgcccaaggttgagttttcctgatatacccccataaaccttgtcctccactggttttctccaactcaggggaatggcatggttatccttcctgttgcacgtaccagaaattcacaagttattttttattctttcctggccctcactcctttcctttaatcatgtatcccaaatctgttcacttcttttcatgttctctagagtcctggttaaacttttaatatatgtgtgtgttcctctaactagactgttagctccacgttggcagggatgtgtctgtttcactcaccattgcagttt

SEQ ID NO: 111893 - DNA, 297 bp, Homo sapiens
ttcatactgattgcttgcacctagtagttcaccagatcctcaggtaaactgtactggaatcatgccaaactgtacagaatgtatccacctcttgaatgaatatatatatatgagtgtgtgtgtgtgtgtatacacacgcatatatacacacacaattatggttgtgtggtattagcttcaaacggttggatagaaagcattcaagcatccccaatagctctgacctgggcatactatgccaatttcactctcatcttcattaacttgtactttttttctggtttatgatatttcata

SEQ ID NO: 111894 - DNA, 299 bp, Homo sapiens
cttctgttcttggaattacccgtcctctctcttgtagacaaaatagctaggaaaactgctcagactgattttgttatatgaagaactaagatgcctaggaataatttagcaatagctcatccaaattaaagcagagttgaactttagaatggaaaaaaaaaagaaattatcatgttagctaaacatttgctgtctggatctcccagttaaaaagtggcataatacttctcaagttagccagtatagaacatgttccacattcagttgtgaaaatggctggtagctattatcaagtatga

SEQ ID NO: 111895 - DNA, 269 bp, Homo sapiens
gccagagcccagaagctgggactacagttaggagggctgctggcagggctgtgccaagaaggacatgggcactgctggcgatgtccctgaagcaagacgggagaagacgctggctttaccaccagtgtctcctgttggccatgttgaccaggaaccaggagtgaggggcggggggcctctatgagacagtgcagggcactgatgagtgtggctgagctgtcactcacctggccagcccttgaggacagctggggctcctcacggcaggc

SEQ ID NO: 111896 - DNA, 275 bp, Homo sapiens
ccactggtccttatgctggattcgttcatcttcaaatggcaggtaaccacagctgcagacctcaatttatagtacattatcaagcaattcaattttttcttttaatgtcgtaactcttctgtttcttaggagcacttctagtatcactaggagcacttaaaatgggtcccctggtattattcaaggcttacagtattctactaaacacgatgaaaaatatgcaagaatcacacatttcactgtggcatgcaacttactggagagacgaactgctt

SEQ ID NO: 111897 - DNA, 242 bp, Homo sapiens
ggcagaggacatgccagggctctagagggtgagtgggggacggtgtgtcctgctggggagacacagcccaggaggcgagaaggggcatccacatggcctgcgtggggtcagcctgcaggacgccagagccacctcttatccactcacacgggctgtcaaaatttcaggaatttttggaagccaattgtgtatgtgtgtagacgtatgtaagtctaagtgtgtaggtgtgtgtagctctatgt

SEQ ID NO: 111898 - DNA, 315 bp, Homo sapiens
ttcagttataccgacagtgaaacggggggaagaaggccccccacccacccctcgtaacatgttggcagctcgcactttttaattctcctctaggcagtttgctgacgtcctgttttttccccagagtgactgaccaggaggcacagggctcaacgtgacgtgggccccggggccggagcccagactccctgctgggcatcctttatctcagttctggattcgtgggggagcagcgggaacagtacggccttcttccctgcctaggggtcttgatctggaacctttgagagtctatgtaggctgtaagtggccact

SEQ ID NO: 111899 - DNA, 119 bp, Homo sapiens
tgtcacccaggctggtgcagtggcgatcctagctcactgaaccctcgaactcttgagctcagatgatcatcttacctcagcctcctgaggagctgggatacaggcctgtgccaccatgc

SEQ ID NO: 111900 - DNA, 156 bp, Homo sapiens
gtgactgtgagtatatactctatacttgctttctaaaaggagatgtgttctcaaaccatattgtttgagtccttctacccagggattgatcccagcccagtgccattcttactcacttggcaaaggacttgtacaggttgggtttccaccaatacc

SEQ ID NO: 111901 - DNA, 456 bp, Homo sapiens
cgcatctttcagattcacacaagcaggatgacgctggctgatgatgtaaccctggacgacctggatcatggctaaagatgacctctctggtgctgacatcaaggcaatctgtacagaagctggtctgatggccttaagagaacgtagaatgaaagtaacaaatgaagacttcaaaaaatctaaagaaaatgttctttataagaaacaggaaggcacccctgaggggctgtatctctaatgaaccatggctgtcatcaggaaaatggttgggagatttctcaatccctgaaagggatgaggttgggggagttgcccagaggaatccctgttcccactgatttttattagcaaaacatcctgtgtcttttggagtacgatgtgtaagtgcccattgggtggcctgttggtcactgtgcagcagtctgcttcccaataaagcgtgctctttcacaaaca

SEQ ID NO: 111902 - DNA, 279 bp, Homo sapiens
ggagcccgagggcctggcgggaggcggcaggaagtgtgtgctgagccagggcagggaggaggaatgtgagctatgaacgccgcccgagctcctcggctctctgggccccccttccccacgagcccatgtgctgccagcagcccaccctggcccctccattgcagcccctccacctgaggttttagtgctgtgcctggcgccactgggaccctgctgacaatgaaggggtttaggtttgataggcagaacttcttgccttgtagagtgaaagacggctgc

SEQ ID NO: 111903 - DNA, 773 bp, Homo sapiens
gtacccttgaattcctgggctcaagcaatgctcctgcctccgcttctgagtagctggaactacaagggtgtaccaccatgcccagataattttttatgttttttgtagagacagtcttgctattttggcaaggctggtctcaaactcctggcctcaagtgatcctcctgccttggcctcctaaagtgctgggattataggtgtgagccactgtgcctggcctagattggcattcttgagtgaccaatgaaccaaatgtcagatctcctagacaggcatgaagtgatgttctcccgggtatggtacaagcgctaatgggaaactaggggtgccactgagcgtgtgaaatgaaagtctagagattctgccagcataaccacagctaagggtattctttacagggaataaccaaaagctttagagatgctgcagcttcatagaaacattgtagaatatcaaagaaggctgatggattagttgtcaagagggaaagaggccaacaactatgatttcctggggctactatgttctgacacagcatgtatcttgcatagggtgacacagctagtaaagggctgagctggccctccagcccaggagtaatatgtcatcaaagctcgtgctttttctgctatgctacactaactcatgtcaacatccactctttgggaatagtaggatgtcatgatgactgagttatttcagaatatcttcaaaaactattttgtccacagaaaagaatgtctttggccacactttgtatttagtgtgact

SEQ ID NO: 111904 - DNA, 372 bp, Homo sapiens
ttagaaatcattggaattttgccttttggcattaatgaaagatgaatgccacacttttgaaagcaaagctggcaggccacctcacagttccctgtctttcaggtgagagaattaaaatcaggaaagtttggttgcttgcctaaaatcataagttggggagaaagcctatcgtaattactggaaaagaaacttcctgaaaaaaacggattcttagagtgaattaaacatgaggagaatgaggcaccaatgggcttccctgtcaaaggagagggggtccctcactcttgggtccttgattgaagatgtaaagatgtaactattcattgccagcagattctggaactggtgtgagtttccaaaggctgttttgaa

SEQ ID NO: 111905 - DNA, 570 bp, Homo sapiens
cggtaccagtatatgcagagaaccgaactgatggacaaaaatagacctcattttgggaagcctggcatgaaattaaattccagggccatagctacagctttgccaatgggctggctttctactaatgtgcagaaatgcccttgtcatgcaagttggagatggtggtggagtggggaagggaggagagcctcttttgtgggtattctaacatggcaggggctgctccacctgtctttagtcgcttgctgtttaaaatataatctgcagacctgcagccttggtctcatttgggagcttgccagaaatgctgaatctcaggcaaagcctgggactagggtgagagatggcctcctctagtgcaaaatgtaaggaggtgcccccaaactcagtaatcaaaataaacaatattttaaaatatcaaaatcactgcaaaaaatccttgataaacaaaatatcaacattttaaataaaggcgagatctgactcagcacttaaacaatcctgccccacttatctcatgccaatcttgactctgatctcaggttccatcccagacccatagaatcagaa

SEQ ID NO: 111906 - DNA, 207 bp, Homo sapiens
ggtgaaaaatccaaaaaagtagtttgtatggtgtagtggtagtctttatgccacttagaatattatttgagcttatgtagacagaatgttaattctgattttctgtgtttgttttatattcaggattggtatggaagaagacttatgaaaaccacagcgccattataacatttttccttcaagcatggcattctgttttatatactg

SEQ ID NO: 111907 - DNA, 240 bp, Homo sapiens
ttgtcttgaactcctggcttcaaatgattctctcacctagacctcccaaagtgttgggatttcagctgtgagtcaccgtgctcagcctaaacttcgacttttaaaagttacataacatcatcaatctggttatattttataaatgagaaggaccatgtctcattttccactatatcatcccagcacctgcctagcataacactatgcacataataggtatttaagtgtgtattactaaag

SEQ ID NO: 111908 - DNA, 279 bp, Homo sapiens
catgagccactatgcctagcctgcaacttctattttcttatttttgttctttcttagttttataaaatttctcaatgaacttgcgttgtttttgtaattaaattttaaaagttattttaagaaaggtctgtgtcatcatgatatagttctaaagtttagatgcatgcatgactttcagagttactgtcttttcaggttttaagagcatgttcacatggccagaattgatattattcatttttatctttaaaataattaattttaaaattgagcataaag

SEQ ID NO: 111909 - DNA, 332 bp, Homo sapiens
aagctaaaagataatgtagttcactgttttgcttagtgatcaaaaattttattttgtttattcattgctgttcactggaagacctgctgtcttgggtggctctgagtggggtgagattgacttgtagaatggttttcaactcttactggttgtgaatttacaaatacaggtagtgaggaaaagtttttccagtgtactctgatattattgagaatgatgactacaggatgaaggaagagaattatattttctgagtggtggtagctaatattttatgttactgttgataaccatcagatcattcttctttaaggggaaaaatagacttaatt

SEQ ID NO: 111910 - DNA, 439 bp, Homo sapiens
gtactactgcactaaattgtaaactccataaagcaatactattaaataaaaatatacgaggcatgcatgtaacttcagattttctagtagccattatttgaaaagtcagaagtaggtgacattaataatgcatcttaatatatccagaatatcacttcaacatgtaattaacataaaaatgagatcgcttacattcatgttcagcactaagtctttaaaagtcggtgtgtcttttatagcttctgcatatttctattcagactggccatgctcatccacatgtgccggtggcgacctgtattcaattcggtacgttggacagagcaacccaaaaataagggctttgtcttagaccagagcatgccctatcagcgccttacctatagtagatattcatacagcaaacatgtattagagcttactcggaacaaagaagctg

SEQ ID NO: 111911 - DNA, 659 bp, Homo sapiens
ccagctaattcggcatgaggtttttttggtagagacagggtttcgccatgttgcccaggctggtcttgaattcgagctcaagcgatccgcttgccttagccttcctcaaagtgctgggattacagtcatgtgccaccgcaccaggctaatttagactaattgtaatctgaaaaacctatccgcgaagaaaatcaaacaatggaaacccatcggtgagttatacacaggaaatcaaagcaaatactccccaccatccaattaacccatgttaaagattagggatactcatagtctaacaaaatacatttttctggatttagaaacctggcatccaccaccccaaccttccaaatgtttcataaaaatataaagtccgaaatgtacctctacattctcaacaggaacagtgtgtggcagcagaaaaattcctaaccaaaaacctgtcagataattatttgagaccataatcaacaattcagaacaactccaaggcaattatgtgggacagttaacttcctgacgttaatgcacacaggtttcttgaattagctctgaagtattaagaaatttttatgaaagtaatcctaaaatttctataaaatattacagtccaaaacaaaaccctgaataagaaacacaacattttttaaaagtggaaa

SEQ ID NO: 111912 - DNA, 265 bp, Homo sapiens
tatagactgccctctgaaggtcatagtcagtcactgcagtatgttctgataaagatgattatcattcttacggaatttctcgtggagcagaaagtttgctctccatgttatgataccagttgcaagtgttgtttaggggcaaatttgaatgctaatagaaatacatatagcaacatgcatcctattttatttgagcacatttccctcttatttgtaaaggttttcaattgaaataacataggatttagcttacaactatggaaag

SEQ ID NO: 111913 - DNA, 524 bp, Homo sapiens
tgggattacaggcgagtgccaccacccctggctaatttttgtatttttagtagagacggggtttcaccatgttgaccaggctggtctcgaactcctgacctcagatgatctgcccacctcatcctcccaaagtgccgagattacaggcatgagccactgcacccggctccatgtccttttttattaccatttggtcttttgaaaagctgagatagtagggaattaatatttttggaagtaatttgttagctaaattttctccattccattatccctctttatcagaaaacagtcattgaatgtcagattaaggaattcctcccaggcccagatgcacactttctccaactgggatcagaagtcagagagccttcaccaggctccactgtcctggagaaatggtcagatctccagcactaaggcaggcctcctctgaccatcacatgcagtgttagtgatccatgtcacatgcacaaaggaaaaagaaactctctggttagggatggctgccgggatcctctaga

SEQ ID NO: 111914 - DNA, 261 bp, Homo sapiens
gtcccaatgatgagttgccatgctaatactgagccaccaggtagggcagtgttgccctggtttgggtgccagtgagtttaacaaaacttctcacatgaagatctgaggggcatgtgaaacagttggcttaatgaatacctccccattccatcatgactgagaaatttctctttgacgatcacaccctcagtttgcctagtgtaggaccctcaaaggaaattgggttatttattcattgcaaatcgtttatgccacctgtct

SEQ ID NO: 111915 - DNA, 353 bp, Homo sapiens
attacaggcgtgagccaccgcacccgaccagtcctgtgctttctgatacaatatcatcccccttctttgcctcaccatctcccatgggcatgatcagttaacaattgctggaaaaatcaactttacctgaacatttaggaagctatttgggatgtccagtgtttttcttcctcttgaaaaacactaacgcaggtctgcatttattaggggagtggggatcatcatctgtctcttctgccgctttgctctaaaggaactcaagagcccataagcattttccctgaaaaggtcatcatttccaaagaaatgagagctcatttaaagtttctaggtatgaaaatcctaggttcttg

SEQ ID NO: 111916 - DNA, 129 bp, Homo sapiens
gaatggaacatatagaaatgtgccaggaaaaatttctttctttctttcttttttattttttatttatttttattttttgagaaggagtctcgttcttttgcccaggctggagtgcaatggcgtgatctc

SEQ ID NO: 111917 - DNA, 458 bp, Homo sapiens
gcattttgaaactgttcacagattctcattcataagctaaatacttatagaaaatagatacagttactgattttatgcattctgtacaattttgcctaagaaattaatgcatagaagtggacttttttatatcaccaacaagattgaaaatataagcaaaaagtgtttataactaattgttttataagaaaggaacttcacctgtttctggatattttttcctctggaattcagccataaaaaagaatgtaatcttgtcatttatggcaatgtggatggaactggaggacattaagtgaaataagccaggaacagaaagttaaacactgcatgttctcactcatatgtgaaagctaaaaaatgttggtctcatagaagtaaaaagtaagacagaggatagataatagaggctgggaagggtaggaggaaggaagggatagggagaaatttgttgaagg

SEQ ID NO: 111918 - DNA, 424 bp, Homo sapiens
gctttccatacggatggaatggagacctgggtcattcagtaaatggtgttgggacagcctgggcctcactcctctgtgaaaatgaattccagatgaatcaaacatttaaatgtaaaaaaaccacaaaagcagagaaaaacacaagcaattatatttataatcttggagtggaggaggccctatttagctgctcacagtccccaaaagtcacagaagacaagattgagaaatgaagttacataattacacaccatttcttcttggtaaagtaaaataagaaaaatacaagggcaaactgggaaaaaatgtttgcaacccaagtcacaaagagctcattcctaaagagctcccacaaatcagtaagaaaaggaccagtgacggccgggtgcggtggctcacgcctgtaatcccagcactttgggag

SEQ ID NO: 111919 - DNA, 531 bp, Homo sapiens
gacacatggggacgttgaggcattgcagcttcttgggaaaagaagtcacatctttggacccttatcctgagaaatgatgcctagaccctgtgtttctagcacaatcttcacttgcaaagcaccccatctctccctgacagcacacttgcaaagacacggggacagcaatccaggcaaacaacagtgaatacaatgaccctggggcataaaacaaagtggtagtttgaggaacagaaaggaaaccaatgtggctggagcaaagtgagtgatgaagagagtagtataagatgaggctagagaatcaggcaaagttagatcattgctggacctgactttgaaggtgtaccagagaaaatagaccggttgggagactactatagcagtccagagaactagggtgttggcagagaagaaagaagatggactcagaatccataggtctttctgaaggattgagtgtagagaaagaactaaataggactccccagtttctgacttgagcaactgggtagaaggtggtgtcatctactg

SEQ ID NO: 111920 - DNA, 821 bp, Homo sapiens
tattcaaatgtacaacagacacaagatagtaaaggggggaagagagggaattaaaaatttcatttagaatccctgttacataaagaattttttctaccttttagcctctacaaaacgtagaaatttattgttaatatatttttcagagatattcacatatatccatgttgttattattttaaaccaaggatataaggcagccatcagtcatcattttcataacctataaaataactttctctgagtgtcaagagtatcagtttttgagtgtcaggtaaacacaacactgcttcaagctgaataactatagaaatgaatcctaggaatatgttacatagatacaaattatgtcctgattcctaccaatttaataaactatggacttaaagatttcttcttcttcctcctctccttcctcttcttcttcctcctcttcttcctcttctcctcctactcctcttcatttttcttcttcttctctggcaaagcaatatttatgtttcaggaataacagtattaagtgctatggagaagggttagagggttgagattgaggttacattataaagacaagttgaaagcttcaatttatacttgagaataacaagatatgaaaggattttgagaaaatcctttgttcattagataatgtttatttaacaagatgagtgttttcaatgagattatactgtggattttattgaaaagactttaagaagtaaggtctctgttctttaaatcctgctgatttaaagaaatattattaaatacttttaagtccatttttattcagctttgtctacttgccattggttataata

SEQ ID NO: 111921 - DNA, 256 bp, Homo sapiens
tccacctccccaccagcccccagcccttatcccccttttatccccccattcaagttctctgtactttgcttatttacttggcaattgcttcttgatggctggggcctattaaggatcctgtcctagggactgatgatacaaagctgagctgtacaaggtggccccagcctggttttctaagggctaggagaatggtctgagccgaacaacactgcagcaacaagagctggataaacattcccacaggcaagaacat

SEQ ID NO: 111922 - DNA, 359 bp, Homo sapiens
ttttgagggtgatgagggctactaattacaccaggacaacagcaacaaactggaactgacttgggtgaaccagatatgatccccctttgtaagaggtatttagtatatacaggatggttgtactagcaagtgtcagacacaaatgttaggaggcggggcatggtggttcacgcctgtaatcccagcactttgggaggccgagacaggcggatcacctgaggtcacgagttcgagaccagcctagccaacatggtgaaaacctgtctctactaaaaatacaaaaattagcctgatgtggtggcacatgcctgtaattccagctactcgggaggctgaggcaggagaattgcttaaaccca

SEQ ID NO: 111923 - DNA, 245 bp, Homo sapiens
aagcatttgatctgttgactcaacactgtgggcatgtagataaaatagctgttggcagtacagagagttagtcatttagggcctaaaagcagaactggaaggttaaataggagacacataattcgactgtgaactcgcatgacatcccaataaattttcccagatgaaaatcactggtctcagtgacatcagtttacccctatttggttgttccttctccaccctccccattggctgccaatctg

SEQ ID NO: 111924 - DNA, 644 bp, Homo sapiens
cattcctggacattgctgggagccagacactgagttgatcatagtgtgctgtcaacagtgaaagaaaatctgagggatcctcacagaaacggggcgcactttggaatgaaggagcacttttggtgagtcgaaaactattagctgactgcagtcaagatgaaatccactttggaaatgtttgggtgtttttttaagtttggctcaatcacttgtttttcactgttccttatgtaatcttgtgggatgtggcgtcagaaagtcataaatcattcatggtgctttggggaaaaaaaaaacaacactgtgcaaagcagatgcaacttaaaatgaaatgagagaagtttttgggtgaaaccgaaaagaaaagcgtaactcgcatggtttgtagccaacgctgatcactaattctcgcaatctctatatggcttggtcatttgtttccagtttcttgtgcttcactgtaaatggagagtgagtgaaagatatagcctatcacaactgcattgcatttttccaacagtcttagaaaagatgctgtagtagcggcatttttggaaatgattcaaactggcagatttttatttcctgcttgaagaaatccagaaagccccattttgttcaaaaaatcccttttacgacatgct

SEQ ID NO: 111925 - DNA, 410 bp, Homo sapiens
caagaaatgccaaggactgccagcaactatcggaaggcagaagaaaggattctccccttattgggaggcatcgccctaccaacaccttggctttggacttctagcctctagaactgtgagaaaataatactgctgctgtaagccttcaaaagtttttgataggttgttacagcagccctaggaaactacagaagcagatggcactgcaagaagctgggactaggctgggtgtggcagctcacacctgtaatcccaacactttgggaggctgaggcgggaggatcatgaggtcaggagttcgagaccagcctggccaacgtggtgaaacccagtctatactaaaaatacaaaaattagcctgtaatcccagctaatcgggaggctgaggtaggagaatagcttgaaaccag

SEQ ID NO: 111926 - DNA, 310 bp, Homo sapiens
tagaggcaaagctacatacacccattaaacaaggaaatctaattgttttgttggcacacttcttgctcatctgtgtatgctctactctcctatttggtggatgtattggcatctgctatgcacagttatgcactgcataacaacacttcgcatatactacaggggtcccatgagattataatggagctgaaaaatttctattgcctagtgatatcttgatgatcctgaccctgtgtaggcctgggctaatgtgtgtgtttgtgtcttagtttttttgtgtgtgtgctttattttttgagacggagtctcg

SEQ ID NO: 111927 - DNA, 538 bp, Homo sapiens
agcgggacctcgggcggcgggtcacgtcggccgggcatggctgcatggagcccggccgcggcagcgcctctcctccgcgggatccgcgggcttccacttcaccatcggatgtttgccactcagactgagggggagctcagagtgacccaaattctcaaagaaaagtttccacgagctacagctataaaagtcactgacatttcaggaggttgtggggcgatgtatgaaattaaaattgaatcagaagaatttaaggagaagagaactgtccagcagcaccagatggttaatcaggcactaaaagaagaaatcaaagagatgcatggattgcggatatttacctctgtccccaaacgctgaccacgccctggctgcatagatgctgctgcttaagaccttggatgaacttcactgacatcattcttccctaagcagtcaccaaaaaatttatatattttgctcatatacatttccatattataattatagaagatgtataatctatttagatgttaattaaaggaaacaaacaactgaa

SEQ ID NO: 111928 - DNA, 897 bp, Homo sapiens
agcgggacctcgggcggcgggtcacgtcggccgggcatggctgcatggagcccggccgcggcagcgcctctcctccgcgggatccgcgggcttccacttcaccatcggatgtttgccactcagactgagggggagctcagagtgacccaaattctcaaagaaaagtttccacgagctacagctataaaagtcactgacatttcaggaggttgtggggcgatgtatgaaattaaaattgaatcagaagaatttaaggagaagagaactgtccagcagcaccagatggttaatcaggcactaaaagaagaaatcaaagagatgcatggattgcggatatttacctctgtccccaaacgctgaccacgccctggctgcatagatgctgctgcttaagaccttggatgaacttcactgacatcattcttccctaagcagtcaccaaaaaatttatatattttgctcatatacatttccatattataattatagaagatgtataatctatttagatgttaattaaaggaaacaaacaactgaaaaaagataaatttaagacactgggtagtattagtatattgttttggttatgtagggctatttttttatttattagtggtcgtccttcgtttgtgggtgtgtttgttctcctatgtggggagtcctcccccgcgtttttttttttagtggggggttaaaatataattccctcttttattatgttaatgtggttggtgcgttgattgggtgggtgagggtgtttattttacatatgaaggtatttaacggttgacagacgagacggagtgatttttcacctgaaaaatagtggggcgcagagagcgtataaagagtggttgatactacatgaaggccggttgtatttgtgatttttctcta

SEQ ID NO: 111929 - DNA, 387 bp, Homo sapiens
cggacgcgtgggtgacccacgcgtcgcagctataaaaggtcactgacatttcaggaggttgtggggcgatgtatgaaattaaaattgaatcagaagaatttaaggagaagagaactgtccagcagcaccagatggttaatcaggcactaaaagaagaaatcaaagagatgcatggattgcggatatttacctctgtccccaaacgctgaccacgccctggctgcatagatgctgctgcttaagaccttggatgaacttcactgacatcattcttccctaagcagtcaccaaaaaatttatatattttgctcatatacatttccatattataattatagaagatgtataatctatttagatgttaattaaaggaaacaaacaactgaa

SEQ ID NO: 111930 - DNA, 449 bp, Homo sapiens
agcgggacctcgggcggcgggtcacgtcggccgggcatggctgcatggagcccggccgcggcagcgcctctcctccgcgggatccgcgggcttccacttcaccatcggatgtttgccactcagactgagggggagctcagagtgacccaaattctcaaagaaaagtttccacgagctacagctataaaagtcactgacatttcaggcactaaaagaagaaatcaaagagatgcatggattgcggatatttacctctgtccccaaacgctgaccacgccctggctgcatagatgctgctgcttaagaccttggatgaacttcactgacatcattcttccctaagcagtcaccaaaaaatttatatattttgctcatatacatttccatattataattatagaagatgtataatctatttagatgttaattaaaggaaacaaacaactgaa

SEQ ID NO: 111931 - DNA, 857 bp, Homo sapiens
agcgggacctcgggcggcgggtcacgtcggccgggcatggctgcatggagcccggccgcggcagcgcctctcctccgcgggatccgcgggcttccacttcaccatcggatgtttgccactcagactgagggggagctcagagtgacccaaattctcaaagaaaagtttccacgagctacagctataaaagtcactgacatttcaggcactaaaagaagaaatcaaagagatgcatggattgcggatatttacctctgtccccaaacgctgaccacgccctggctgcatagatgctgctgcttaagaccttggatgaacttcactgacatcattcttccctaagcagtcaccaaaaaatttatatattttgctcatatacatttccatattataattatagaagatgtataatctatttagatgttaattaaaggaaacaaacaactgaaaaaaaaaaaaaaaaaaaaaaaaaaaacaaaaaaacaagaggggggggcgcgcccccaagagatattatccccccgcggggggggcaccccaaggtcgaaggcggttaacccaggttttcgtggggtcaacaaggggggcccccctaaaagggagagggcagttaattaaaaaccagaggcccgcgggcgccgccgatttaacaacaaccgtctgcggagctgcgggggaaacacctgctggcaagcccggggggaaaactcgtgcgggaaaggagaaccccttcaaaatgcccggcgggggggtggaaccactaattgtgggggcaccaaacctcacccatgccacaagagaatttaaaaggccctcccaggggggacaccatatgacacgctttcaaggggttgccc

SEQ ID NO: 111932 - DNA, 348 bp, Homo sapiens
tatttttagtagagatggggtttcaccatgttggccaggctggtctcgaactcctgacttcaggtgatccacctgcctcggcctcccaaagtgctgggattacaggcatgagccaccatgcccaacagatgcatggattgcggatatttacctctgtccccaaacgctgaccacgccctggctgcatagatgctgctgcttaagaccttggatgaacttcactgacatcattcttccctaagcagtcaccaaaaaatttatatattttgctcatatacatttccatattataattatagaagatgtataatctatttagatgttaattaaaggaaacaaacaactgaa

SEQ ID NO: 111933 - DNA, 282 bp, Homo sapiens
  misc_feature (37)..(37): n is a, c, g, or t
aacaaatattcgttaacattttgctcccccccccccncctgtgggtaactgagaacacttagatgcatggattgcggatatttacctctgtccccaaacgctgaccacgccctggctgcatagatgctgctgcttaagaccttggatgaacttcactgacatcattcttccctaagcagtcaccaaaaaatttatatattttgctcatatacatttccatattataattatagaagatgtataatctatttagatgttaattaaaggaaacaaacaactgaa

SEQ ID NO: 111934 - DNA, 683 bp, Homo sapiens
agcgggacctcgggcggcgggtcacgtcggccgggcatggctgcatggagcccggccgcggcagcgcctctcctccgcgggatccgcggggtgagcgtgggcagggtcggggctgctctccccgggacgggagctgcggagggaccgcggggctggcggctgtcggggcttgaggactggctcccggagggcgcgcgcggcactggcaatggggggctcctcttcctttctctcattcattctttcattcattcattcactcagcgacaacggcattcgaaatttcaagctctggcgcgctctaggggagctcccgagctgggtggaggttggaggtcaggcggacagacacatgaacagtcataatactgcgggcacaggaaaaaaaaaggattgatttaccgagcagaagacaggagtcatagcccagagtcaaggcgtgggtgcgagggactgcagcggggccggggccttgggaaggtcgactgggcctctgaccttgatcctcctccaaatcccacactaccggagcagaacccaagcagggggcacttcccacgcgctctcctaatctctccccctttctgaaccatcctttgcttcagctcataccattctttctcttaactttcattttccttctcccctggttctgaacctgcctgccctgtgcatgaagagaa

SEQ ID NO: 111935 - DNA, 199 bp, Homo sapiens
gggtgacctggaacttgttgtgaggatgaccaaaggtacttgggagtgctccttgccttgctgtggcaattggaagtcttcatcttaccttgcgccatgcagggagggtgtgccctggatggacccagtgtggcctgtgtgcttgctattcggtacctctctcacctgtcattaactcgggggcattataaattgatcg

SEQ ID NO: 111936 - DNA, 494 bp, Homo sapiens
tgtgtggaagtcagttgacagagcaatgtggcacatatcatgcccgggcaccagcctgtcctgtaatcctggccagccctgctgacttacactagtgtcccagcgcactctactccaccatgcctgtttctccatctgaatgtggagataacagctcctccgttctacactgagtccttctttgtataattatacggttaattactttttaaagtaattaacttaagctttccactcttttaagctttatactatgaaaaccattagatcagttaggaggaataagttcaagagatctgttgtacaacctggtgcctgtagttaataacgtactgtattcttgaaaattgctaagagaatagattttaaatgttctcgctacaaagaaaaagatgcatacgtgaagtaatgcatctgttaattagctcaatttagcaatttcacaatgtacagttatcccatgccaaaactccaggaatgctcaagtgccttat

SEQ ID NO: 111937 - DNA, 562 bp, Homo sapiens
ggttctccaagtgacctgcacatgaacttggcaccagcaaaatgccctcaaggatacaggcagataccacagctccagttcctgctttgtaaacattttacacttctattatttctttcgtgagtgggagtctcgctctgtcacccatgctggagtgcagtggcacgatcttggctcactgcaacctccgcctcctgggttcaagcgattctcttgcctcagcctctcgagtagctgggattacaggtatgtgccaccacacccagctaattttttttttatttttggtagagacagggttttgccctgttgacccaggctggtctcaaactcctgacctcaggggatctgcctgcctcggcctcccaaagtgctaggattacaggcatgagccactgcgcccagccctctgttatttctttacaacacaagttcattgtgaaagaattcgaaaacgaaccctatctagagacatatttcggtgtatatccttggacattttatatcctagtggctacatgtaagtgcacaccataataaaactgtacaaagtcaatatcat

SEQ ID NO: 111938 - DNA, 135 bp, Homo sapiens
tcatcattgagacttcagttgtcaatattgccattgcttctattatggttgcatgtcttttttctttctttctttctttttaagaaagatttttttgcacttttgcctgggtgtttttttttttttcctctgttt

SEQ ID NO: 111939 - DNA, 154 bp, Homo sapiens
actatttgagcacctcatatgcattagtctccatattaagtgtcaggtatacaatggtgaagaaatcagttctggtttttgtccacatgttcatggagtttacaatctagtgtaggaaacaaacaataagcactgaagtaagcacaattttaaa

SEQ ID NO: 111940 - DNA, 839 bp, Homo sapiens
gtaagcctactgctaacatcatgcttaatgggagaaaattggatggttccttcctaacatcaggaataagacaaggatgtctgctttaccacttctattttatgttgcgttggaggttctagccaggataattagacaagaaaaagaaataaaaggcatccagattgcaggaagaattaaaactatctctattcccagatgatgtgatcttgtatataagaaatcctaaggaatccaccacaatattattagacctaaaaatgagttcagcaagtttacagtatacaagatcatatataagaagcaattgtatttctatacactaacaatgcacagtggacaatcttttacaatagcatctaaaagaataaaatatttaggaataaatttaaaaaaagaagtgcaagacatatatacttaaaactacaaaccatcattgaaagaaattgaagaagacctaaataaatggaaagacgtgttgtgctgatgaatctatgagcttaattattaagatagcaatactccccacgtcggtatacagatttaatgcaatctttatcaaaatatcagttggctatttttcagaaatggataaggtgaccctaaaagaaggatccatttgtatggaaatgcaaaagacccaaaatagctgaaacagtcatgaaaaagaaaaaagtttttttttccccccaagatggtagattagagcggtattagcatgcctgtcctccttggaaagacaaaatagtgtatagatattcacactgtgaaccttttcccaagaagcaacataggaacttaacaggaaaatggaataaaaccccgaaaccctttgaaag

SEQ ID NO: 111941 - DNA, 729 bp, Homo sapiens
tctaaaaatactaagatctgaatgtcgaaaaaatttgtaattgttctaataaccatagataacaacagcacatagaccacattacaatcggcggttttcccgcatgcagctcgtcccattcgtagtgtgaaagtctcattagcttcgattttaagcagtgcgttttttttaatcttcccctacgttctggttcccatcttatttttgaggcccatagctgtctaagtcatggtatgtgcagagagagattttttcctgctgattgtatgaaaaattgtgcaaaaggggttgtcatctaaaaaagcgtgtgacactgggagagaccttgtatagtgagcagggcttcccatgagttcatcctggatctttcactgagaacaggatgttttgtcaaggatgggcaaagaggggcacagcagaaagacaaaaggatgtgccagctacaaaaaccacgtgggccaaggacagggggctgcaatgcaaagactggaacttgcagcacggcaaactagagcgtggcaagattagcgtttcagactccagacaaggccacttccctctccaggaaagacgatctcctcaccaacacaagcgcttggcgcttcccttttccgtccaggcgtcctggctggaacgaggaaactcaaaagtgctacgaaagaacaaaagtggcccaaattctgaaaattcttaaaattaaaagattgtaactcaaaggaaaaaaaaaaa

SEQ ID NO: 111942 - DNA, 258 bp, Homo sapiens
gaactaaagtgtcgtagtagactatacaaagtttttgtcataatcactgccttgtttttactgaaactaattagaaggtggtttttcttaaagcagtttctgcaaagtcaaggacttctcacaggatttcttttagtaaattttgataggtatgcttgaggagacttttgggggagactttgaagagacttggtgtttcggctttttgagaaactgaattgagattttcttcatgctttgctttgctcattgtaaatt

SEQ ID NO: 111943 - DNA, 194 bp, Homo sapiens
aagggagctgggaactgggaaatgttttactaagaaacaaaagagaaatctgagcttccaaagaactacttgcggtttgtctgttttttaacaagaaggacaggtgtttgggagaccatctctgagagaaatgtccatgggaggaaaaagagcacaggcttgggagttcaaatactgggtgcaaatctcagatc

SEQ ID NO: 111944 - DNA, 311 bp, Homo sapiens
acagcgttcaccgtttgagtcatgggtacactagaagccctaccacatgcaatatacccatgtaacaaacaagcacatgtatcccgttggtatggtttgcctctgtgtccccacctaaatctcatcttgaattgtaagccccacatgtcaagggagggacctggtgggaggtaattggatcatgggggtggttttccccaagctgttttcatgttaatgagtgagttctcatgagatcttgtggtttaaaagtggggcccttccccagtcactctctcgctcctgccaccgtgtaagatgccaccttgctt

SEQ ID NO: 111945 - DNA, 392 bp, Homo sapiens
tagggtgtcagaaaggccacagtctctctgaaggctctgtgggagaattccttatatacttcttctagcttatggtggcgccaggcatcccttgacttgtggccacatcacttcagtctctgactccgtggtcacattgcctccttctcttctgtttcctctttttccaaataaagtgaacattcacagctcctgggaatttagaacctgggcatatctttggaaggccattattaaccgattacattctcttcactttttctcttgtggtgaaggaacttactcaaattaacccttttgctatgggtttcttatttgaagttccagtttcttcagcagagatttgttggacttcccggtttgtatataccggaggcttttctttccctgct

SEQ ID NO: 111946 - DNA, 483 bp, Homo sapiens
  misc_feature (286)..(286): n is a, c, g, or t
ttacaaaagcagtgcttggaaataggactaagtttgttccttttatttgtggatgaagatctgtcatccataaataaaacttggaataaaagcactgcaattagaatcaaataattattgaagattcctggaaacctgcgggtgagtgtgcacatgtgtatctgttttgctcatgaaatgactttttaaaaaactgcagtatggcacagtggctcaaacctatattcccaccactctgggaggccgaggcaggaggatctcttgagatcaggagtttgagaccaanctgggcaacatagctagaccccatctctacaaaaaataaaaaattagctgggtatagtggcacataactgtactcctagccatttgggaagctgaagcaggaagattacttgagtccaagagtttgaggttacagtgagctatgatcacacaactgcactctagcctgggcaacagagtgagatcctgtctcaaaac

SEQ ID NO: 111947 - DNA, 544 bp, Homo sapiens
gctctgttacaactacttaattccgcctttgtaattctatagcacccattgataatacataaacaaatgagcatgaatgtgtctcagtaaaaatttgttcacataaacaggcagtccacccatgaagctatagcttgctgaccccttgtttaaacaatcaattgaattcaaacagaaataaaaggatcttatatatttaaccatgttgataccatttccagtgcttttcattcttctatgtagatccaaatttccttttgatattattttacttctgcctgaaacattttctttaacattttttatagtgttgttttactggtgatgatttctttcaggttctaagtgcctgaacaaaatctttatttcacctacatcttgaaagatagtttctctgagtctacaattcccagctgacaatgtttatcttccagtactttaaagatgttgcttcattatcttctaattttctttgtttccaataaaaacagatgcgtccgaaccactaacaccacacatcaccacacaatcagcggaatacaag

SEQ ID NO: 111948 - DNA, 119 bp, Homo sapiens
atttagaatagttaaggcttcttgttggattgtaccctttatcattgtgtaatggccttcattgtccttcttaatttttattggtttaaggtatgttttatctgatatgaaaatagcaa

SEQ ID NO: 111949 - DNA, 433 bp, Homo sapiens
cacctcagaccttatttaagaagaaattccaaagaaaccaaaagacaacagggaagacaaaaacatgaacactagaggaaattttggcctctgatacttacaggtacagcaaacagtgaacatagcctaacccctagccagataaacacaaaaccttacactaaaggcctatttacctcagttccttctacaccacgtacgatctctgactttcaatgaaaaattttaaaacatgctaaaacacagtttgaagaaacaagcatcagagtcagactcagatatagcagaaatactggcattatcagactactaatttttttaaagctctaattaatattcctagagctctaatggaaaaaaggtgggcaaaatgcaaaggcagagaaatggaaactctaagaaagaatcaaaggacaatgttcaggccaggcat

SEQ ID NO: 111950 - DNA, 652 bp, Homo sapiens
gaacacagagagtcagggccagccaaatggaaattgtctgctcataggagaagccccggggccatactctgaaagaggtagcttggcgacagacaaattttctaagagagacagtatggggagaagaaaaggcaaaggtccaagactcaaaaaatgaatgaatgttaaaacatcagaagagcaagataaacgagttaagaagatggcacaggagccgcagagaggtggaagatggcttggaagagtgaaaacagttttgctgaggacaggtaagaagagatgaggtggggatggtccatgaagatgaatgactgcttcctaagacactgtggcgaggaggctgtggaaagatggcagcagcagactgtggagagaagtcaattcactgtgagtggtcagacaatacctgaaccaagaagacacatgggacaacctcttgggaacagaaagttcagaaaagggctaagaaataggatggagatagggatactcaatgatctagtcataagggatcaaaatgggaatgcaattaggaagtagaaggcctgagatagacagcagccactgggattggaagcaattttaggatgatttcccaaagggtagagatgttccaacaatagcttgatgataaattttgtattttttcagg

SEQ ID NO: 111951 - DNA, 428 bp, Homo sapiens
gacagagtctcactctgttgcccaggctagagtgcagtggcaccatctcggtttactgcaacctgtctcctgggttcaagcaattctcctgtctcagccccccaagtggctgagattacaggtgtgtaccaccatgcttggctaatttttgtatttttagtagagacagggttttaccatgttggccaggctggtctcgaactcctgacctcaggtgatctgcctgcctcggcctcccaaagtgctggaataaaggaactgtgtattaacatgttaacaattcataactgcacttcttatgacattttgaaaatctatgtatagttacagaacaatgggttttgttaaactatcacatttatacttgcagaaattatttcatcattattagtaggaattttattggttcaataaaattggcaaaactg

SEQ ID NO: 111952 - DNA, 923 bp, Homo sapiens
tcaaagtcatctgcagcctttaattactcagtctcaccacactctatttaacagagaaaagaggaaggtatggaaaagagtgaaattggcataaaaaatccaataaagggcaacgagcaggaaacaacaaaaacatgggaaactgccgacctgaggaatcgcgctcttctaactttacagcttcacctgccgtgtttgctcctggaggactgagacttttgtctgattcgtctgctgctgtcttcccgatgcctagaacactgcctgatgcacgggaagtatttgtcagatacatcccatggcttctaatgccatttgcaaggatgaaagctgggtgtgcccggctgtacggcaatacttccaaaggcctgtaggactccccagtgactgtcccattcaccaggaggaggactgcagtcacctgcattgtcctgggaaggtcagccaggccttttcccaatgtctgtctgggaaaagccccggtgtagtctgctcggtcctacacccagaatcacgggggcttcaggagcaggcattacgaggcaaggagtagcttctccccctcacctcccactcagcagaacgcactagccctgtgctcttctgatcctgaaggcagctgagtctgaaaagttcctgtacctttaaaggtactagaggcagtgtggtgcccactcaggaactgcatgatttaaataggtttctaggataaaggcaactcgtagcacaaaggaacaagtcccagggagtggcattccagatcatttgattcctgagcgaaggaattattatggtgtggaggtggggacctccttactacattccaaattgcaataaggttgtaagggttttctcttccattctgaagtactttgacaatagttttgaacttcaaaaatgtttattaaaggtgttttcacagc

SEQ ID NO: 111953 - DNA, 237 bp, Homo sapiens
gcgttttggtcgtactctcgaggtatcccctctagatccttgccaggcacagtggctcacgcctgtaatcccagcactttgggaggtcaaagccggcggatcacctgaggtcaggagttcgagactagcctagccaacatggtgaaaccccatctctactaaaaatacaaacattaggccgggcgtggtggcttatgcctgtaatcccagcactttgggaggccgagacgggtagat

SEQ ID NO: 111954 - DNA, 483 bp, Homo sapiens
ctttttcctgtgtccctgattattgtttaatagtgtttgtatactgacaagatacataatatccaccttctgcacccacagtgtccgcctttatgcttggacaagagcatgcagggtaggacatttctgagccttgcttttttccctggaagttttttgtttgtttgtttgttttttaagagacagggtctcttgctgtctcactcaggctagagtgcagtggtgtgttcatagctcactgcagcctcaaactcctgagttcaagccatcctcttgcctcagcctcccgagtagctaggactacaagcatgcaccactatgcctggctaggtttttttttttttgttttttttttttggagaaatggaggtgtctcaccatgttgcctgggctggtcctcaagcaatcctcctgcctcggcctccgattcactggtattaagttgtgagtcaccacgcccagctctacctttcagctcttctt

SEQ ID NO: 111955 - DNA, 721 bp, Homo sapiens
gaaggcatgtaagtatctctgcctggtgatgtttggcattgccttgttcttgggttccattgtcaccctggctgtttggggaagacttctgagaggtaggggaggagactaacttaggtcggagtctccaggggcagagcctgaaatgggcattctgggcaagagctgtgttgagggagtgctctctggggaatcctgtaagggactgaagaaggaaaaatagggcggcaggaagctaagcaaagctgtggactcagccaaggtctagcctcagcctatccaggagcataaatgacgctgcagagttgtcccaccttgaggcacagactggtcagttccaaccccaagtcaatcagtcattggctgagagctgccccggcagggagggagtagactcctaggcccttctggaccccatgagggctcctgtgggtcatgggtgattctcaggagaaggctgcagctgttagcagctggggatgggagcatcactggccagagggatctgagcagagcaccaacagcatctaggacagagagacgatgggagctggtgccctagtgttgtcctcatcccctccctctctgtgggggtccctcgagaatgtgaccatgagcttccatctctctccaggttgagcccatggtagaactcatcaaagagaaccaggaccctgggtgttgaagcttctaggctacaaagacagggattctgaagacc

SEQ ID NO: 111956 - DNA, 395 bp, Homo sapiens
accctatctctacaaaaaattaaaaattagccaggcatggtggtgtgtgcctgtagtagtcccagcttgaggctgaggcgggaggatcgcttgagcccaggagctcgaggttacagtgatctgtgattgtgccactgcactccagactgagcagcaggatgagaccctatctcttaaaaaactattacatgaataatggggagtcatcatgtgttttgtaaatagggagtaatttaacacaaggataattggctgaattaatctggcagtaatgtttagggttcaacagaggcagacaaactaaataataggatgctgcagcaagtcatgcatgagtaggtgggattctgcatcatggtggtgacagaaataacagattaaagggacattcaaag

SEQ ID NO: 111957 - DNA, 856 bp, Homo sapiens
ggactctgtcctttccagatgaggagccgagctcacaagctttaaggaataccctgtgactaacgccacccagggtgctaaacccagtcagactgttgaaggatttaaaatgcgcttccctgctacctaagtgtttctgtggaagaagtacctcagggagaatgtattaaaacttttttattttattttattttattttattttactttattttacttttttattttattttattttatttttatgttatgttatgtttgttatgttatgttatgttatgttatgttatgttatgaatttttttgagatgaagtcttactctgtcgcccaggctggagtacagtggtacaatcttggctcactgcaatttctgcctccttggttcaagcgattctcctgcctcagcttcccaagtagctgggattacaggtgcctgacactgcgcctgcctaatttttgtatttttagtagagatggcgtttcaccatcttggccaggctggtcttgaactcctttcctcgtgatccacccacctctcccaaagtgctgggattacaggcatgagccaccgtgcctggccaagaaaacattttatatttcagcgtatgctgagtttttaaaatggcattttcccccgtttttgaaaagataacgtgttgcacgtgcagtttctccagtgcccggctgtgggaaagcctgcattccctttggagcacagacttcaggagtgaagccactgcggggctgtgctgtgtttccacaagtgccgtcaccacctttcgtgtactgaatgctgggaattcagtagtgagccgtggcctaccagagccagctcttagcctcttattaatttttt

SEQ ID NO: 111958 - DNA, 615 bp, Homo sapiens
tgtagacccaccaacagcttatactgggcacctggaaatgccacagacactcaacagtagcccttgagagcagccatgcagagccacagcggtgcaactgcccaaggccttgggagtccaccccttgcatcggtgtggcctggggtcaaagattattttggggctttaagatttaatgactgccctgctgggtttcagacttgcatgaggcctgtagccgctttgttttggccaatttctcccttttggaatgggagcatttacccaatgcctgtacccccactgtatcccagaagtgactaacttgttttttattttacaggcttataggtggaagagacttgccttgtctcagagtttgtactcagacatttgaattaatgctgaaatgaataaagacttgggggactgctgagaaagtatgattgtattttgcaatgtgagaaggacatgagatttgggaaggaccggggtagaataatatggtttggctctgtgtctccacccaaatctcatatcaaattgtaattgctagtattggaggaggggccttgtggaaggtgattgaataatgggggcaaacttcccccttgctgttctcatgagatttggttg

SEQ ID NO: 111959 - DNA, 299 bp, Homo sapiens
cccactgactgtggatttggttcatcattctgttaagatgtgatggtagcctctaccaattaaactagagttggcagaggagatgaaaaacattttctatctttgctttggactatggtgttgttccttaagagacgaagtcacagaatattagagattatctaacattacctcctcattttacagactgcaaaataaaggctcaggtgagtttcttgccccaggtttcactggaaatgcaaacaaactaagaaacaaatacaaactaggtcggcgtggtggctcacgcctgtaatccc

SEQ ID NO: 111960 - DNA, 174 bp, Homo sapiens
ctgactttgcagagccagcaggagtggtcttcctgggccactgtgctgcaccttctgcggtctcccgtggagtgacaggaagacccacgggtcaggaaacaagctagaaagccgcggggccgccctgcagggtgtaggattaaggaaccaacacagcctttccctggtggttgt

SEQ ID NO: 111961 - DNA, 340 bp, Homo sapiens
ctgtcttcatgatcacagtgatttcataccatccttacactgtccccattgacaccattatcacacataccttggccacatacctccactaccccactaccacacaatactctctccctatctctccatcaaacacatgacccacatcacttaggattttacacttgtggtgctcattccctgatatctcattttccttcttttatttcctctcctctcccttcttgtcccccactcctatcttattctctcatacacacacacacacaaacacacacacacacttactttcctgatatgtggatcttacatcaacccagatataacagagaagtttctc

SEQ ID NO: 111962 - DNA, 603 bp, Homo sapiens
gagctgaatattttcttaaaatgacattcaaagtttttctgagatttttttctatcctattaatttagcaaattataaaccaattgcaggagaaataagcattcttgtatatcttctatttctcttgatgagcaagataatttttgatctctctaattgatcgatgaaacacgagcatatgattgtttcataaatatggattaaaaagccaacccctcatatcagattttgaaatcgactttacaattctgaagagcatagatgacttcattttaatttctactccaaacactaattcaatttacagtggaaatagtagtaactaataattattatttaaatttgaatatgaaagatttaacatgttcattaatgtattcgatgttgaaagaaacatttatctaacagaatttatattggaatatgctgcagtcgacatactttatatattattaacacagtttccaaagtgtaataagctttttcctcatatttagtaaaagaacatctttggaaagtcatataaaaaaataaagcatatacaccggaagctgtataacaggggagacaacaaataatgcatataacaaagtgtaatccagg

SEQ ID NO: 111963 - DNA, 258 bp, Homo sapiens
  misc_feature (223)..(223): n is a, c, g, or t
aagattttctattgagttggagagtgattggtaatttgggaaggtgttatttatttatttattttagagacggagtcttgctctgtcgcccaggctggagtgcagtggcttggtgttggctcactgcaatctccacctcccaggttcaagcaattctcctgcctcagcctcccaagtagctggaattataggtgcacaccaccaagcctgtctctactaaaantacaaaattagccggacgtggtggtgcatgcctgt

SEQ ID NO: 111964 - DNA, 227 bp, Homo sapiens
ccaaagtgctaggattacaaacgtgagccatgacacctgccccaagtcggtttttaaatcaaatcatttctccaaaaaatttaactacctgggattactgccacatcctctccctccttacctaccatttgcctatcaatacttattcatataaactcgctcactgaggtaggtcctgcctcccagacaataaatccctcaaggtcagcccaaagcctgcctcagct

SEQ ID NO: 111965 - DNA, 538 bp, Homo sapiens
cctgcctcagcctcctgagtaactgggattacaagtgtgcactaccaaccctggctaattattgtattttttttagaagagacaggatttcaccatgttggccaggctggtcttgaactcccgacaagtgatctgcccgcctcaacctcccaaagtgagcgactgcacctggcctcttattcttttggctcattcacatactttcccagaagagtgatttcttataatactgtaatacctgaaacttgtttctgtatggaaacaaccatagatgatttcttcgcaggaaagaggtagatagggtgtggctgttcccttgttggggaactgttagtttctgtagaagaggttttagccttttacttcattagtaatttttaacatgggtggcgttgattggtgaagtcttttttaactttattcccccccgccctttttttttgagacagggtcttgctctgtcacccaggctggagtgcagtggcatgatcctacctcactgcagcctcgaactcttgggctcaagcaatcttcccac

SEQ ID NO: 111966 - DNA, 955 bp, Homo sapiens
ggttcaagtgattcttgtgcctcagcctcccaagtagctgggactacaggcatgcaacaccatgcccagctaattttttgtatttttagtagacggggttttgccatgttggccaggctagtcttgaactcttgacctcaagtgatctgcccaccttggcctcccaaagtgctgggattacaggtgtgagccactgcacccagcctctgaaagcatttttgatcagtaacacagcaggttttaaattcagaataaaaacatgatgaataaaagctattataaaatgaagaaactgtcttgatatttttttaaaagcaggcaaaatcaagcaaggtgagaaagaaattaggcaaagtaaagcaaattagactttgaacaagtaagaatttcaagaaaaatagaaaatatggctattttcctctgttaccatgtacctcccaaactaactgttataactaactgttacaactaaaaaggaaagggggcgaatgaaattttacaaagtcacaggtgtcctgagtcatccacaacattgggtcagtccaaactatgtgtttggtcaatgacacactgaactttcctccaaaggtgagttacttctaaatatgccagaaaaactaagaataacaattcaatttggtacattcttacataaaaggctggtctagccagtctttccccatcataaagaactgaattgtaaagaactgaaaagtaaaccaaatcaataaaaggtcacttttataggtttatttgagtcctcagagttttaaatcatctcatataaaattaacttgctagacagggcacccccacaaacacgtatttttagcctagttttccatctctcagaatttttctctgaagttctcattaataataagaaagttaaaacaccttcgaccagtcaacataaattgtcattagatgtgacaagaaatacaaaacccaaccc

SEQ ID NO: 111967 - DNA, 986 bp, Homo sapiens
cgcccagtctggagtgcagtggcgcgatctcggctcactgcaagctccgcctcccgggttcacgccattctcctgcctcagccgcccgagtagctgggaatacaggcgtccaccaccacgcccggctaattttttgtatttttagtagagacggggtttcactgtgttagccaggatggtctcgatctcctgaccttgtgatccgcccgcctctgcctcccaaagtgctgggattacaggtgtgagccaccgtgcccggcccacttttgaaaaacagtttcagtgagtatcgaattctaggttgactacttttttcttttgctactttaagaattttcttacactgctttctcacattgtttccagtgagaaatctggtgtcatcctaatttttgttcctctgtttataaaatctttttgtttttcatctggctgttgtcaagattttctctttgttactggtcttaagaaatttgattatgatgtatcttggtttatctttgtgtttcttctgcttggggtgtgttgagtttcttgtatctttggttttatagtttgtatcaaatttgggaaatttggggttattatttctttaaacactctctctgttcctttctttctctctccttatgggcctccagttacacatatattaaaatgtcccacagctcaccagtgttcttttcattaaaaaaaaatatattcattccttctggggcagggcatggtggctcatgcctgtaatcccagcactttgggaggccaaggcagtaggatcacttgagcccaggagtttgagaccaccctgggcaacatggtgagacctcatctctacagaaaatttttaaagattagccaaacatggtggtgtgcgcctgtagtcccagctactcgagaggctaaagtgggaggatcgcttgagctggagaggttgaggctgcagtgagtcatgatcacgccagtgcactccagcctaggtgacagag

SEQ ID NO: 111968 - DNA, 494 bp, Homo sapiens
ccacacctccccaggctcttggccccccagcccaacaacctaatatgtccatatggcccagaggtgagagaacacagctggctttgagaggggagctaagcccacacaagggcacaggcatggcattgcacagacccttaacctctcttttgacctgtttcctcacctgtaaaatgaggctgaatctaacagcaggtgcccatctcagagctagtgaaggaattaggtaatgcaatcaaagcaggcagtgcaactttcggctgacagagcacgcactggcaaacgctggctgttactattgtgaatggtgttaataactactgtctgctgccctgtacagtttataaagcacatctgcatccaggatcttccatggctgttgagaggcctgagtaagtggatggtgggaaccccatggtgagcctgctgcggtggccagggtgttgctatggtcactgcacactgtgaacgcctccagggagctggtgggggca

SEQ ID NO: 111969 - DNA, 416 bp, Homo sapiens
gaagacttctgatgcaggtgtagggcgattaaaagaacctccttctcctctgcgacattgcaccggcgtggattcaatagtgagcttggcagtggtgggtgggttccagaaggttagaagtgaggccgtgagcaggacctccttccaggagacatgccatctgcaggcagtgcaactttcggctgacagagcacgcactggcaaacgctggctgttactattgtgaatggtgttaataactactgtctgctgccctgtacagtttataaagcacatctgcatccaggatcttccatggctgttgagaggcctgagtaagtggatggtgggaaccccatggtgagcctgctgcggtggccagggtgttgctatggtcactgcacactgtgaacgcctccagggagctggtgggggca

SEQ ID NO: 111970 - DNA, 335 bp, Homo sapiens
ctcaaggtcaaggtgaaacctctggatttacagatcagcaaagctgcctaccattgtgtttctagcatctttgtcctccctcatttcatctggggaaaggaggtgagctagacagattccagcccatagggagtgtatgtctcatggggagacatcaatgaaatgaccacacaaataatccatatgctatgatctgggataaatgccatgaaggaaacaggctgagttatgagagcttatggtggggtgaactgactccatccaggaaggtcagggaaggctttgccatagggcatttgagctgagagccaaagggtgagtgacagttaactagg

SEQ ID NO: 111971 - DNA, 289 bp, Homo sapiens
atcgagccggtaccctagcttagaagtttcaatagcagccgggcgcgtggcgcgtgcctgtcctcccaatgtgctgggattataggtgtggaccactgtgggcctgtgttgttgctttaaaaaacccactgtgaagatgcataagtggggaaatggaattgtagtcaaaagaggcttaatcttagcaaaatactataaaatgtatcagtctaatgatgatgacacttaatagcatatattaaatttatttcagttacaacattgctttagaaattaaaatgaactatag

SEQ ID NO: 111972 - DNA, 219 bp, Homo sapiens
tgacatgccaaacacagtaacttcttcttttagaggaagcctctctgcatttgcactcatcattctttttccccaaaatgtccttcttgttttctccagctagtaaagatgtcctcttctttcaagaccctcttgtgaaggaagttttgagggttgcttcatattgaagtagcactttctctgtatgtcaactgagtgctgtctgagtctctatcacaa

SEQ ID NO: 111973 - DNA, 271 bp, Homo sapiens
ctagtgcctttaaagcacctactatgtttcaggcactttgatttactttcagaatgtttttctccctaatttaatgctcccagctacctaagagatatatggtattactacattttatagataagaaatgtgaggtttagaaagggactgtttgttcattgtggaacttaaattggaactagcctccaaagttggctgaaatttctgtttggaattcagaatttgaatgcataccacttgtcccaacttataaacaggactcttgtagtga

SEQ ID NO: 111974 - DNA, 127 bp, Homo sapiens
cctgtctcaaacaacaacaacaacaacaagaggtgagcaaggctcatgtggtgacccagtccgcccccaccaaaagcacccggctacttcccagacccccttctctgtagaggaccaggtcatctct

SEQ ID NO: 111975 - DNA, 485 bp, Homo sapiens
agctggggcacagaggtttgtatcctgtcagaattaacaaaattttgtattgaaggaaattggtgaatagaaatgagaatagctatgaaacacagtccttgagataaaaatttccctaactcctaaataacatagtaagcctttccactagtgctaatgtgaattctcgcatttgagtatttttttttaaaataataacctgaaagaggaagatgtagtgtggctaaagttggaaagtgaataaaacagatatattggaaacataaaatctactcatcagaatttatgagtatagaagtttctgctaaaatatgcatcatgtatcacatgggcttgtggatgtgtgttttttccagaaaatttggaaagacagaaccttctaggggcacataaagtatgaacgtaagcttttaagtgctaagagaaggtgactgaaaaatatttttgttgaatcttcacttgtttcatttttaatcatctctcct

SEQ ID NO: 111976 - DNA, 1006 bp, Homo sapiens
cagggctgtggcctggagacctgctgccgccccagctgctgtcagaccacctgctgcaggaccacctgctgccgccccagctgctgtgtgtccagctgctgcagaccccagtgctgccagtctgtgtgctgccagcccacctgctgccgtcccagctgctgtcagaccacctgctgcaggaccacctgctgccgccctagctgctgtgtatccagctgctgcagaccccagtgctgccagtctgtgtgctgccagcccacttgctgccgtcccagctgcagcatctccagctgctgtcgccccagctgctgtgtgtccaggtgctgcaggtcccagtgctgccagtctgtgtgctgccagccaacctgctgccgtcccagctgctgcatctccagctgctgccgcccctcttgctgtgaatccagctgctgccgcccgtgctgctgccgcccctgctgctgcctgcgtccagtctgtggccgagtctcctgccacaccacttgctatcgcccaacctgtgtcatttccacctgcccccgtcccttgtgctgtgcctcctcttgctgctgagctccttgcctgaaactatctcctccccttcagctcactcctcacagaagcagaccttgtgcatctcataaacaactcagaagaggccattcccaccaactgtgtgtccatatcctggacatatatctaggatatatgtcctggctatacatctagaatatatgttccccatgttgacccaagtgtgaaattagatattatttacagaaagaaattaatagaatttaccaaattttataccttatatttgtatttatggataccaagttcttctgtcccaaacatggaaattcttgcagggtaactcggggcaaggatgtctcactctcagatttgaaagtctgattgtttcaccctgtatttccttttacagcaatgtttctgtatcttatttttgctgcttctgaataaaactccacttttgtcgcatagaaat

SEQ ID NO: 111977 - DNA, 221 bp, Homo sapiens
gctcattgccttcttagggtaggttggaataggagttaagagtttaaaaccactgctcatgcaaactttacattttaacaagaatgctcttgaaagtgaataatgcatgctgaaagtgaaaatgcgtgttggatatgaagtattttgaaaataaccagtatttcacggaattcgacaacatttattttaatcgcagatctcttatatgaatatagtaatta

SEQ ID NO: 111978 - DNA, 426 bp, Homo sapiens
aaataccagttgcaaaacagtcagcaccctgcctggcacagagtgcaggagctcagagcacagcagcgtgaggatcgctgctctcaaggaggcctcaggaagatgaggctgagcaacagcctgatgcaccacctgctctacctgctcaaattgggtcaggcgagcggtgtacccagctgttgccaaggcacccagcacacagggaaatactccagccaggacggcaggtgctgtaggggtggggccttgggcctgcttcactgacaccacccatgctgccaccaccaggtctctgggccatctcgggggttcctgggggtgggggaaatatgctattgatctgggtccaggatctaaccaggtccagttcccccagaccctactccaacctggaaacaatggggcctttgctgtctagaggggcag

SEQ ID NO: 111979 - DNA, 300 bp, Homo sapiens
attatatttaattgaacaagagggaagtttctatgaaattctaccacaagtctccaattgttatatgttaactgtatttaagagaactaaatataaataagggtagttataaacatgagattaacaacctgataggttttaactacaagcctatttccttaaaataagagggacaaaatatagaatctacagtgacgctaggaataactcacttcgttttttttcaacatgtaagaaatagttaacatatcaagttttcagaggctgtgattgtttaagccaatgtaaaccaaccaatat

SEQ ID NO: 111980 - DNA, 298 bp, Homo sapiens
tctaccatccccaagcaactgttttttctcatctctgtaatccctctcttatagcactcaagtcacaggattattgggtgtccatgtcttccccacttgaccacgatccaattgaacacaaggatgtgtattattcacttttgtcttcacaagacctcagcagtttgatcccacagactttcacaaatccttctcttgtactacctggcacttgctgcacttagtgctggagatacaaagataaatatcccctgatgagacttccaggctagtacctcaatgtctgattcactgagga

SEQ ID NO: 111981 - DNA, 245 bp, Homo sapiens
caattcctccacaaccattgttttaagagggatttttttttctttgatgtgataatgagcatcaaaataacaatgacattatcatcacaattatttaaaactctctttaataaaataaaactggctgggtatgctggctcacgcctataattcccacacttttttgggaggctgaggcaggagaatcacttgagcctaggagttcaaatccagctctggcaatatagtgagatctcatctctaca

SEQ ID NO: 111982 - DNA, 400 bp, Homo sapiens
agccagtttgcataaacaggatgtgtgatatttactcttgataggaggcatagcaggcccttagagctttacttaaactgcatggcaaattgaaatgaatcattttagtgtttagctagccactaaatcccttgctgatctgtcctgcgtagtttaaaacgtggccatgttataaagaaaagtcttgaagcatccggttattgctgagttttcagaagaaaacaacgcaagcaatctcttgccctttttccacgttaccctttaaaataacctttgttcagtggtacatttagttaaggcatttgtattcaaatgtagcatagtatttgcagagaaattaccttttaaaacatctcaaaagtgttttctaaaatgatgaaataaacggtggggttctgtc

SEQ ID NO: 111983 - DNA, 543 bp, Homo sapiens
ttcagtgggttttagctggctccattactgcaaccttttatcagcaatgtctttatgacctgtattttgtgttgacctcccgtctcatccaaatgccttaaccatctgggaatgcagcccagtaggtttcagcctcattttacccagctctatttaagatggagttgctctgactcacacgcctttgacagaatgagaccgagaggtaggcaggggtcacagtggggattgagagaagtggacagattctgggagtatttgagaaatggaattcacaaggacttgggctgaactcaatatggagagtgtggcagaggagaggcttcatgactcacacaccgtgatgcactgtggtgctcttcactgaaatagctagcattggaacagcaggttttgttggggcttgctgtgtgactaggagggataggggcggcatgagtttggttttctgcctgttagtttgaggtggctttgctagatctaaacaaagtgttcaagtagtcacttgtattttcttgtctggagtttagaggggagagatat

SEQ ID NO: 111984 - DNA, 399 bp, Homo sapiens
gtttagttaactagcattcaagtttatgaagatttttgtgtagatgtaatgcttgcttctgccaaggaataagaatgttgtaatccaccatcttttattctggcttttaggcagctgttgaggtaaacaaactaagtttaatgctcgaagatagtgtattcctcagaactaacacatttgattttccataggtttattttcctttacctgttctaatttaactttttgtaaaatgccacagtccatttttagaaagattaagggatatttcattattatagataagtttctaggtttctttcaaacttgatatacctaatataaaagttcagattatttttcctctttatttttcactttttattcagccaactgtgatttctagaattttgattttca

SEQ ID NO: 111985 - DNA, 741 bp, Homo sapiens
gcatatcatgttatgttgatatatattttatggctttgaacagtgtctggttgtgtactgtgtgatggggcagaaatttagctttaacatatttaaaaatgttttctcagcttactggttccttgaatgttattcaattatcacttttatttctcaaactatcttttaaatcttattttaatttctaacttatataactctttctgactatactttttgatttactgaggtaaataaactgaaacaacataggatatctttcaagttgtaaaatatagttgaatttatcagtagcattagaaaatcaattattgaaattatggaaatgtttattttattggttactcctacgtcactattccctaacatttcatatgtagaataacatcccaatacattaactgcccatagagttgcaaaagagaggagaccaggtaatttacctaaattgtactaaattgctacctacccaagttaagtatgaaattgaaataactatgttttgtacccatcatatagcaaattatgtcatagccctagtatgtgtgtaggtggggagcagtgaggttgaggtttagaactttatttgagcactaaaattggtttactgtttcttattgatttccagtcttgcaataaatctaggctgccttggttcagtttccatctctgctacctagtgactttgtaaattacttggacaaggttgagcctctctgtaccttagtttcctcatgtaca

SEQ ID NO: 111986 - DNA, 234 bp, Homo sapiens
gatgctggtgaaaggggcaaaggaggtctctttgggatgaattggctgaacagtaaatagtctaggagataaagagccttgactccaattctggccaccactgccgagaacaacttggcccaattcctaattattctctctcactttctgcctctgcaatgggggtaattattgaaatatgttaacaaggtgtgttgagatcattggatagaagacaaatatcatttatactca

SEQ ID NO: 111987 - DNA, 583 bp, Homo sapiens
agacagatacgaatcgagctcgtacggggatctttcaatacggcgatctgacggcatgcgtgctcggaggcggtcgtcgttttacaatgacgttgattggttaccacaaaatgctcttgtctcatcttgttttttccctgcccagccctggaatcaatcacttctctaaggagccccacccacattgttttgaaaaagtcccaacatccagacagcaccctagattaactcagaatctctagctgtgaagtcacggaatttagcttttaaaaagttccccaggtgattccaatgtgcatttgaggttgggaaccacaaatctagactttacttctggtggctaaagaatagttaaaattttgttaaattcccacatgccaaagactttagtgtacttcccagcaggctcttaggctccctgaagacaagtttttaaaatctctctaactagcacacatcccagaacctggtacataaatggtgttaaaagaatgaaagttaaacaagtaaattaagctttggcttccttggggaaattagcctaggtctaactcttttcttaatccctcattcgtctttaaat

SEQ ID NO: 111988 - DNA, 1255 bp, Homo sapiens
gacacaggcaggtggcttcttaaatcagtgtgctctgaactccctgtgacctcagccaacctgtgacaactgagaatgagacaggctctatcctcagagcctctttttgccctctctgcagcctagtggctccttccctcccccacccataggcctgcgtccccgccctcctttcttccatcaagcctgagcttgggaaagaatctgataaacttcttacattgtaacctttaagtgaaggaatgagacgttagggatggatttgaggcacaagtgagacagtgcagaaggaatttgagggttggagggggctttcttgaatctgagcgattcagaccataaaagtaaacttgtctttgtttatttgaccaggcttacatcaaacatggtttctcttttattaatatcaaacacaatgtatttcaattcagtaaatatctgagggacagaaaccaacctaggtgctgttggtcacagtcttggaggacagaatggcagaagtaaatactccataaatacatggaatagaaatctgtgcaaagtgccaaaaacatagaagaggtagcagttatttcattggaagcagtggggcagattaaggaaaaattcagaatgaaaggtaacattagacactgggtgtctagaggaataggagtttgccaggcagctggaggaagggcagcaccggggcagaggaaccagcgtaagcaaaggcagggagatgtgaagagttatggggaatggagaaaagactggtgaggcaggagtggaggatactgagagttgcaagaggtggagagagattggagctggattatgatgggaagtgtgaagatatttacacctaatggtttttgaacaggagagcaaataggtccaaaaatgcctggcagcctcacagagaataggctggagcctgggtacgtagacttgtcaagctttatacaaactcatacaaactgctacaacctgattaagagcctctcatccagagtttttattcctggtccttcgctgactggcactgtttttgttttttttttttaactgggggagatgacctcacacaggatatcatgctaaccaaatttttatgctgccaagtcaggccattttttttaaaaaaatccatccactgtcactatttcataaaatgaaagacattttaataccaagaaaaagcacaaaggctaaacttgaaagatgaaggcagtcctttacatttaataaatttagatttatgaaaaacttgcaa

SEQ ID NO: 111989 - DNA, 264 bp, Homo sapiens
ggtgtgagccaccacgcctagcctaggcctgcaatttttaacttcctgtccaaatagttgataaatggggaaatttttaaaaatagttttattttctagaagttttagacttacagaaaaattgagaaggtagtacaagagttcccatataacctgccctcagtttaccctattattaacatcttatattagtatggtatatttgttacaattaatgaaccaatgctgatacattactattagctaaagtccacagttttttta

SEQ ID NO: 111990 - DNA, 988 bp, Homo sapiens
cgtgatctcagcttactttaacctccacctcccgagttgacgtgattctcctgcctcagcctcccaagtagctgggattaaaggcatgtgccaccatgcctggctaatttttgtatttttagtagacatggggtttcgccatgttggccaggctggtctagaactcctgacctcaggtgatctgcacacctcgggctcccaaagtgctgagattacaggtgtgagccaccatgcctggcctttttacatcccttttaaactttttatctttcatttcattctactttgttttattttcttctttttttaaattctactttctgaaatatattgatactaattagtggtttttagaagttagtatttaattaggatgggattatgggggattccagtaatctggatcaatatgcactatcttccatgcaactgcaaataatttccttcagttgtgttttgtgtgtgggagggggttgaaggataagggggtggcatggggatggctatctttactattttcaaaatagttttgtttctagtttgaaattattttttaaatgttaactgtgttgctgagacaattcagcggggaaagaatagtcttttcaacaagtggtcctcagacaattagatattagcatgcaaaatattgaagtttgatgtctacctcaggtttgacctctgcctcacaccatatacaaaattaattcaaaatagatcaaagacctaagtttacctgctaaaactagaaaactcttagaagaaaacataagcataaactgtattgaccttggattaggcataatcttagatacaaaaataaaagcataaataacaagagaaaaaaataaaaagcaaacttctgtgctacaaattatactatcaagaaagtaaatacacaaccacagaatgggagaaaatttttgcaaacatgtatctgagaatggatttgtatctagaatataaagaactcttacaactaaacaaa

SEQ ID NO: 111991 - DNA, 418 bp, Homo sapiens
aaaatctctcctggattagtgttagatttctagaccagaagtgtcaattaagtttaacaatttcttcaggcagagaaaattgcttttgaggtatcacttaagcaaccttagtgcttctaagcaacataactgccttttgaggtatgaactgaagggaagtgaagtataagcaatagagttgggattttttttttcttgagacggagtttcattcttgtcacccaggctggagtgcaatggcaccatcttggctcactgcaacctctgcttcctgggttcaggggattctcctgcctcaccctcctgagtagctgggattacaggtgcatgccaccacagccagctaatttttgtatttttagtagagacggggtttcaccatcttggccaggctagtctcgaactcctgccctcaggt

SEQ ID NO: 111992 - DNA, 537 bp, Homo sapiens
gcagccaccttccatgtccaggccctgttattgctgggcatacaggcccctggacagttagtgagtgtgggtcacagaactggggagcaggatcgggggtgccactttgtgggaatggaagaggctgaaacagaggcccagagcccagccagccactgcttggaaagggggttgcctcctgcctgtgctggcgtggctgaacagagccaggctagctttttcctacactcctaataaaactcgctttataacaatggtgagagcgtttccagttttcccacgttttcctgcatgaggcttgggcagaccctcccttctctgagaatctgggggatggagtgagtcggaataaacttagaggcaggtttggtcccaggaaatcttagccgttgtcgctcttgggttcagccttcctgtaatttgtctccagtgtaaacctggttcctttttcaatgtgatggtaatgataccagcctcacattcaggccgtgccccatggtctgaatttcctgatcacatggcatggtggttcacaga

SEQ ID NO: 111993 - DNA, 276 bp, Homo sapiens
cactataaaacggtttacatttattatctcatttaatcttacaacaatcaaaagtggaaggtagtgttattttcttcattttacaatgaaggaatggagaacgaaataggttaagatacttgcccaaggtcatacagctactcattcataaaggaaaacaattcacatttgtttgtcaaggttaacccattgcaggagtgactcatctcattcctaattataagccactcttttatatgacctattttatactccttcctctcctcttccattaca

SEQ ID NO: 111994 - DNA, 643 bp, Homo sapiens
cctggctctgtacttagttatgtttagaaagagcaagggtgctactggtagacacttgaaattcgaagtgttttttgtgaataaaatgtgtttatggtaacttagggaaaagtcgtagtaggacagcaaacgtggttctacatgtacatgaagttaggcaagctgactcccctcctagaaagcctacctttcaggcacatatttgtgccaaaatcccagtgaagcacaaacaacagtaatttatattagtatgtggcacagttcacatttccaatagaacttcatcttccctgaaacaatactcagtacagtctcaaatcacaaatagcctcacttaaagctctacccctgaaagaactactgaaagattcaggaaggtcaggagatccagattccaattaacttagcacctgatgcctgtgtaactctggatgggtctcagttctctagtagttgaggactggtatctcaaaggttaatgaaatttgcctaaggtgaaggtagattaagccttccattctcacacaaattgcccatcttccaatcccctttgtaccttgacattttcaacacaaaggggttggggtgctcagaggattacacaagcaagcacatatttgtcacagcacctgattatagacct

SEQ ID NO: 111995 - DNA, 460 bp, Homo sapiens
ctttgtgtccttcaatctaactccaagttgacactcagtattaaccatcacacatatgttgtagttttgcaaaatgtgacagcaagggaaaatatagctatttaaagaaacacagtaatgctatcatttagaaaataaactgattggagtccctggatcatagcttggcttcaactctctcaagtttacaagagcgttgtctgggaaaattaatcaacaaggttagaaatgagttctgggaaacttggctcactatagtccaggaaccaggccgaactacagcatgggccaggtactgaataaatggcaggaatatagttagggcagtaggtggctctaaattttctctttttgtttccctggtgtatgtcacagcagttttctgtggggtgaagtgagtatcctcaaccaaggagctgggcatggagaaaatgagaggaacctcattaatacatggcaa

SEQ ID NO: 111996 - DNA, 110 bp, Homo sapiens
tttgctaattcaatgtgggagagagctacgcaaggttgtagataacttgattcactgagggaattgctacaacaatctaccacaacctctgaagcacatttaccaatgtt

SEQ ID NO: 111997 - DNA, 414 bp, Homo sapiens
ctggaggccattttagtgccacacaaaaagtacctaatattagaggcccagatgcctcacaaaagctaaagctagtctgttgacctagattttcatgtcactatgttccctatgagctaccatagactcttttcccttcctcagtcctatatctagtaagataaatgacactgtatctgttgttaaaattatctcactaatatttcacaagcataatgtggaaataatacaacttatctagccaattatgctctttataaggagtcttcaatggattctaaaacctgagtaaaatgctgctggggaataagatattcacaagacaagtaaataaaatgcaggatccttgattggaccccggattttttttttaattgctatcctgaaatgacagaattgagacactggggaaat

SEQ ID NO: 111998 - DNA, 316 bp, Homo sapiens
aaagcaacaatagcagccgttggtcattcataccttaatgtggtttactgagtcttcctaaaacccaaatgaacaatgaaccttaaggctatccctttggacttgaagaaaggacttctattggaggatgagggtgagcagaaagaaaagcagtttcacagttggttgttctcctggggaaggtagttcagaccattcgagggtgtagttagaaccatgagtgcactattttggatgaacaccaggagctaagagagtaacatagaggtgtggacagaggattaagtcctcaagacaatagccccagccccatggg

SEQ ID NO: 111999 - DNA, 760 bp, Homo sapiens
caatttgtcacctcgtggccctcaccatctggacaacagcagccctggcccaggttctgaggcccgtggtatcaatggaggcccttcccgcatgtccccaaaggcacagcggcctctgagaggtgccaagactctgtcttcgcccagtaataggccttctggagaaacttctgttccacctcctcctgcagtgggccggatgtatcccccgcgttctcccaagtctgctgcccctgccccaatctcagcttcctgtccagagcctcccatcggctcggcagtgccaacctcttcagcctccatccctgtgacctcatcagtctcagatcctggagtgggctccatttctccagcttctccaaagatctccctggcccccacagatgtaaaagaactctctaccacggaacctgggagaaccctggatccccagtagctggctcagatagctgagaaagtccctggtcttcagaatgaacagaaactattccatctggaagaactgagaaagtgtggggcccagtttaatcttcagcccagtagttcccctgagaacagcctggatccttttcctccctggaccttaaaggaggaggccaaaggaaaggagaaggaggatgatggtctgttgacttcagagcccatggggtcccccgtctcctccaagacagagtctgtatcggataaggaggacaaaccacccctggcaccagcaggaggcactgaggggccagagccgcccccaccaccttgcccaagc

SEQ ID NO: 112000 - DNA, 471 bp, Homo sapiens
ccataatgtgtgccaggaagccaaggtttgttgtatagtagaaggggttggggtatgagagatcagccagacacgattggcaggcagagcacgcgtgtttttatgaagaattatgccgaggtggcgcacattatggagggactctgtgtaatagaaagggttgggatgaatcagggagaactgtgtgggaacagtttctagacctgttttcaaggaacagaaagaggagtggggaaaggatttaggatctatggggtcagctaggtttccctttgtgagtttatataatggttttgttaggatggcaaaaccaggtatccaaaggcgaaagtatctaaccatgcccaggaaggaaaggagttgttgttttgtagaaggggttggggtttgagagatcagccagacacgattggcagggagagcacgcgtgtttttatgaagaattatgccgaggtaggtaacagatggaga

SEQ ID NO: 112001 - DNA, 224 bp, Homo sapiens
tataatatataactttttatttttcattttaaaaaaacaaataataaaatcacaaccccctccccacaataataataaaacagctggtgttgtgtattcccagtaccaggaaaaaaaagaaagaaagaaaaaaatgtaaaagccacattgcgttggaggtgtttccagatgctggaggctgatgaccaaagatgacctcagcacaacggagccagttcccgatc

SEQ ID NO: 112002 - DNA, 348 bp, Homo sapiens
agtgggtacataaacatgcataggaaactataacattgcttaacttcatacgtgcccgttaatgggggcctaatctaatattatgctcctgcaacaaaaataaaaactaagaaggaagaatgagaagagcaacaaaccagtctgggggtgcaaccagtaaagagtctgcagacttcacagaggccaatgtttcaatactctgccatgtaactacctccaaagtccaatgtaacaaagctatgcaatgccttgtaattttctttctgaatggctgacaaattttaacaaaatatggcatagaatctatacacacatcctgttagtttccttgtaacaagaaccatgaga

SEQ ID NO: 112003 - DNA, 711 bp, Homo sapiens
tcaatttggcctattagaccctttgaccttggccctcacctacatgtgcagctacctctctccccttgcttgaaagaaggcctggactaaggaccacgcctcacctcccatctaagggttgttaagcactgtcaactccaggagtttgctcaagttgtcccttctatgtaatgccctctatcccgctgcccctgatgtaaactagctttcatgcaaggcctttgaggaccccctaccaggcccaccccaggcagagtgactggctcagctttgctcatgtgggcagtagtcctctccttcactgaactatcattatgcctgaactgcctcccacctggaatatgagttccttggaaactgggctagatcctgtgcacaattgcccccatgcccagtgcctggtgtggcatgcagcaggagctcaataaagaggttgtaggccaggtgccatggctcatgcctgtaatcccagcactttaggaggtcgaggcagtcagatcacctgaggtcaggagttcaagaccagcctggccaacatggtgaaactgtgtttctactaaaaatacaaaaaattagctgggcatggtggtgtgcacctgtaaacccagctacttgggaggctgaggcaggagaattgcttgaacccaggaggcagaggttgcaatgagccaatatcgtgcctttgcactctagctttggcaacaagagtga

SEQ ID NO: 112004 - DNA, 628 bp, Homo sapiens
agtgcctgtgccacctgcaagttcaggggtcctcaggcctatccttgcttccccagcacttcaactagggccgaggccagctcctagggcccaggactagctctgccactcttgaggacaggttaaaaacaccaaaggtcacactggagaggaaggccccatgcagcttttctgtcaccttggtgatgagccaccaggcagaacccattaagtgctaatattgctgtttatgggtataaactgcttagaagctacattttacagagtgtctaataggcaatgaggagcagctgcaggcatggacattagtttggattgctgagttcattagtttctggacccttcccatggcttccaaatgccaagctcctgcatagagcacgtctcagcagtttctacagagcatggctcctgggagcaagaggacactgtccctggctgccagagcaagcagcttgatgccagaggcagagagacaagagatgcaactgtggggagcctgccagcagaaactaaccagactgctcgtccccgtggaccagcctctgcaggccagaaggaaagatcagtcaaccaagcagtgaggaacccagcctttggggtacaggatgcggactcagtctccagg

SEQ ID NO: 112005 - DNA, 468 bp, Homo sapiens
atgaaggactgcagtgtcaggtggagggagaaaggccaggtattaggtggcaacagatgaagactcatagtggaaggtggccctgttgggtgacaaaggatcaaagttagtggtggaagatcgacgatggtagagaacgcagtgaggggatgatagaggatggggaatgttggccaagatgatgccaaaggatggtgaaggctgctgaatgaacagcaatcaccgggcattgtgctgtgagcagtgcaagatggtgcccttggaggggtggaatctggaattggagagaagaacattcgcataacaggatggagaatgtcagtggaatgtggtagtttgggtcagtgaagggtgatgctttatcagtgatggatggaggaagacagaattggagaagggcaaatgtttggccagcagggggtggagaaaatcaatgggaaatactaggactaagaaaggacagtaaac

SEQ ID NO: 112006 - DNA, 859 bp, Homo sapiens
atgttttgtatagacagggtctcgctatattgcccaggctggtctcaaactcctggcctcaaaagatcctcccacctcggcctcccaaagtgctgggattaaaggcatgagccagccaccatgcctggtctattttttattgataaatgaaatagaccatgcctgttctatttttaattgataaatatcctgggagaaatactttgggacaatgcaaatatcctgtttctcctccaacttttacccactgatttcagcatatatcagtggatcttgcctgcaaccattattaccatggcatttgcctactagtgattttgtgtttccttcatttgttctccatttattaattggaattcttctgtaaggaggagttgtcccttctccccaacttatccatttattcaattttttttgtaaactatggactcatgggcatctattttattctatgagctataattcaatactgtcatcatttagtttcttgctcaagttattctaacttcagccattgggagctccttcagactggctactatgctgtcttgtcatgcccccaccctttctctagcactttcttacattcttacaccaaaagacattacagcctcatcttgtattttccctgcttctgtccagaattagccattattccaaagatcccgagttcctttattggagaatgatattagacacaaagatgtgggtactaagtatactcgttgctgttggggtgttaattgcttctagggcttcccaagacagagctaggaaatgaaagcatacataataacccatgcatacacacagatcaatatctattcctgtatctatctgtatacatactcatgtgtcc

SEQ ID NO: 112007 - DNA, 806 bp, Homo sapiens
tactgttgagcaaatgaaattagaactcatttagaatcctgtaaacacctcagaactatgtagtgacatttcttccttgcattcctgttcagctctgtggaatagggagccagtgccaatccaggtggccttttctgtactgagatataaacagcaactctacaaatacttgttttggaaagagtaagccaacttacccctgatggaaagcttgtgagagcaatgtggctaacacagcattgtgttcacctggacctgtattgtagccttgctgttttgtggggaggatcctgtagccgtgcttctcaaacctgagcttacatagggattccctggggaaatctggtaaaatgaggattctgatcctgagattctgcattcttaacaaactccccaggaattatgccactgagggttcatgggcttatccatggctgtgatggttttatcttcattgtccagaccctaataaaaagatgacttcacatctttggcattttgaatgtttgctgaagaggctcatttgataagaaggtggtgatcatacactgagaggtatcatcaggtgcctgtccctccccattcttagcaggacttccagctttgaggtacagcttgattttaaatggaaatgtactagaagaattttttctttttttatggctgaaagaaagttctcggtgaatgctaggaggcccatgagatccatcacttaaaaagaaatgtgaagtcccaaactgtatgtgtaatgtctgactgtcagacaaatcagtcatgtatgcacggaaaggctgccgccctgggaa

SEQ ID NO: 112008 - DNA, 1971 bp, Homo sapiens
cggcacgagcaggtattctgaaggtgaaagataccagagattctcaaagatgcgagttttctgtgtgggactactccttttcagtgtgacctgggcagcaccaacatttcaaccacagactgagaaaactaagcaaagctgtgtggaagagcagaggcaggaagaaaaaaacaaagacaatattggttttcaccatttgggcaagagaataaatcaagagctatcatctaaagaaaatattgtccaggaaagaaagaaagatttgtccctttctgaagccagtgagaataagggaagtagtaaatctcaaaattatttcacaaatagacagagactgaataaagaatatagtatcagtaacaaagagaatactcacaatggcctgaggatgtcaatttatcctaagtcaactgggaataaagggtttgaggatggagatgatgctatcagcaaactacatgaccaagaagaatatggcgcagctctcatcagaaataacatgcaacatataatggggccagtgactgcgattaaactcctgggggaagaaaacaaagagaacacacctaggaatgttctaaacataatcccagcaagtatgaattatgctaaagcacactcgaaggataaaaagaagcctcaaagagattcccaagcccagaaaagtccagtaaaaagcaaaagcacccatcgtattcaacacaacattgactacctaaaacatctctcaaaagtcaaaaaaatccccagtgattttgaaggcagcggttatacagatcttcaagagagaggggacaatgatatatctcctttcagtggggacggccaaccttttaaggacattcctggtaaaggagaagctactggtcctgacctagaaggcaaagatattcaaacagggtttgcaggcccaagtgaagctgagagtactcatcttgacacaaaaaagccaggttataatgagatcccagagagagaagaaaatggtggaaataccattggaactagggatgaaactgcgaaagaggcagatgctgttgatgtcagccttgtagagggcagcaacgatatcatgggtagtaccaattttaaggagctccctggaagagaaggaaacagagtggatgctggcagccaaaatgctcaccaagggaaggttgagtttcattaccctcctgcaccctcaaaagagaaaagaaaagaaggcagtagtgatgcagctgaaagtaccaactataatgaaattcctaaaaatggcaaaggcagtaccagaaagggtgtagatcattctaataggaaccaagcaaccttaaatgaaaaacaaaggtttcctagtaagggcaaaagtcagggcctgcccattccttctcgtggtcttgataatgaaatcaaaaacgaaatggattcctttaatggccccagtcatgagaatataataacacatggcagaaaatatcattatgtaccccacagacaaaataattctacacggaataagggtatgccacaagggaaaggctcctggggtagacaaccccattccaacaggaggtttagttcccgtagaagggatgacagtagtgagtcatctgacagtggcagttcaagtgagagcgatggtgactagtccaccaggagttcccagcggggtgacagtctgaagacctcgtcacctgtgagttgatgtagaggagagccacctgacagctgaccaggtgaagagaggatagagtgaagaactgagtgagccaagaatcctggtctccttgggggaatttttgctatcttaatagtcacagtataaaattctattaaaggctataatgtttttaagcaaaaaaaaatcattacagatctatgaaataggtaacatttgagtaggtgtcatttaaaaatagttggtgaatgtcacaaatgccttctatgttgtttgctctgtagacatgaaaataaacaatatctctcgatgat

SEQ ID NO: 112009 - DNA, 737 bp, Homo sapiens
catgatggctcatgcctgtaatcccagcactttgggaggccaaggtgggtggatcacttgaggtcaggaattggagaccagcctgggcaacatggtgaaatcccatctctactaaaaatacaaaaaacttagctgggtgtgccagtgcatgcctgtagtcccagctactcggtaggctgaggcatgaaaattgcttgaacccgggaggcagaggctgcagtgagccaagatcacgtcaccgcactccagcctgggcaacagagcaagaccgtctcggaaaaataaataaataaagtacagtataaggcatatagttatttgttaatacctataatttcagttttaaattaaacagtaattaacgattttgacttttcactaattcaagagattctgttcatacctgctttacttacaagtttactactcactgaagtgttgaaaacctcctaacatgtgtccttatcaaacagaattacgagaaatcttttccaaagccaatggaaaccaaaaaagtgcagaagtggctatactaatataagacaaaatagatttcaagacaaaaactataggaaaagccaaagagggtcactatataatgataaagcagtcaattcagcaagaggatgtaaccattttaaacataaatgcacccaacactggagcactcacatatataaagcaagtattattagagcaaaagggagagacaggccccaatatgataaaacttggag

SEQ ID NO: 112010 - DNA, 1580 bp, Homo sapiens
cgcgctcgccggagagctgggtgctaccgctgtttccgctgctgagccctgcccgccggccggcccgctcgctagctcgcttcccctcgcccagggggaaaggtcagcagcgtcctggagccgccgtgtcactccccgaaagccatgaactgcagcgagagccagcggctgcgaacccttctgagccgcctgttgctcgagctgcaccaccggggtaatgccagcggcttgggcgctggccctcgtcccagcatgggcatgggggtcgtgcctgaccctttcgtgggccgcgaggtgaccagcgccaagggcgacgacgcctatctctacatcctgctcatcatgatcttctacgcctgcttggccggaggcctcatcctggcctacacccgctcccgtaagctcgtcgaggccaaggacgagccgtcccaggcttgcgccgagcacgaatgggccccgggaggcgccctgaccgccgacgccgaggctgccgcgggctcccaggccgagggccgccgccagcttgcctccgaggggctgcctgccctcgcccagggcgctgagcgggtctaaaaccacagccccagattgctggttcgcgccctcctcatctcgctcatccctgggcgcgcctcccaccttccacccccaactcccttccagggttcgcctcatctgaggcccagataatggtgagaggccaggagaccttgtctggaaggccctggaaggagaagcaccaccttacccattcgggccagtttctccctcttcacccctgcgcctccacccctaccccgcacatccaactgcactaaactgcctctgctctcttgtcttcagacagccctgacagcacgctccagccctctgggaactgaatccaacacgtccaacacttggcactgaactgaagcaatgcattctatcagaactctgggccgtctaactggcagctgctccaggggctgccagggactgctcactctgcagagccaacgggcttgccaggccgactgcagcagctccagcttccagttgccttagggacagagacaaaggaaatgaagagacctcagacatcttttccctccctctctctttcagcagggagctagcaggacactaggaccagtctgtgggatagaatgaacttaatgggggacggaagggggaggagtgctcaacggggagggaaatgatctatgactccaactgtatgattttcttgcctccccagttttcatcccagtggtaacgcctgatttttggtagctatgccatcttctgctgaggattaccattactgggtgtatcaccccagtacttccaaatgcctctcctctattgattcagttgttattgcagtgtctgcttcatccgtggaacttgaggctcagatgccccctgctctgtaaccctggggaatgtcagaggcaggtaataaaggttgtttaaacaataacgcaagactcttctctcagagattccagccttaagacccagtaccatatggagaaggaatcctttttcttttgcttttggaaatgatgtttggatttgggggttgggtggttgtg

SEQ ID NO: 112011 - DNA, 1118 bp, Homo sapiens
tggtgcctcatgaagccttctttctttctctcctttagagcccactgtggctttgccagccttctggactccgacagtgcttaccatctgtgtctgtcctttggcaactagccaaactcaactcagttcaattcaaccaacttccatagagctgcactgttggcaggaagcactcacagtctcaaggaatggggaaagcatttcctatccatggcgcctcaattgtacttttaaaacaaacttggcatggaagagaacctttcccgagactctttgaaagtctaaatacatgattgtaaattacttccctttgtcaacacccttgattaccattttggaaatgagttccaggtgatggataaacagatgattatttgacagacagccctgacagcacgctccagccctctgggaactgaatccaacacgtccaacacttggcactgaactgaagcaatgcattctatcagaactctgggccgtctaactggcagctgctccaggggctgccagggactgctcactctgcagagccaacgggcttgccaggccgactgcagcagctccagcttccagttgccttagggacagagacaaaggaaatgaagagacctcagacatcttttccctccctctctctttcagcagggagctagcaggacactaggaccagtctgtgggatagaatgaacttaatgggggacggaagggggaggagtgctcaacggggagggaaatgatctatgactccaactgtatgattttcttgcctccccagttttcatcccagtggtaacgcctgatttttggtagctatgccatcttctgctgaggattaccattactgggtgtatcaccccagtacttccaaatgcctctcctctattgattcagttgttattgcagtgtctgcttcatccgtggaacttgaggctcagatgccccctgctctgtaaccctggggaatgtcagaggcaggtaataaaggttgtttaaacaataacgcaagactcttctctcagagattccagccttaagacccagtaccatatggagaaggaatcctttttcttttgcttttggaaatgatgtttggatttgggggttgggtggttgtg

SEQ ID NO: 112012 - DNA, 759 bp, Homo sapiens
tggtgcctcatgaagccttctttctttctctcctttagagcccactgtggctttgccagccttctggactccgacagtgcttaccatctgtgtctgtcctttggcaactagccaaactcaactcagttcaattcaaccaacttccatagagctgcactgttggcaggaagcactcacagtctcaaggaatggggaaagcatttcctatccatggcgcctcaattgtacttttaaaacaaacttggcatggaagagaacctttcccgagactctttgaaagtctaaatacatgattgtaaattacttccctttgtcaacacccttgattaccattttggaaatgagttccaggtgatggataaacagatgattatttgacaggtatggggctcgtggaaaatgggggtggaggggtggtgaggaatgagaaccagtgcccatctggtggatttgcagtttcattaagtgtggtagggaaaggggttagcatctcagccattccaggctggcctggaactgagatttaaaggatgcccatcagcccctagtgtgaaaagaaagccaggatcccctccaccccacacctgttgttttttttggagtgctgggcctttttaaattttatgactattctccgtttctatttccacccgcttttacacatctatccctccccatgccattcttctataaattagtaggttgacttctctctggtagtgatttctttcaataaaactagaagtagcaaaaaaatta

SEQ ID NO: 112013 - DNA, 353 bp, Homo sapiens
acataaaacctcttactcctaagttgctcacatgtctcgatagataagaattgtggcctgtaatcccagcacattgggaagccgaggcaagcggattacgaggtcaggagttcaagaccagcctgaccaacatggtgtgaaaccccgtctctactaaaaatagaaaaattagccgggcgtggtggcgcacgcctgtaatcccagctactcaggaggctgaggcaggagaatcacttgaacccaggaggcagaggttgcagtgagccgaaatcgtgccactgcattccagcctgagcagcagagtgagactccacctcaaaaaaaaaaaaaacaaaaaaaaaaaaacagatttg

SEQ ID NO: 112014 - DNA, 572 bp, Homo sapiens
atgggacagaaccatcccctcacccagtggttctatgtgagttgccagcatcaaattagaaaataatcacagattagcactgtaggccaaggacacccgacagactggttgttgtgacaaggttatatttgacattattctaacatgataatgtaggcaatgtgtttaagagaattagaaatactcagctacaacggtacccaaatctgccaggacttggcacatcacagtcaatattttgaatgagtgaatgagtgcctaagtggatgaatgaatgatagaatatacatgacctatacaatacctgcaataaaacacagccaccttcaaaaccacactcaaggaacaatattcacaaagccagactgaacaagcaacattggataaggagttaaggcatcttgtttctcaaaaatttcaatgatacaaaggcactagctgggaggcggcagtgtgagagaagtaactcaaagcaaggcttcacagctttccaaggacagggaccggctctggagttggcgtgcgtgagatgtcaggcacgctcacacgcagggtcctgtgtgtggtcctga

SEQ ID NO: 112015 - DNA, 2027 bp, Homo sapiens
acctaggttacaagatcctaacaaaacaccaagattttatcctgttgttaaagaaccaaaagccattgatgtaaagagtccaagaaagagaaaaacaaggcatagcacaaatccccctctagagtgtcatgttggttgggtaatggattccagagaccgtgggccaggaacatcctctgtcagcacttcaaatgcttcaccttcagaaggcgcaccactagcaggaagttatggatgtactcctcattcattcccaaagttccagcatccttctcatgaacttttgaaggaaaatggctttacccaacaagtgtaccacaagtatcgtcgaagatgcctaagtgagagaaaacgcttgggaattggtcagtcccaagaaatgaataccctctttcgtttctggtcctttttcctcagagatcacttcaataaaaaaatgtatgaggaatttagacaacttgcttgggaagatgcaaaagaaaattacaggtatgggttagaatgtctgttcaggttttatagttatggactggaaaaaaaattcaggcgagaaatttttcaggatttccaagaagaaaccaaaaaagactacgaatctggtcagctgtatggactagaaaagttttgggcttatttgaaatattctcaatctaagacacagtctattgacccaaaacttcaggaatacctctgtagttttaagaggttagaagacttccgtgttgatccccctattagtgatgaatttggaagaaaaagacattcctctacttctggtgaggagagtaatcgtcatagacttccacctaattcctctacaaagccaccaaatgctgctaaacctacatctaccagtgagcttcaggtaccaataaactctcccagaaggaatatttcaccggagtccagtgacaattcacattaaacagtgctgcctgtgtcctgtggtctcaagaaatggtgaaatgcctgagaaatagactcttatgaaagttctttgtccttgaagtcaacatttacatcagtatttatttggggaaaatcttctggtgtttaattgtgataataagaaagaagaaaaagaaagaaaagtggtagcattttttctaacaagataaattctaaaaatgttttccctgatttcacaaacaaggatagtcttggtgaccttttatagagatcttctagtaatgtattttgatctcagatttctttttcaaagccatggttttacaaaaacagcattccttaaatatatttaaaaaacaatacaaggaatgcctaacatttcagctcatacttcttaaagaagatatagtatgttgtattctcttcttagagctttcttaaagaatccacaatccaattaccccactgtcaattcatatttgaacttaccaaaacaaaggaggattacgtatatgttttttaaattcaaaaaagaatatgaaattatacctttagtatccctttgagacatatagtttaaagaaaactttttttaaaacaaaagtaggaatatatagtaagattgtagttacaatgagtatatgcacttttgatgctaggttttgcttttctccccccagtcatatctcatgatttccacagttgttgtattggtgtggagttttctgaattggctataagctgattacatattagaggtttatttttatgattctatataaacgtgcacgagtaatttaaaacctgcattgggattgattggaatattgtcctaaattaattaaatcttgcactgttttgaatgcatctgctatttatacatctgcaagtgggtatgtcataaggagtcagattatctttaatttaaaatgaatacttagttttacctttttgtttattttttgtttaattttgtttttataaatgttttcaagagttatagcaaattgatttctaatttttattgctattacaactgatgtaaatggtagtttcagtttttgtgagatttaaaaaaataaagcacatgaggtcagccgttacttagggtagctttc

SEQ ID NO: 112016 - DNA, 2047 bp, Homo sapiens
acctaggttacaagatcctaacaaaacaccaagattttatcctgttgttaaagaaccaaaagccattgatgtaaagagtccaagaaagagaaaaacaaggcatagcacaaatccccctctagagtgtcatgttggttgggtaatggattccagagaccgtgggccaggaacatcctctgtcagcacttcaaatgcttcaccttcagaaggcgcaccactagcaggaagttatggatgtactcctcattcattcccaaagttccagcatccttctcatgaacttttgaaggaaaatggctttacccaacaagtgtaccacaagtatcgtcgaagatgcctaagtgagagaaaacgcttgggaattggtcagtcccaagaaatgaataccctctttcgtttctggtcctttttcctcagagatcacttcaataaaaaaatgtatgaggaatttagacaacttgcttgggaagatgcaaaagaaaattacaggtatgggttagaatgtctgttcaggttttatagttatggactggaaaaaaaattcaggcgagaaatttttcaggatttccaagaagaaaccaaaaaagactacgaatctggtcagctgtatggactagaaaagttttgggcttatttgaaatattctcaatctaagacacagtctattgacccaaaacttcaggaatacctctgtagttttaagaggttagaagacttccgtgttgatccccctattagtgatgaatttggaagaaaaagacattcctctacttctggtgaggagagtaatcgtcatagacttccacctaattcctctacaaagccaccaaatgctgctaaacctacatctaccagtgagcttcaggtaccaataaactctcccagaaggaatatttcaccggagtccagtgacaattcacattaaacagtgctgcctgtgtcctgtggtctcaagaaatggtgaaatgcctgagaaatagactcttatgaaagttctttgtccttgaagtcaacatttacatcagtatttatttggggaaaatcttctggtgtttaattgtgataataagaaagaagaaaaagaaagaaaagtggtagcattttttctaacaagataaattctaaaaatgttttccctgatttcacaaacaaggatagtcttggtgaccttttatagagatcttctagtaatgtattttgatctcagatttctttttcaaagccatggttttacaaaaacagcattccttaaatatatttaaaaaacaatacaaggaatgcctaacatttcagctcatacttcttaaagaagatatagtatgttgtattctcttcttagagctttcttaaagaatccacaatccaattaccccactgtcaattcatatttgaacttaccaaaacaaaggaggattacgtatatgttttttaaattcaaaaaagaatatgaaattatacctttagtatccctttgagacatatagtttaaagaaaactttttttaaaacaaaagtaggaatatatagtaagattgtagttacaatgagtatatgcacttttgatgctaggttttgcttttctccccccagtcatatctcatgatttccacagttgttgtattggtgtggagttttctgaattggctataagctgattacatattagaggtttatttttatgattctatataaacgtgcacgagtaatttaaaacctgcattgggattgattggaatattgtcctaaattaattaaatcttgcactgttttgaatgcatctgctatttatacatctgcaagtgggtatgtcataaggagtcagattatctttaatttaaaatgaatacttagttttacctttttgtttattttttgtttaattttgtttttataaatgttttcaagagttatagcaaattgatttctaatttttattgctattacaactgatgtaaatggtagtttcagtttttgtgagatttaaaaaaataaagcacatcgatgtcggccgaaaatttcctacttatcctttttgttgactactatat

SEQ ID NO: 112017 - DNA, 2908 bp, Homo sapiens
agcgggttatctacagtatgaaaatgtttgagtcatttatagtcagagggttttaatttacttgtgaagttcacactattgaaactaattgcaatgcttgactttattttctttagagtccaagaaagagaaaaacaaggcatagcacaaatccccctctagagtgtcatgttggttgggtaatggattccagagaccgtgggccaggaacatcctctgtcagcacttcaaatgcttcaccttcagaaggcgcaccactagcaggaagttatggatgtactcctcattcattcccaaagttccagcatccttctcatgaacttttgaaggaaaatggctttacccaacaagtgtaccacaagtatcgtcgaagatgcctaagtgagagaaaacgcttgggaattggtcagtcccaagaaatgaataccctctttcgtttctggtcctttttcctcagagatcacttcaataaaaaaatgtatgaggaatttagacaacttgcttgggaagatgcaaaagaaaattacaggtatgggttagaatgtctgttcaggttttatagttatggactggaaaaaaaattcaggcgagaaatttttcaggatttccaagaagaaaccaaaaaagactacgaatctggtcagctgtatggactagaaaagttttgggcttatttgaaatattctcaatctaagacacagtctattgacccaaaacttcaggaatacctctgtagttttaagaggttagaagacttccgtgttgatccccctattagtgatgaatttggaagaaaaagacattcctctacttctggtgaggagagtaatcgtcatagacttccacctaattcctctacaaagccaccaaatgctgctaaacctacatctaccagtgagcttcaggtaccaataaactctcccagaaggaatatttcaccggagtccagtgacaattcacattaaacagtgctgcctgtgtcctgtggtctcaagaaatggtgaaatgcctgagaaatagactcttatgaaagttctttgtccttgaagtcaacatttacatcagtatttatttggggaaaatcttctggtgtttaattgtgataataagaaagaagaaaaagaaagaaaagtggtagcattttttctaacaagataaattctaaaaatgttttccctgatttcacaaacaaggatagtcttggtgaccttttatagagatcttctagtaatgtattttgatctcagatttctttttcaaagccatggttttacaaaaacagcattccttaaatatatttaaaaaacaatacaaggaatgcctaacatttcagctcatacttcttaaagaagatatagtatgttgtattctcttcttagagctttcttaaagaatccacaatccaattaccccactgtcaattcatatttgaacttaccaaaacaaaggaggattacgtatatgttttttaaattcaaaaaagaatatgaaattatacctttagtatccctttgagacatatagtttaaagaaaactttttttaaaacaaaagtaggaatatatagtaagattgtagttacaatgagtatatgcacttttgatgctaggttttgcttttctccccccagtcatatctcatgatttccacagttgttgtattggtgtggagttttctgaattggctataagctgattacatattagaggtttatttttatgattctatataaacgtgcacgagtaatttaaaacctgcattgggattgattggaatattgtcctaaattaattaaatcttgcactgttttgaatgcatctgctatttatacatctgcaagtgggtatgtcataaggagtcagattatctttaatttaaaatgaatacttagttttacctttttgtttattttttgtttaattttgtttttataaatgttttcaagagttatagcaaattgatttctaatttttattgctattacaactgatgtaaatggtagtttcagtttttgtgagatttaaaaaaataaagcacagcacgatgcgtgaattttttgaattgatttttaattatttttatttagaatatagttgaaaagctgtaatattcagttttgctagtaaaagaccatttttttgtgtgaatgaagtttcaattataaacttacattcactttattgagcactacataatttacagatattttgttgtattggcaaaagcaagtggtttccatatgctaaattaattgtattttctttttgagcagattggatatcttgttcttataaattataatattgaaatacatataatctttggatggatgggctgttaatttgtaaataggttttcattaagttatttctcatgataagtaataatcagcagttttataatatttactatttggagggtcattttgatgctttaaattgcagaaatagtcaaatttgaatattcagaaaataaatttatttagatatattgtaaagagggtgcaaaacaagcaatgggttagaataatagatcttcaagtcttttcttaaatggggtatgtagttccagcttttcagtgagaaatttccaaaccgtgcttattagctttaaatggtctcttgaaatgatcataaatttttctcagtgtcctttttgtgttgaacacatatatctgaaacctgtatttaaccagatatttctactcaactgaatatacaagtgtaaatttgattggaaaattgtatattataaatgaaaatacaataatcaggagttttgtggtttgtattaattagtagttttatcatatttttattataaaagtaatacatgtacattgggaaatttagaaaagcacaaagaagaaaataaagtacttgttataaaaagaagaaaaaccaaaaaag

SEQ ID NO: 112018 - DNA, 2451 bp, Homo sapiens
  misc_feature (32)..(32): n is a, c, g, or t
  misc_feature (72)..(72): n is a, c, g, or t
gagtagttattgtaattttcttaacagaatgnagaagttagcgcacggctctcttattctccaccgctacangtatgggttagaatgtctgttcaggttttatagttatggactggaaaaaaaattcaggcgagaaatttttcaggatttccaagaagaaaccaaaaaagactacgaatctggtcagctgtatggactagaaaagttttgggcttatttgaaatattctcaatctaagacacagtctattgacccaaaacttcaggaatacctctgtagttttaagaggttagaagacttccgtgttgatccccctattagtgatgaatttggaagaaaaagacattcctctacttctggtgaggagagtaatcgtcatagacttccacctaattcctctacaaagccaccaaatgctgctaaacctacatctaccagtgagcttcaggtaccaataaactctcccagaaggaatatttcaccggagtccagtgacaattcacattaaacagtgctgcctgtgtcctgtggtctcaagaaatggtgaaatgcctgagaaatagactcttatgaaagttctttgtccttgaagtcaacatttacatcagtatttatttggggaaaatcttctggtgtttaattgtgataataagaaagaagaaaaagaaagaaaagtggtagcattttttctaacaagataaattctaaaaatgttttccctgatttcacaaacaaggatagtcttggtgaccttttatagagatcttctagtaatgtattttgatctcagatttctttttcaaagccatggttttacaaaaacagcattccttaaatatatttaaaaaacaatacaaggaatgcctaacatttcagctcatacttcttaaagaagatatagtatgttgtattctcttcttagagctttcttaaagaatccacaatccaattaccccactgtcaattcatatttgaacttaccaaaacaaaggaggattacgtatatgttttttaaattcaaaaaagaatatgaaattatacctttagtatccctttgagacatatagtttaaagaaaactttttttaaaacaaaagtaggaatatatagtaagattgtagttacaatgagtatatgcacttttgatgctaggttttgcttttctccccccagtcatatctcatgatttccacagttgttgtattggtgtggagttttctgaattggctataagctgattacatattagaggtttatttttatgattctatataaacgtgcacgagtaatttaaaacctgcattgggattgattggaatattgtcctaaattaattaaatcttgcactgttttgaatgcatctgctatttatacatctgcaagtgggtatgtcataaggagtcagattatctttaatttaaaatgaatacttagttttacctttttgtttattttttgtttaattttgtttttataaatgttttcaagagttatagcaaattgatttctaatttttattgctattacaactgatgtaaatggtagtttcagtttttgtgagatttaaaaaaataaagcacagcacgatgcgtgaattttttgaattgatttttaattatttttatttagaatatagttgaaaagctgtaatattcagttttgctagtaaaagaccatttttttgtgtgaatgaagtttcaattataaacttacattcactttattgagcactacataatttacagatattttgttgtattggcaaaagcaagtggtttccatatgctaaattaattgtattttctttttgagcagattggatatcttgttcttataaattataatattgaaatacatataatctttggatggatgggctgttaatttgtaaataggttttcattaagttatttctcatgataagtaataatcagcagttttataatatttactatttggagggtcattttgatgctttaaattgcagaaatagtcaaatttgaatattcagaaaataaatttatttagatatattgtaaagagggtgcaaaacaagcaatgggttagaataatagatcttcaagtcttttcttaaatggggtatgtagttccagcttttcagtgagaaatttccaaaccgtgcttattagctttaaatggtctcttgaaatgatcataaatttttctcagtgtcctttttgtgttgaacacatatatctgaaacctgtatttaaccagatatttctactcaactgaatatacaagtgtaaatttgattggaaaattgtatattataaatgaaaatacaataatcaggagttttgtggtttgtattaattagtagttttatcatatttttattataaaagtaatacatgtacattgggaaatttagaaaagcacaaagaagaaaataaagtacttgttataaaaagaagaaaaaccaaaaaag

SEQ ID NO: 112019 - DNA, 3069 bp, Homo sapiens
agcgggttatctacagtatgaaaatgtttgagtcatttatagtcagagggttttaatttacttgtgaagttcacactattgaaactaattgcaatgcttgactttattttctttagagtccaagaaagagaaaaacaaggcatagcacaaatccccctctagagtgtcatgttggttgggtaatggattccagagaccgtgggccaggaacatcctctgtcagcacttcaaatgcttcaccttcagaaggcgcaccactagcaggaagttatggatgtactcctcattcattcccaaagttccagcatccttctcatgaacttttgaaggaaaatggctttacccaacaagtgtaccacaagtatcgtcgaagatgcctaagtgagagaaaacgcttgggaattggtcagtcccaagaaatgaataccctctttcgtttctggtcctttttcctcagagatcacttcaataaaaaaatgtatgaggaatttagacaacttgcttgggaagatgcaaaagaaaattacaggtatgggttagaatgtctgttcaggttttatagttatggactggaaaaaaaattcaggcgagaaatttttcaggatttccaagaagaaaccaaaaaagactacgaatctggatggggcaccaggtagtaagaaggcctttcctgggaggtgttggaaagtaactactctcaagtctttcttttatggaggtatattttgtcattatccctttgacaaacgtggctactcactgatgttccgttacatgaaaattctatgcaacatcagcaggtcagctgtatggactagaaaagttttgggcttatttgaaatattctcaatctaagacacagtctattgacccaaaacttcaggaatacctctgtagttttaagaggttagaagacttccgtgttgatccccctattagtgatgaatttggaagaaaaagacattcctctacttctggtgaggagagtaatcgtcatagacttccacctaattcctctacaaagccaccaaatgctgctaaacctacatctaccagtgagcttcaggtaccaataaactctcccagaaggaatatttcaccggagtccagtgacaattcacattaaacagtgctgcctgtgtcctgtggtctcaagaaatggtgaaatgcctgagaaatagactcttatgaaagttctttgtccttgaagtcaacatttacatcagtatttatttggggaaaatcttctggtgtttaattgtgataataagaaagaagaaaaagaaagaaaagtggtagcattttttctaacaagataaattctaaaaatgttttccctgatttcacaaacaaggatagtcttggtgaccttttatagagatcttctagtaatgtattttgatctcagatttctttttcaaagccatggttttacaaaaacagcattccttaaatatatttaaaaaacaatacaaggaatgcctaacatttcagctcatacttcttaaagaagatatagtatgttgtattctcttcttagagctttcttaaagaatccacaatccaattaccccactgtcaattcatatttgaacttaccaaaacaaaggaggattacgtatatgttttttaaattcaaaaaagaatatgaaattatacctttagtatccctttgagacatatagtttaaagaaaactttttttaaaacaaaagtaggaatatatagtaagattgtagttacaatgagtatatgcacttttgatgctaggttttgcttttctccccccagtcatatctcatgatttccacagttgttgtattggtgtggagttttctgaattggctataagctgattacatattagaggtttatttttatgattctatataaacgtgcacgagtaatttaaaacctgcattgggattgattggaatattgtcctaaattaattaaatcttgcactgttttgaatgcatctgctatttatacatctgcaagtgggtatgtcataaggagtcagattatctttaatttaaaatgaatacttagttttacctttttgtttattttttgtttaattttgtttttataaatgttttcaagagttatagcaaattgatttctaatttttattgctattacaactgatgtaaatggtagtttcagtttttgtgagatttaaaaaaataaagcacagcacgatgcgtgaattttttgaattgatttttaattatttttatttagaatatagttgaaaagctgtaatattcagttttgctagtaaaagaccatttttttgtgtgaatgaagtttcaattataaacttacattcactttattgagcactacataatttacagatattttgttgtattggcaaaagcaagtggtttccatatgctaaattaattgtattttctttttgagcagattggatatcttgttcttataaattataatattgaaatacatataatctttggatggatgggctgttaatttgtaaataggttttcattaagttatttctcatgataagtaataatcagcagttttataatatttactatttggagggtcattttgatgctttaaattgcagaaatagtcaaatttgaatattcagaaaataaatttatttagatatattgtaaagagggtgcaaaacaagcaatgggttagaataatagatcttcaagtcttttcttaaatggggtatgtagttccagcttttcagtgagaaatttccaaaccgtgcttattagctttaaatggtctcttgaaatgatcataaatttttctcagtgtcctttttgtgttgaacacatatatctgaaacctgtatttaaccagatatttctactcaactgaatatacaagtgtaaatttgattggaaaattgtatattataaatgaaaatacaataatcaggagttttgtggtttgtattaattagtagttttatcatatttttattataaaagtaatacatgtacattgggaaatttagaaaagcacaaagaagaaaataaagtacttgttataaaaagaagaaaaaccaaaaaag

SEQ ID NO: 112020 - DNA, 2120 bp, Homo sapiens
ctcgtgccgaattcggcacgagcttctggtgaggagagtaatcgtcatagacttccacctaattcctctacaaagccaccaaatgctgctaaacctacatctaccagtgagcttcaggtaccaataaactctcccagaaggaatatttcaccggagtccagtgacaattcacattaaacagtgctgcctgtgtcctgtggtctcaagaaatggtgaaatgcctgagaaatagactcttatgaaagttctttgtccttgaagtcaacatttacatcagtatttatttggggaaaatcttctggtgtttaattgtgataataagaaagaagaaaaagaaagaaaagtggtagcattttttctaacaagataaattctaaaaatgttttccctgatttcacaaacaaggatagtcttggtgaccttttatagagatcttctagtaatgtattttgatctcagatttctttttcaaagccatggttttacaaaaacagcattccttaaatatatttaaaaaacaatacaaggaatgcctaacatttcagctcatacttcttaaagaagatatagtatgttgtattctcttcttagagctttcttaaagaatccacaatccaattaccccactgtcaattcatatttgaacttaccaaaacaaaggaggattacgtatatgttttttaaattcaaaaaagaatatgaaattatacctttagtatccctttgagacatatagtttaaagaaaactttttttaaaacaaaagtaggaatatatagtaagattgtagttacaatgagtatatgcacttttgatgctaggttttgcttttctccccccagtcatatctcatgatttccacagttgttgtattggtgtggagttttctgaattggctataagctgattacatattagaggtttatttttatgattctatataaacgtgcacgagtaatttaaaacctgcattgggattgattggaatattgtcctaaattaattaaatcttgcactgttttgaatgcatctgctatttatacatctgcaagtgggtatgtcataaggagtcagattatctttaatttaaaatgaatacttagttttacctttttgtttattttttgtttaattttgtttttataaatgttttcaagagttatagcaaattgatttctaatttttattgctattacaactgatgtaaatggtagtttcagtttttgtgagatttaaaaaaataaagcacagcacgatgcgtgaattttttgaattgatttttaattatttttatttagaatatagttgaaaagctgtaatattcagttttgctagtaaaagaccatttttttgtgtgaatgaagtttcaattataaacttacattcactttattgagcactacataatttacagatattttgttgtattggcaaaagcaagtggtttccatatgctaaattaattgtattttctttttgagcagattggatatcttgttcttataaattataatattgaaatacatataatctttggatggatgggctgttaatttgtaaataggttttcattaagttatttctcatgataagtaataatcagcagttttataatatttactatttggagggtcattttgatgctttaaattgcagaaatagtcaaatttgaatattcagaaaataaatttatttagatatattgtaaagagggtgcaaaacaagcaatgggttagaataatagatcttcaagtcttttcttaaatggggtatgtagttccagcttttcagtgagaaatttccaaaccgtgcttattagctttaaatggtctcttgaaatgatcataaatttttctcagtgtcctttttgtgttgaacacatatatctgaaacctgtatttaaccagatatttctactcaactgaatatacaagtgtaaatttgattggaaaattgtatattataaatgaaaatacaataatcaggagttttgtggtttgtattaattagtagttttatcatatttttattataaaagtaatacatgtacattgggaaatttagaaaagcacaaagaagaaaataaagtacttgttataaaaagaagaaaaaccaaaaaag

SEQ ID NO: 112021 - DNA, 2191 bp, Homo sapiens
tcataatgtatattattctttgttattaggtcagctgtatggactagaaaagttttgggcttatttgaaatattctcaatctaagacacagtctattgacccaaaacttcaggaatacaggttagaagacttccgtgttgatccccctattagtgatgaatttggaagaaaaagacattcctctacttctggtgaggagattccacctaattcctctacaaagccaccaaatgctgctaaacctacatctaccagtgagcttcaggtaccaataaactctcccagagtccagtgacaattcacattaaacagtgctgcctgtgtcctgtggtctcaagaaatggtgaaatgcctgagaaatagactcttatgaaatcaacatttacatcagtatttatttggggaaaatcttctggtgtttaattgtgataataagaaagaagaaaaagaaagaaaagtggtagcattttttaatgttttccctgatttcacaaacaaggatagtcttggtgaccttttatagagatcttctagtaatgtattttgatctcagatttctttttcaaagccatggtttatatttaaaaaacaatacaaggaatgcctaacatttcagctcatacttcttaaagaagatatagtatgttgtattctcttcttagagctttcttaaagaatccacaatccaattaccccactgtcaattcatatttgaacttaccaaaacaaaggaggattacgtatatgttttttaaattcaaaaaagaatatgaaattatacctttagtatccctttgagacatatagtttaaagaaaactttttttaaaacaaaagtaggaatatatagtaagattgtagttacaatgagtatatgcacttttgatgctaggttttgcttttctccccccagtcatatctcatgatttccacagttgttgtattggtgtggagttttctgaattggctataagctgattacatattagaggtttatttttatgattctatataaacgtgcacgagtaatttaaaacctgcattgggattgattggaatattgtcctaaattaattaaatcttgcactgttttgaatgcatctgctatttatacatctgcaagtgggtatgtcataaggagtcagattatctttaatttaaaatgaatacttagttttacctttttgtttattttttgtttaattttgtttttataaatgttttcaagagttatagcaaattgatttctaatttttattgctattacaactgatgtaaatggtagtttcagtttttgtgagatttaaaaaaataaagcacagcacgatgcgtgaattttttgaattgatttttaattatttttatttagaatatagttgaaaagctgtaatattcagttttgctagtaaaagaccatttttttgtgtgaatgaagtttcaattataaacttacattcactttattgagcactacataatttacagatattttgttgtattggcaaaagcaagtggtttccatatgctaaattaattgtattttctttttgagcagattggatatcttgttcttataaattataatattgaaatacatataatctttggatggatgggctgttaatttgtaaataggttttcattaagttatttctcatgataagtaataatcagcagttttataatatttactatttggagggtcattttgatgctttaaattgcagaaatagtcaaatttgaatattcagaaaataaatttatttagatatattgtaaagagggtgcaaaacaagcaatgggttagaataatagatcttcaagtcttttcttaaatggggtatgtagttccagcttttcagtgagaaatttccaaaccgtgcttattagctttaaatggtctcttgaaatgatcataaatttttctcagtgtcctttttgtgttgaacacatatatctgaaacctgtatttaaccagatatttctactcaactgaatatacaagtgtaaatttgattggaaaattgtatattataaatgaaaatacaataatcaggagttttgtggtttgtattaattagtagttttatcatatttttattataaaagtaatacatgtacattgggaaatttagaaaagcacaaagaagaaaataaagtacttgttataaaaagaagaaaaaccaaaaaag

SEQ ID NO: 112022 - DNA, 1438 bp, Homo sapiens
agcgggttatctacagtatgaaaatgtttgagtcatttatagtcagagggttttaatttacttgtgaagttcacactattgaaactaattgcaatgcttgactttattttctttagagtccaagaaagagaaaaacaaggcatagcacaaatccccctctagagtgtcatgttggttgggtaatggattccagagaccgtgggccaggaacatcctctgtcagcacttcaaatgcttcaccttcagaaggcgcaccactagcaggaagttatggatgtactcctcattcattcccaaagttccagcatccttctcatgaacttttgaaggaaaatggctttacccaacaagtgtaccacaagtatcgtcgaagatgcctaagtgagagaaaacgcttgggaattggtcagtcccaagaaatgaataccctctttcgtttctggtcctttttcctcagagatcacttcaataaaaaaatgtatgaggaatttagacaacttgcttgggaagatgcaaaagaaaattacaggtatgggttagaatgtctgttcaggttttatagttatggactggaaaaaaaattcaggcgagaaatttttcaggatttccaagaagaaaccaaaaaagactacgaatctggtcagctgtatggactagaaaagttttgggcttatttgaaatattctcaatctaagacacagtctattgacccaaaacttcaggaatacctctgtagttttaagaggttagaagacttccgtgttgatgaggctgatccgatagagtaatacctaattatatcaccatgagatggcaaaacggaatgtcagatctgtagacttttgacaggaaaaatcaccatgatcgattacttctgctcatcataaacatctagttcctaagcaggatatgagaatctgccttcctgtgacctctcctgggctcagtgacactccagtcgccgccccaccccacatcaatgccacttccaagtttgacttgcatcttacaaaccatatttctgtttactttttttctgccctgggacatttttaataacttttagataacaacttcaacaaaaatttacctcccaccaagagaagttgtctttattgtgagaagttgtctttattcccaagaaggggaataacttactctttaagtcagttttattacaggtaaatttgtaccagctttttcctctacttgtgttaagacctgtctccaatagacattccaattgaggattgtggaaatagcaaattacattggtgtctgcccaccactgaaggcaaaaagctggtttatctaggccacaggcagagcccgcaggggaggcaggtaacttctcggaccaccagattatcttgatcttcagccagctttattgttgttctacattttaataaacactacatgtttattttaaaaaatt

SEQ ID NO: 112023 - DNA, 2868 bp, Homo sapiens
acctaggttacaagatcctaacaaaacaccaagattttatcctgttgttaaagaaccaaaagccattgatgtaaagagtccaagaaagagaaaaacaaggcatagcacaaatccccctctagagtgtcatgttggttgggtaatggattccagagaccgtgggccaggaacatcctctgtcagcacttcaaatgcttcaccttcagaaggcgcaccactagcaggaagttatggatgtactcctcattcattcccaaagttccagcatccttctcatgaacttttgaaggaaaatggctttacccaacaagtgtaccacaagtatcgtcgaagatgcctaagtgagagaaaacgcttgggaattggtcagtcccaagaaatgaataccctctttcgtttctggtcctttttcctcagagatcacttcaataaaaaaatgtatgaggaatttagacaacttgcttgggaagatgcaaaagaaaattacaggtatgggttagaatgtctgttcaggttttatagttatggactggaaaaaaaattcaggcgagaaatttttcaggatttccaagaagaaaccaaaaaagactacgaatctggtcagctgtatggactagaaaagttttgggcttatttgaaatattctcaatctaagacacagtctattgacccaaaacttcaggaatacctctgtagttttaagaggttagaagacttccgtgttgatccccctattagtgatgaatttggaagaaaaagacattcctctacttctggtgaggagagtaatcgtcatagacttccacctaattcctctacaaagccaccaaatgctgctaaacctacatctaccagtgagcttcaggtaccaataaactctcccagaaggaatatttcaccggagtccagtgacaattcacattaaacagtgctgcctgtgtcctgtggtctcaagaaatggtgaaatgcctgagaaatagactcttatgaaagttctttgtccttgaagtcaacatttacatcagtatttatttggggaaaatcttctggtgtttaattgtgataataagaaagaagaaaaagaaagaaaagtggtagcattttttctaacaagataaattctaaaaatgttttccctgatttcacaaacaaggatagtcttggtgaccttttatagagatcttctagtaatgtattttgatctcagatttctttttcaaagccatggttttacaaaaacagcattccttaaatatatttaaaaaacaatacaaggaatgcctaacatttcagctcatacttcttaaagaagatatagtatgttgtattctcttcttagagctttcttaaagaatccacaatccaattaccccactgtcaattcatatttgaacttaccaaaacaaaggaggattacgtatatgttttttaaattcaaaaaagaatatgaaattatacctttagtatccctttgagacatatagtttaaagaaaactttttttaaaacaaaagtaggaatatatagtaagattgtagttacaatgagtatatgcacttttgatgctaggttttgcttttctccccccagtcatatctcatgatttccacagttgttgtattggtgtggagttttctgaattggctataagctgattacatattagaggtttatttttatgattctatataaacgtgcacgagtaatttaaaacctgcattgggattgattggaatattgtcctaaattaattaaatcttgcactgttttgaatgcatctgctatttatacatctgcaagtgggtatgtcataaggagtcagattatctttaatttaaaatgaatacttagttttacctttttgtttattttttgtttaattttgtttttataaatgttttcaagagttatagcaaattgatttctaatttttattgctattacaactgatgtaaatggtagtttcagtttttgtgagatttaaaaaaataaagcacagcacgatgcgtgaattttttgaattgatttttaattatttttatttagaatatagttgaaaagctgtaatattcagttttgctagtaaaagaccatttttttgtgtgaatgaagtttcaattataaacttacattcactttattgagcactacataatttacagatattttgttgtattggcaaaagcaagtggtttccatatgctaaattaattgtattttctttttgagcagattggatatcttgttcttataaattataatattgaaatacatataatctttggatggatgggctgttaatttgtaaataggttttcattaagttatttctcatgataagtaataatcagcagttttataatatttactatttggagggtcattttgatgctttaaattgcagaaatagtcaaatttgaatattcagaaaataaatttatttagatatattgtaaagagggtgcaaaacaagcaatgggttagaataatagatcttcaagtcttttcttaaatggggtatgtagttccagcttttcagtgagaaatttccaaaccgtgcttattagctttaaatggtctcttgaaatgatcataaatttttctcagtgtcctttttgtgttgaacacatatatctgaaacctgtatttaaccagatatttctactcaactgaatatacaagtgtaaatttgattggaaaattgtatattataaatgaaaatacaataatcaggagttttgtggtttgtattaattagtagttttatcatatttttattataaaagtaatacatgtacattgggaaatttagaaaagcacaaagaagaaaataaagtacttgttataaaaagaagaaaaaccaaaaaag

SEQ ID NO: 112024 - DNA, 2166 bp, Homo sapiens
acctaggttacaagatcctaacaaaacaccaagattttatcctgttgttaaagaaccaaaagccattgatgtaaagagtccaagaaagagaaaaacaaggcatagcacaaatccccctctagagtgtcatgttggttgggtaatggattccagagaccgtgggccaggaacatcctctgtcagcacttcaaatgcttcaccttcagaaggcgcaccactagcaggaagttatggatgtactcctcattcattcccaaagttccagcatccttctcatgaacttttgaaggaaaatggctttacccaacaagtgtaccacaagtatcgtcgaagatgcctaagtgagagaaaacgcttgggaattggtcagtcccaagaaatgaataccctctttcgtttctggtcctttttcctcagagatcacttcaataaaaaaatgtatgaggaatttagacaacttgcttgggaagatgcaaaagaaaattacaggtatgggttagaatgtctgttcaggttttatagttatggactggaaaaaaaattcaggcgagaaatttttcaggatttccaagaagaaaccaaaaaagactacgaatctggtcagctgtatggactagaaaagttttgggcttatttgaaatattctcaatctaagacacagtctattgacccaaaacttcaggaatacctctgtagttttaagaggttagaagacttccgtgttgatccccctattagtgatgaatttggaagaaaaagacattcctctacttctggtgaggagagtaatcgtcatagacttccacctaattcctctacaaagccaccaaatgctgctaaacctacatctaccagtgagcttcaggtaccaataaactctcccagaaggaatatttcaccggagtccagtgacaattcacattaaacagtgctgcctgtgtcctgtggtctcaagaaatggtgaaatgcctgagaaatagactcttatgaaagttctttgtccttgaagtcaacatttacatcagtatttatttggggaaaatcttctggtgtttaattgtgataataagaaagaagaaaaagaaagaaaagtggtagcattttttctaacaagataaattctaaaaatgttttccctgatttcacaaacaaggatagtcttggtgaccttttatagagatcttctagtaatgtattttgatctcagatttctttttcaaagccatggttttacaaaaacagcattccttaaatatatttaaaaaacaatacaaggaatgcctaacatttcagctcatacttcttaaagaagatatagtatgttgtattctcttcttagagctttcttaaagaatccacaatccaattaccccactgtcaattcatatttgaacttaccaaaacaaaggaggattacgtatatgttttttaaattcaaaaaagaatatgaaattatacctttagtatccctttgagacatatagtttaaagaaaactttttttaaaacaaaagtaggaatatatagtaagattgtagttacaatgagtatatgcacttttgatgctaggttttgcttttctccccccagtcatatctcatgatttccacagttgttgtattggtgtggagttttctgaattggctataagctgattacatattagaggtttatttttatgattctatataaacgtgcacgagtaatttaaaacctgcattgggattgattggaatattgtcctaaattaattaaatcttgcactgttttgaatgcatctgctatttatacatctgcaagtgggtatgtcataaggagtcagattatctttaatttaaaatgaatacttagttttacctttttgtttattttttgtttaattttgtttttataaatgttttcaagagttatagcaaattgatttctaatttttattgctattacaactgatgtaaatggtagtttcagtttttgtgagatttaaaaaaataaagcacatgtaaaaaaaaaaaagaaaaaaaaaaaaatttggggggctcgggccagaaaaattttaaaacattctgtggggggggccaagtatataacgtggcaagggtcaaaaaacatcggcgagaacgtggggtttcacaaaaaaagcggggacggggcgaaacacaggtgggtg

SEQ ID NO: 112025 - DNA, 2416 bp, Homo sapiens
  misc_feature (1)..(1): n is a, c, g, or t
  misc_feature (14)..(14): n is a, c, g, or t
  misc_feature (25)..(25): n is a, c, g, or t
ntcgtagggtatcngctctctctgnaaggccgacaaggtatgggttagaatgtctgttcaggttttatagttatggactggaaaaaaaattcaggcgagaaatttttcaggatttccaagaagaaaccaaaaaagactacgaatctggtcagctgtatggactagaaaagttttgggcttatttgaaatattctcaatctaagacacagtctattgacccaaaacttcaggaatacctctgtagttttaagaggttagaagacttccgtgttgatccccctattagtgatgaatttggaagaaaaagacattcctctacttctggtgaggagagtaatcgtcatagacttccacctaattcctctacaaagccaccaaatgctgctaaacctacatctaccagtgagcttcaggtaccaataaactctcccagaaggaatatttcaccggagtccagtgacaattcacattaaacagtgctgcctgtgtcctgtggtctcaagaaatggtgaaatgcctgagaaatagactcttatgaaagttctttgtccttgaagtcaacatttacatcagtatttatttggggaaaatcttctggtgtttaattgtgataataagaaagaagaaaaagaaagaaaagtggtagcattttttctaacaagataaattctaaaaatgttttccctgatttcacaaacaaggatagtcttggtgaccttttatagagatcttctagtaatgtattttgatctcagatttctttttcaaagccatggttttacaaaaacagcattccttaaatatatttaaaaaacaatacaaggaatgcctaacatttcagctcatacttcttaaagaagatatagtatgttgtattctcttcttagagctttcttaaagaatccacaatccaattaccccactgtcaattcatatttgaacttaccaaaacaaaggaggattacgtatatgttttttaaattcaaaaaagaatatgaaattatacctttagtatccctttgagacatatagtttaaagaaaactttttttaaaacaaaagtaggaatatatagtaagattgtagttacaatgagtatatgcacttttgatgctaggttttgcttttctccccccagtcatatctcatgatttccacagttgttgtattggtgtggagttttctgaattggctataagctgattacatattagaggtttatttttatgattctatataaacgtgcacgagtaatttaaaacctgcattgggattgattggaatattgtcctaaattaattaaatcttgcactgttttgaatgcatctgctatttatacatctgcaagtgggtatgtcataaggagtcagattatctttaatttaaaatgaatacttagttttacctttttgtttattttttgtttaattttgtttttataaatgttttcaagagttatagcaaattgatttctaatttttattgctattacaactgatgtaaatggtagtttcagtttttgtgagatttaaaaaaataaagcacagcacgatgcgtgaattttttgaattgatttttaattatttttatttagaatatagttgaaaagctgtaatattcagttttgctagtaaaagaccatttttttgtgtgaatgaagtttcaattataaacttacattcactttattgagcactacataatttacagatattttgttgtattggcaaaagcaagtggtttccatatgctaaattaattgtattttctttttgagcagattggatatcttgttcttataaattataatattgaaatacatataatctttggatggatgggctgttaatttgtaaataggttttcattaagttatttctcatgataagtaataatcagcagttttataatatttactatttggagggtcattttgatgctttaaattgcagaaatagtcaaatttgaatattcagaaaataaatttatttagatatattgtaaagagggtgcaaaacaagcaatgggttagaataatagatcttcaagtcttttcttaaatggggtatgtagttccagcttttcagtgagaaatttccaaaccgtgcttattagctttaaatggtctcttgaaatgatcataaatttttctcagtgtcctttttgtgttgaacacatatatctgaaacctgtatttaaccagatatttctactcaactgaatatacaagtgtaaatttgattggaaaattgtatattataaatgaaaatacaataatcaggagttttgtggtttgtattaattagtagttttatcatatttttattataaaagtaatacatgtacattgggaaatttagaaaagcacaaagaagaaaataaagtacttgttataaaaagaagaaaaaccaaaaaag

SEQ ID NO: 112026 - DNA, 2493 bp, Homo sapiens
ggtccctttttcttcccccaagaggattccactttccaattaaaaaaaaattgttatgaaggatattttaagcccactctggcttggggaaaaatgcaaaaagaaaattacagggtatgggttagaatgtctgttcaggttttatagttatggactggaaaaaaaattcaggcgagaaatttttcaggatttccaagaagaaaccaaaaaagactacgaatctggtcagctgtatggactagaaaagttttgggcttatttgaaatattctcaatctaagacacagtctattgacccaaaacttcaggaatacctctgtagttttaagaggttagaagacttccgtgttgatccccctattagtgatgaatttggaagaaaaagacattcctctacttctggtgaggagagtaatcgtcatagacttccacctaattcctctacaaagccaccaaatgctgctaaacctacatctaccagtgagcttcaggtaccaataaactctcccagaaggaatatttcaccggagtccagtgacaattcacattaaacagtgctgcctgtgtcctgtggtctcaagaaatggtgaaatgcctgagaaatagactcttatgaaagttctttgtccttgaagtcaacatttacatcagtatttatttggggaaaatcttctggtgtttaattgtgataataagaaagaagaaaaagaaagaaaagtggtagcattttttctaacaagataaattctaaaaatgttttccctgatttcacaaacaaggatagtcttggtgaccttttatagagatcttctagtaatgtattttgatctcagatttctttttcaaagccatggttttacaaaaacagcattccttaaatatatttaaaaaacaatacaaggaatgcctaacatttcagctcatacttcttaaagaagatatagtatgttgtattctcttcttagagctttcttaaagaatccacaatccaattaccccactgtcaattcatatttgaacttaccaaaacaaaggaggattacgtatatgttttttaaattcaaaaaagaatatgaaattatacctttagtatccctttgagacatatagtttaaagaaaactttttttaaaacaaaagtaggaatatatagtaagattgtagttacaatgagtatatgcacttttgatgctaggttttgcttttctccccccagtcatatctcatgatttccacagttgttgtattggtgtggagttttctgaattggctataagctgattacatattagaggtttatttttatgattctatataaacgtgcacgagtaatttaaaacctgcattgggattgattggaatattgtcctaaattaattaaatcttgcactgttttgaatgcatctgctatttatacatctgcaagtgggtatgtcataaggagtcagattatctttaatttaaaatgaatacttagttttacctttttgtttattttttgtttaattttgtttttataaatgttttcaagagttatagcaaattgatttctaatttttattgctattacaactgatgtaaatggtagtttcagtttttgtgagatttaaaaaaataaagcacagcacgatgcgtgaattttttgaattgatttttaattatttttatttagaatatagttgaaaagctgtaatattcagttttgctagtaaaagaccatttttttgtgtgaatgaagtttcaattataaacttacattcactttattgagcactacataatttacagatattttgttgtattggcaaaagcaagtggtttccatatgctaaattaattgtattttctttttgagcagattggatatcttgttcttataaattataatattgaaatacatataatctttggatggatgggctgttaatttgtaaataggttttcattaagttatttctcatgataagtaataatcagcagttttataatatttactatttggagggtcattttgatgctttaaattgcagaaatagtcaaatttgaatattcagaaaataaatttatttagatatattgtaaagagggtgcaaaacaagcaatgggttagaataatagatcttcaagtcttttcttaaatggggtatgtagttccagcttttcagtgagaaatttccaaaccgtgcttattagctttaaatggtctcttgaaatgatcataaatttttctcagtgtcctttttgtgttgaacacatatatctgaaacctgtatttaaccagatatttctactcaactgaatatacaagtgtaaatttgattggaaaattgtatattataaatgaaaatacaataatcaggagttttgtggtttgtattaattagtagttttatcatatttttattataaaagtaatacatgtacattgggaaatttagaaaagcacaaagaagaaaataaagtacttgttataaaaagaagaaaaaccaaaaaag

SEQ ID NO: 112027 - DNA, 2858 bp, Homo sapiens
agcgggttatctacagtatgaaaatgtttgagtcatttatagtcagagggttttaatttacttgtgaagttcacactattgaaactaattgcaatgcttgactttattttctttagagtccaagaaagagaaaaacaaggcatagcacaaatccccctctagagtgtcatgttggttgggtaatggattccagagaccgtgggccaggaacatcctctgtcagcacttcaaatgcttcaccttcagaaggcgcaccactagcaggaagttatggatgtactcctcattcattcccaaagttccagcatccttctcatgaacttttgaaggaaaatggctttacccaacaagtgtaccacaagtatcgtcgaagatgcctaagtgagagaaaacgcttgggaattggtcagtcccaagaaatgaataccctctttcgtttctggtcctttttcctcagagatcacttcaataaaaaaatgtatgaggaatttagacaacttgcttgggaagatgcaaaagaaaattacaggtatgggttagaatgtctgttcaggttttatagttatggactggaaaaaaaattcaggcgagaaatttttcaggatttccaagaagaaaccaaaaaagactacgaatctggtcagctgtatggactagaaaagttttgggcttatttgaaatattctcaatctaagacacagtctattgacccaaaacttcaggaatacctctgtagttttaagaggttagaagacttccgtgttgatccccctattagtgatgaatttggaagaaaaagacattcctctacttctggtgaggagagtaatcgtcatagacttccacctaattcctctacaaagccaccaaatgctgctaaacctacatctaccagtgagcttcaggtaccaataaactctcccagaaggaatatttcaccggagtccagtgacaattcacattaaacagtgctgcctgtgtcctgtggtctcaagaaatggtgaaatgcctgagaaatagactcttatgaaagttctttgtccttgaagtcaacatttacatcagtatttatttggggaaaatcttctggtgtttaattgtgataataagaaagaagaaaaagaaagaaaagtggtagcattttttctaacaagataaattctaaaaatgttttccctgatttcacaaacaaggatagtcttggtgaccttttatagagatcttctagtaatgtattttgatctcagatttctttttcaaagccatggttttacaaaaacagcattccttaaatatatttaaaaaacaatacaaggaatgcctaacatttcagctcatacttcttaaagaagatatagtatgttgtattctcttcttagagctttcttaaagaatccacaatccaattaccccactgtcaattcatatttgaacttaccaaaacaaaggaggattacgtatatgttttttaaattcaaaaaagaatatgaaattatacctttagtatccctttgagacatatagtttaaagaaaactttttttaaaacaaaagtaggaatatatagtaagattgtagttacaatgagtatatgcacttttgatgctaggttttgcttttctccccccagtcatatctcatgatttccacagttgttgtattggtgtggagttttctgaattggctataagctgattacatattagaggtttatttttatgattctatataaacgtgcacgagtaatttaaaactgttttgaatgcatctgctatttatacatctgcaagtgggtatgtcataaggagtcagattatctttaatttaaaatgaatacttagttttacctttttgtttattttttgtttaattttgtttttataaatgttttcaagagttatagcaaattgatttctaatttttattgctattacaactgatgtaaatggtagtttcagtttttgtgagatttaaaaaaataaagcacagcacgatgcgtgaattttttgaattgatttttaattatttttatttagaatatagttgaaaagctgtaatattcagttttgctagtaaaagaccatttttttgtgtgaatgaagtttcaattataaacttacattcactttattgagcactacataatttacagatattttgttgtattggcaaaagcaagtggtttccatatgctaaattaattgtattttctttttgagcagattggatatcttgttcttataaattataatattgaaatacatataatctttggatggatgggctgttaatttgtaaataggttttcattaagttatttctcatgataagtaataatcagcagttttataatatttactatttggagggtcattttgatgctttaaattgcagaaatagtcaaatttgaatattcagaaaataaatttatttagatatattgtaaagagggtgcaaaacaagcaatgggttagaataatagatcttcaagtcttttcttaaatggggtatgtagttccagcttttcagtgagaaatttccaaaccgtgcttattagctttaaatggtctcttgaaatgatcataaatttttctcagtgtcctttttgtgttgaacacatatatctgaaacctgtatttaaccagatatttctactcaactgaatatacaagtgtaaatttgattggaaaattgtatattataaatgaaaatacaataatcaggagttttgtggtttgtattaattagtagttttatcatatttttattataaaagtaatacatgtacattgggaaatttagaaaagcacaaagaagaaaataaagtacttgttataaaaagaagaaaaaccaaaaaag

SEQ ID NO: 112028 - DNA, 1576 bp, Homo sapiens
agcgggttatctacagtatgaaaatgtttgagtcatttatagtcagagggttttaatttacttgtgaagttcacactattgaaactaattgcaatgcttgactttattttctttagagtccaagaaagagaaaaacaaggcatagcacaaatccccctctagagtgtcatgttggttgggtaatggattccagagaccgtgggccaggaacatcctctgtcagcacttcaaatgcttcaccttcagaaggcgcaccactagcaggaagttatggatgtactcctcattcattcccaaagttccagcatccttctcatgaacttttgaaggaaaatggctttacccaacaagtgtaccacaagtatcgtcgaagatgcctaagtgagagaaaacgcttgggaattggtcagtcccaagaaatgaataccctctttcgtttctggtcctttttcctcagagatcacttcaataaaaaaatgtatgaggaatttagacaacttgcttgggaagatgcaaaagaaaattacaggtatgggttagaatgtctgttcaggttttatagttatggactggaaaaaaaattcaggcgagaaatttttcaggatttccaagaagaaaccaaaaaagactacgaatctggtcagctgtatggactagaaaagttttgggcttatttgaaatattctcaatctaagacacagtctattgacccaaaacttcaggaatacctctgtagttttaagaggttagaagacttccgtgttgatccccctattagtgatgaatttggaagaaaaagacattcctctacttctggtgaggagagtaatcgtcatagacttccacctaattcctctacaaagccaccaaatgctgctaaacctacatctaccagtgagcttcaggaggctgatccgatagagtaatacctaattatatcaccatgagatggcaaaacggaatgtcagatctgtagacttttgacaggaaaaatcaccatgatcgattacttctgctcatcataaacatctagttcctaagcaggatatgagaatctgccttcctgtgacctctcctgggctcagtgacactccagtcgccgccccaccccacatcaatgccacttccaagtttgacttgcatcttacaaaccatatttctgtttactttttttctgccctgggacatttttaataacttttagataacaacttcaacaaaaatttacctcccaccaagagaagttgtctttattgtgagaagttgtctttattcccaagaaggggaataacttactctttaagtcagttttattacaggtaaatttgtaccagctttttcctctacttgtgttaagacctgtctccaatagacattccaattgaggattgtggaaatagcaaattacattggtgtctgcccaccactgaaggcaaaaagctggtttatctaggccacaggcagagcccgcaggggaggcaggtaacttctcggaccaccagattatcttgatcttcagccagctttattgttgttctacattttaataaacactacatgtttattttaaaaaatt

SEQ ID NO: 112029 - DNA, 338 bp, Homo sapiens
ccttaaaaatgctttcttcactcgtttaaatagtaatgataagaatatggctgcagggggcagcttatgcctgtaatcccaccattttgggagctcaaggcaggagtattgcttgagcccagaagtttgagaccagtctgggcaacatagtggaaacttgtctctccaaaagctaaaagaaaaagccgtgcatggtggtatgcacctgtagtcccagctacttgggaggctgaggtgggaggatcgcttgagtctgggaggtcgaggctgctgtgagccatgattgcaccactgcattccagcctgggtgacagagcaagatcttgtcttaaaaaaaa

SEQ ID NO: 112030 - DNA, 418 bp, Homo sapiens
ctgaacctggccccaccacctatgggcagagttggttccagctcagtgtgtccatgggatgtctttaggttcaccttgcttttctgtcccacgctcacatgttggagctaagctgcatggagtgtcgttctccctgtacatatgagattagtcagcaatcctgtctccttccatattctgtctttatttctgcgacactatttctggagaacattgtatttgtgcttttcctttgatatgtttgtaattttcgttagaaaacccttttagattctaaagcttctacattcagtatttcaatcaatgataacaaactggtgtaagactaaatataaaatacaaacacatttccataaatcaacacatttccataaattgctgttataatgtctgccacaaaaagttcagttgtttgtat

SEQ ID NO: 112031 - DNA, 749 bp, Homo sapiens
gttgagttttgcaggaaaaccccttaagaaaatcttgtgtgaactacgtcctcggttgcaatgccatgagcctgtttcagtgtgtgcattccaggcttgcctttctagctgggtaaggatccggcagactgaggtctccttggtaatttgggtacaccaagtctccagttaatgatagataatcagcctttgggtcattcggtcattctcttattacaaacccctcctgctctctctgatctcctttcaaactaaatttcacacaaacaaataaagcaagacagggacaagttcttaaaaaaagagagagaaatattagaaacgcctgatacagaactctaaacaaggaaaggcaagctaaaagaggataggaaagaacatcttatcaaaatgaacatgttgtgtacaaaacattaaaagaaaaggctctggtttttgttaaagtgacagaaaattaaaataaaaataattgcaggcaccaaagttataaacagggaaggcaggatgctagctggaaatgcgcagcactagggagctaatttgttgttacagattatatatctgcaccctgcttggagaagtgctactttgttccattttccagaagagaatggtttttcttcttaatacttgtgtgaatgcccacttaagttaacacaggccacaactttgaggaatgagaaatggaattgcattctgcttgcgaagcatccaacttcaaacgaagaaattggttgtgtacaaaaaaa

SEQ ID NO: 112032 - DNA, 335 bp, Homo sapiens
ccatcttatgtttttagtctttctgatcttcccctctatcacatccgtcttcttgaatctagccagaaaactattcagtttaagagctcacatgattagatttgatgcaccagggtaatccaagataattgcccaattttaagttcataatcttaattatacctgaaaaatttcttttgccatatcaagtaacatattttcaagatttataaggattagtttatggacatctttgtgaaaggaccattctccctgccaccatcttcaccccggttctcaaatatgtctctggcaaatgtaaaataacatccaccctctcttaaagttcccagtcc

SEQ ID NO: 112033 - DNA, 165 bp, Homo sapiens
ttcattattgcactagttgaggacttccagaactatgttgaaaagagaagtaagagtagtcatcttcaccttgtgtgctaggctgttcttatgttgctacaaacaaatacttgagaatgagtaatttataaagaaaagaggtttaattggctcacagttctgcag

SEQ ID NO: 112034 - DNA, 155 bp, Homo sapiens
ggggaacatccgaggggccaaacaggtaaaaggcaagcccagggccaaccttccccagcccctccatccagaagtcaggactcctgggtccaatttctgagctccggtccagccctgctgtgtgagtccctcatccccacccccgcacctgtttc

SEQ ID NO: 112035 - DNA, 153 bp, Homo sapiens
atatatagatgggaaaaaagacaagtaatctgaatattactagtgatgagttatgattgttattgatatttttcattttatttgtgcttttatatttttcatgtttattattatagtaatgttttaatgtttaattattaaaaataattcttg

SEQ ID NO: 112036 - DNA, 198 bp, Homo sapiens
ggcatgctggctagtgttgccacgtggacttcagcgttatcactttgctgcaaaaggctctctttgctttcacagtatcttgccaagaagagtccctggatatgaagtgtcttcatctggacccaaacctgagaaagaaattaatttgggctgcaccttctaggtgtgtgcctcccctgagcactgtacttctttagt

SEQ ID NO: 112037 - DNA, 196 bp, Homo sapiens
ggcacacagtaatctttctgccttctttctgagctttggaacatttttcttaacagactcaatacttttactcccagaaaccagttctgtgtcttctttccatgttctctgcaagagggtagaaatgggcctggggcagagcagagagaaactttgctttcctaaagttctttccagctggccttagtgagatttt

SEQ ID NO: 112038 - DNA, 528 bp, Homo sapiens
gacaaacctgaaagacactatgctaagtgaaataagccacacaggaaaagctacataccatgagttcatctgtgtaactttttgaaatgacgaaaccacagatggagacagatgaagggttatcaggtggccaagatgggggaagagattaactatggctctaagtcagtagcacattgggacccttgtgctaatcaatctgttcaataccttgattacaatggtacatacacgtgacagaattacacaaaactcgctaggtgtggtggctcatgcctataatcccagcactttgggagatcaaggtggacagattacttgagcccaggagttcaagaccagcctgggcaacataatgataccctgtctcaattataaaaagaaaaaaaaagaattaaaaagggccaggtgcaatggctcatgcctgtaatcccagaactttaggaagttgaggcaggcggatcaccagagcccatgagtttgagaacagctggccaacatggtgaaaccccatctctactaaaaata

SEQ ID NO: 112039 - DNA, 404 bp, Homo sapiens
tatttgaagaactctcaaaactcaacagtataaaactcaaacaatctaattaaaaaatatgcaaaagacataaatagacatttcactgatgaggatataatgataggaaataaacatatgaagagatatttaacatcattagctattagggaaaaggcacattaaaatcacaatgagatattactgctcacctatcagaatggctaaaataatttggtaacaacaccagtggttgatgaggatgtgggaaactataccactcttacattgctgatggggatttaaaatgacgcagatactttgaaaaacagtttgacaatttctcataaaatcaaacatgtaactaccacgtaactcagtaattatactcctaggcatttatcctggagaaataaaaacttcca

SEQ ID NO: 112040 - DNA, 594 bp, Homo sapiens
agggaaaaggagggagtgggacagtggttgaaaaactaactgtttagttagtacctgggtgaagggatcattcataccccaacctcagcattacacaatataccaaggtaacaaacctgcatatgtacctcctgaatctaaaataaatgttggaaaaaactagagatccggaactgggactgctctggtttgaatgtgtccctcaaaatttatgttatgagggagtgggtttcttataaaaggaccctacttttgtctctctctcacccatgtgatgccttctgccttgttatgacacagcaagaaggccttcacagatgccaccaccttgatcttgagcatctcagtctccagaactgttacaaataaatttctgtttatctaaaaaaggaaaaattcaaaaattagtaagtcattaaatgaataaaatgagaaaattaaagattgaaattatacaaaaaactaacaaattctggagctgagaaatgcatgaattaaatgaaaattgcaatagagaatgtcaacagcagaatcaatgaagcagaagaaaggctctgaactcaaagacagtttagtgaaattatacaattggag

SEQ ID NO: 112041 - DNA, 339 bp, Homo sapiens
tgtatttgctgttttctataataaaatacttttactcctgatatccacatgttcacttctttcaagtctttgttgaaatagcatcttctctatgatacctactgggacttcccaacttaaaatggcaataccccttccctcatcctcagcatttccaatcttcccgaacatcctctattatattttccaaagcatatatcttctctctgttacataaaacatatttattgtgtatttttattgtttatttctatctgcactagaacctaaactccattatgttttatataataatatatccatgtattaagaatactgtctgacacccatgaacatgca

SEQ ID NO: 112042 - DNA, 366 bp, Homo sapiens
ccatgtatcaaatggcatgggaaccagggaatcattttgagttactaggttcagtagtgaaactctgtagttttcttggcccttacaaaaccaggtcacagctgcctggcttcctaatttggtttgatgtactgtgaattcccaagggggtgagtcactctcttattcatatggaagtacaggagccattccaaaacaaaaaccagtctgggtttatttatgattttatatgccctttactgccccactatacagatgatccagagttgactttcagctgttaattaccatattggagaggagatacatggcatttttcatcttttgagttacaagacttctttaatgtgaatattccctaagtgc

SEQ ID NO: 112043 - DNA, 345 bp, Homo sapiens
tcttggcgtgatgaaatgcctcttggtacctcatctgccaggtccatgaccctctgttatcttcagtcatgttcctcaggtctgcttctgtttgcacaaggcttcatgcagtggccttgtcctgagacatgccaggggttgggcaaaaccaccgaagcagctgctggcgacatctctttagggcccacgtgagggacgtgacttcctccctaatcaagatggagaatatttatttagctttcaacttaaattgtttcacagggcaacagactctgtttttggcagggcttttctttttgtatttaataaatgctgtacaaattagattttgatgatagttgcttt

SEQ ID NO: 112044 - DNA, 424 bp, Homo sapiens
cgaattagcaagactttgtgactaatgggaagtaaagtcaaagaagtggaagatgatagccagatgtctgatttggtgagaggaatgaatgccttcagcaaaacaggaagtggaggagtggagcaggttgggagttaaggaaagaaggttgaactccattatgattatgctgggtttttaatgcctaagaaacatcaaaaggaaagatctctcaggcaacccagcattggagtcaaatgtttatgagagttctggattgaagaaaactagaaactattttgacaaagcatggagatggtaactgaggccattggagtgagtgaggtcacccagaagagtgggtagagctggaagagaaagaagcctaagaaagaacatttaaggatgggcagaagaaagggaaaaggaaacaaagaataagcaa

SEQ ID NO: 112045 - DNA, 453 bp, Homo sapiens
gaaggcagaggggctgccatttcccctctcccgccctgcaggggagaggggtggggagtatggttatcttgccctggtcatatttgagctttcttccccgaccaggcaccctcacttagtagaaacaagagcagtcacccgtgccgtgtccacgatgacaactgctgcctgctcccccagcagaagaattgccccctccttactcaccccttcatatccctctggttttttgtcccctgtcttgtctgagctagctccctggtaggatgcaccttatgccacactagagacgcatggggagcgtttggttgaggggtccccagggagtgtctcctggttccgtccctcgcattctcctccgcctggagtaccaccagtagagttttgtcccagttgactgaagcttttgtgtctcagtgacacgcaagtttccccagtggagagggagagttt

SEQ ID NO: 112046 - DNA, 304 bp, Homo sapiens
aagcactgggattaccggagtaaactatggctcccagctgcctggtattctttcaatgaagacatgccaaaacgcttacaaatatggtggacatttaatggtttatatttcatttatgtcttcatttaacaacgattaactgagcacctactatgtgccacttttctacaatcaagggatacaatgaagaacaaaacacaaaaatctctgcttttgttgaattcacatttaatgtaacacatgaatacttttaacacacccaacgatctaatgcaaagcgattgagctcgttgtgagataagta

SEQ ID NO: 112047 - DNA, 383 bp, Homo sapiens
ggtgtggggcaagcattctgagttcctttcagacatttaacaatcgagggttttgatgtcattgaaaaaattaaaaagggagcccacagttcttcaatgactattaaatgtttgaaacctctataaataaacagacatgttagaattactccaagaatttaaatacctcaagttctttaagctttcagaaatatacttgtctaatagatacattatggtgaaaagagtatttgagaatgaccattttcatgcaaactaaatcaaactccaactacatattctgctagatttttgatgagaaatttcctgtgaaatgaagttagtttctcattcaaaaaaccagtgcatttttcagtgaaagtgctgttcatctctttgaccaa

SEQ ID NO: 112048 - DNA, 677 bp, Homo sapiens
catttctaggagatatatagcaagactactgaagtaagtctgacttacagactcagtaaaataaaattttcatgtttttaactgaagacactctcgttatgagcgtatttgctcaaattcctcccagatactcccctgccccttccagggtcttttatttttatgatatttgcatgtatcttttttcgtaagaacacaagaatcaggtctcgattccaaggagtagagcctctgcagttcaatctgtgaccaaaggcctacaatgtcttgggctcacttcatatatgtgattacaggaatataaaagttatctttgttatgttgtctatttcttctagtgcatctctaaatttattgacttattttgtattaaatctgatacagttccttctcaaatatttaccttctgatcaatttgtagatttgttgttgttgttttccctcagtgtgctttctgagttatatagccacatggcttaatttttgaccaacaaaatttctttgcccattttctctttagggttggccacttcactgtgtttccatttccatacttgtaacaaacaaacttgtgggttgtgctttattatatgcattgtggtgttgagtacattatatatgaaatacaaaatttagtaagttccttatttaatgaatttttaaaattatttatggta

SEQ ID NO: 112049 - DNA, 1047 bp, Homo sapiens
ctgtgagtgacacacgctgagtggggtgaagggaaatgctggtgaatttcattttgaggtgtgggttgctgttagtcactctgtctcttgccattgccaagcacaagcaatcttccttcaccaaaagttgttacccaaggggaacattgtcccaagctgttgacgctctctatatcaaagcagcatggctcaaagcaacgattccagaagaccgcataaaaaatatacgattattaaaaaagaaaacaaaaaagcagtttatgaaaaactgtcaatttcaagaacagcttctgtccttcttcatggaagacgtttttggtcaactgcaattgcaaggctgcaagaaaatacgctttgtggaggactttcatagccttaggcagaaattgagccactgtatttcctgtgcttcatcagctagagagatgaaatccattaccaggatgaaaagaatattttataggattggaaacaaaggaatctacaaagccatcagtgaactggatattcttctttcctggattaaaaaattattggaaagcagtcagtaaaccaaagccaagtacattgattttacagttattttgaaatacaataagaactgctagaaatatgtttataacagtctatttcttttaaaaactttttaacataatactgacggcatgttaggtgattcagaatagacaagaaggatttagtaaattaacgttttggatataagttgtcactaatttgcacattttctgtgttttcaaataatgtttccattctgaacatgttttgtcattcacaagtacattgtgtcaacttaatttaaagtatgtaacctgaattaactcgtgtaatatttgtgtgtggagtgggatgtggggggtggagggggaatgacagatttctggaatgcaatgtaatgttactgagacttaaatagatgttatgtatatgattgtctgtttaagtgtttgaaaattgttaattatgcccagtgtgaacttagtacttaacacattttgattttaattaaataaattgggtttccttctc

SEQ ID NO: 112050 - DNA, 228 bp, Homo sapiens
gcaaactgacatggcacatgtatgtctatgtaataaacctgcacgttgtgcacatgtaccctagaacttaaagtataattaaaaaataaataaacataaaacttgataaagcaatgggatgaattattttaaaatgatgcttttcccaatgtatttaagtcttgatgctagataaatttgaatctaaagaggctaaagctactcaacgttaacccagcatagaacaat

SEQ ID NO: 112051 - DNA, 308 bp, Homo sapiens
gattttcaaatatatgcattatatacttaccagttcagcttccctaatctggaaatcggaaatctgaaatgcttcaatgagcatttcctttgatcatcatgacagtactcaaaaagtttcgagttttggagcattttggatttctggattgggaatactcaacctgcattactgtggagcagtaaacaagaaatctaaaaacaattagtatcccatctttaataccttctcactctgttgtgacttgattttgaccttctgaaatgattcctcaggtatagtattcatgttttttttccccaagaccc

SEQ ID NO: 112052 - DNA, 377 bp, Homo sapiens
ctgggcaagatgtacagaagtaaactctgagctgagtaacactcattcagcggttcccgtaccaggccctgtcctaacgacttttcaaacacgagctgatttaatcctcactaccttgaggtaggttctgttattatacctgttttacagatgaagaaatcaagacccagaaactttaagtagcctgctcaaggtcacatggttactaagtggctgaggtagcatttgaacccaggtcatctgcagtatttcagacaggggttcaggtagggttacttgaagccgctagggccctgccttaatttaagtgctgattctactatttccctttgtaaacaggatgcttttagaggtggggatgctgtgaggagatggaa

SEQ ID NO: 112053 - DNA, 450 bp, Homo sapiens
catccataagaataataactctaatatactgagactcatcaaatatgtttcatctgtgagtttataaatgatgctaaaaaataagatgtaattgatcgtttttggaggattgtagtgcaccaatttattattttgcaaactggcaggtaatggaaaagaatcaagcatttattcctgcctctcatatgatggttcactggcaaagcaaatagtagatgagggaaagcactcttcataaatgtactccagatgcaaaattaaaaagaaatgacaggatattaccgtttggcaaccttaattaattaatggatttaggtgggctggggactgtggcttgtgcctgttatcccagcattttgggaggccaagatgggagaatcacttgagcccaggaatataagaccagcctgggcaacatagtaagactccatctctacaaaaaaatagaaa

SEQ ID NO: 112054 - DNA, 475 bp, Homo sapiens
ccaaccaggtccctgactctggtataactaatgccctcataaatcttcagatgagaaccacttgacaaatatggagcaggattgtgctcaatacaaactttaagaagcagcctctttctgttaaaacccacaaaagagatgcagaagggaaacacactactatgagagagacttccctagaaggctttctgctctcattgcctatttttcacccttagaagaaatgagcgaagtggggaagcaaataggctcacagttagcatttgtaatgtgttggtgtaggtgggtgttgtgtggtaacttaattgtaatgcaaatcttttacctgtgaaaatcaaacacgacaagtttgctgacacactcaactggaactatatctcagttggagtggtttaggttaggtatagaatagtattttaaaagtggatgttttgagggaagcccttagataatttagtagacaggttagaaatac

SEQ ID NO: 112055 - DNA, 243 bp, Homo sapiens
acccggctaatttttttgtatttttagtagagatggggtttcaccgtgttagccgggatgatctcagtctcctgacctcatgatccgccctccttggcctcccaaagtgctgggattacaggcgtgagccactgcgtccagcaataatctccctatttttaactgtgtataactagttttaaaagtttgtataaaaagtgtggcccagagaaaatgtgtctaaggtctgatttggccaactga

SEQ ID NO: 112056 - DNA, 724 bp, Homo sapiens
ggttcaagtgattctcctgcctcagcctcccaagtagctgagattacaagcatccgccaccatgcccagctaattttttatatttttggtagagatggggtttcaccatgttggccaggctggtctcaaactcctgacctcaggtgatcccccaacctcggcctcccaaagtgctgggattacaggcatgagccaccatgcctggcctaccaaagactttagatattagaattactagatagaaaatatgaaatgtgtgttttaaatattgatgtttttaaatagggacaatcattttggaaaaatattcattcatttcaattttcatgaaaagtggaacatgtgcctgcccaaaacccagaaactctggtcctgtatttctatgtatgtaccagatgacatgcacaagaatatctatagcacttattttaaatgatggaaagaactgtaatgtccaccaacagaataccatatggcagtaaaaatggatgccttgcaactgtacccatcagcatgaatgaaccttaaaatcatgatacttaagttagaaaatgcagtttgcaaaggaatgcagtcagtatgccaccattaagatatcttagcaaaatcaaacattaattatacatacatatatattaaaactataaaggagagaaagaagttattaagaagtaattcagggtagtagttttctctggaagggaggatttgggaagtctcaaca

SEQ ID NO: 112057 - DNA, 642 bp, Homo sapiens
tacttttcacagggtaacttttaaaatcagccagcatggtagctcatgcctgtaatcccagcactttgggaggccgaggcaggcaggattgctagagaccagggggtcaagaccagcctgggaaacatagtgggaccccatctctacaaaaaataaaattagccaagcgtggtgttgcgcacctatagtcccggctacttgggaggctgaggtggggaagaatcacttgaggcctgggaggttgaggctacagtgagccacgataacgccactgcactccagcctgagtgacacaatgagaccttgtctcggaaaacaacagcccaaaaaagccccaaactttacaaatctggaacttaatgaagtgtaaaataaacaaatatgtactcatggcctccacagcacagcagaggttaaaaaataactatagaattctataaagaaacctctactttaagaagattctaagccaattctatgacaagaccaaagttattttacaaaggtctcatcaaggaaactgtcttcaaggcagtcatgatgttgccctcctgtaatcaatcccaactactcaggaggctgagacaggaggactgcttgagctcaagagtttgcaccagtttgggctacatagcggacccg

SEQ ID NO: 112058 - DNA, 498 bp, Homo sapiens
gcagttatgcaatagcaagagaatggaaacaaatgttcagcaagaaaggtctacttaaataaaatacggtgtgtccacagagtggactatgatgttgctgaacaaagagaggaagttctttatgtactcacagggaaagatcactaagacctagataaagaagcacagtacagaacagagtgtacagtatgctacatttgtgtaaacagggtgaaaattaatacccatgcaaacacatgctcatacttacttgtatagtataaatcagaggttagaaaactagccaggtgtggtggttcatgtctgtaatcccagcacttcggaaggccgaggtgggcagatcatctgagctcaggagttggagactagcttggccgatatggtgaaaccccatctctactaaaaatacaaagaaaaaaaaaaaagccaggcttcatggtgcttgcctgtaatcccagctactcgggaggctgaggcagaagaatcacttgagcctgg

SEQ ID NO: 112059 - DNA, 578 bp, Homo sapiens
cctgcctcagcctcccaagtagctgggactacaggtgcgcggccccaagcccggctaattttttgtgtttttagtagagggggtttcgccttgttgcccaggctggtccgaactcctgagctcaagtgatctgcctgcctcaacctcccaacctgctaggattacaggtatgagccaccctgcctggccagatttaatgaaactttattaatcacttagttttgctaattactatctttccataatgttttgaatacaacgctattgtagttaatacgttgttttgcggttatttgcttacatgtctgtttctgctactgaattgtaaatcccttgaatatagggaaaatatatttgtatccctaccatctgaaaatagtacctgcatagtattagatggttgctaattgcttgtttaatgaataaataaaaggcatggaattaggcaggttgacaattattgattgattttatccttataacctagtgatgtgtagatggcattatttctgttttatagacaaggaaactgaaatgaagtgaagtaaattattccaaagtatttgactgctaagtaa

SEQ ID NO: 112060 - DNA, 113 bp, Homo sapiens
tgtccaaacagattcctcagactaaagactaaatcttgcctgccccaataaaacaaaacaaaacaaaacaaaacaaaatgaaaaaacaaacaaacaaaaaccctgtttcgcct

SEQ ID NO: 112061 - DNA, 978 bp, Homo sapiens
ggggtacatgtgatattttgatacaagcatacaacatataatgatcaatgcataatggtaattgagggtattcatcaccaattactacaaacatttgtcatttctttgtgctgaaaacatcccacatttattcttctagttattttgaaatgtgtcataaattatttttaactatagtagccctattgtgctaccaaacactagatgttattccttctatctaactgtattttgtaactttatccccttacccccactacccttcctagcctctggcagccaccattctattcactacctccacgagatcactttgttttagctcctacatataagtgagaacatgcaacatttgtcttcctgtgcctagaagagacgacagtcttattaattttaaagaaaattatattacaaaaacaaccatgagctaggacgtaaaagcttttggctgagccttgaagcaactcttaggccacccaactcatacaggcaggaggcaggcagcaaaacctctagagccctcaactgccattgcagccacggcagataatagacaagcaaagcttcccagatggcagaagcaggggccccacagaacaatggacgggaaaattcctccctgagaacagaatcaagttctgaccatggcacttctctcactgacaagactacataacagctgtccacaggatttcatcattaccatggaccagtgactactgcatacattgcaattttctgttttctgcctaaggtatttattccagttatccagtcctggtgccaccacccatgtggctggagtagaggaggcagaaaatttgcaactaatctagtaatctaataaataattggtaaccttgcatattaacaggttatagtaaagtgtgaaatattttgcaaaaatattacatatatatatacacacacatatgtacacacatgcaaatattatggataactcttaaatatattttt

SEQ ID NO: 112062 - DNA, 226 bp, Homo sapiens
ctgacaagcataaatatgaagcaaatgttagtaattagatatgatcagtttaaaggatatttatttatacactgttccagacaggatttaaagtgacttacaaagattcataaaacatcaaaaaatatcataaattttaaaaataggatcaaaaagaagaaaaataggagtggagacaaactggtagagtcagtatcaaggctccaaaaccaaagggcaactgagg

SEQ ID NO: 112063 - DNA, 659 bp, Homo sapiens
tacactgttctcagcctcagagtagctgggactacaggtgcccgccaccgtgcccggctaattttttttttatggttagtagagatggggtttcaccagtgttagccaggaccggtctcacatctccgtgacctcggtgatccaccacgccttggcctcccaagagtgctgggattacagacgtgagccaccgcacccggcctgtaataatttcatattaagtatcttttctaatggtagggagtattaagtttcatgctggacgcggaattcttcattataaaatatctgacatcccattatcaaagaaaagcatgtatccaatttccaaaggctcatgtcaaagataatcgattactgcacatcagtttccacttattgaaaatctattgtgtatcattgttagatgccttatatatattcctcttacataagcctcaaagtataaggttaagtattttgcacaaagccagtcatacagaaaaaagcaaaatcaatctacatcaagtctgccatgctcccaagtcagtgcaccatggtattttctccaacagtgcatactcgtaacctaacaaatcttgaggtgggtcctataaaacatatagaacctagctgctgaaaagagctacctgtctgggctgacacatgtgtcaccttca

SEQ ID NO: 112064 - DNA, 350 bp, Homo sapiens
ggttaggaggagcggaaacctcatcactaaggtgaagtggctgaaggaaccaccaagaaatgggagttgaggctgggtgcggtggctcacgcctgtgatcccagcactttgggaggccgaggcaggtggatcatgaggtcaggagattgagaccatcctggttaacacggtgaaacctcatctctactaaaaatacaaaaaattagctgggcatggtggcgggcacctctagtcccagctacttgggaggctgaggcaggagaatggcatgaacccaggagattggagcttgcagtgagccgagatcgcaccactgcactccaacctgggcgacagtgcaaaactccatc

SEQ ID NO: 112065 - DNA, 810 bp, Homo sapiens
caagaacgagaagtcagagttttggaagaatcatctatgtggattctgaaatcaccaagaactatatcagggatagtgttgaggggaagggagtgaatcaggtgctaaaattctctcgggataaggaggagtgacctgaaggtgtgtagatgagtgtgacaattttattacagtctttaaaggcaacagtatatcaaatatgacatagaaccacaaatctggacatagaaccacagcccacctaactgcttcctagacagtatggggaggtcatttatctttgctggcagataaatacaagatctctttcatagatatcagttagtgcagctgcattcaagcaactgctccatatagcaaacagtactcaatatttccaagaggtgcttgagaaactgccaattgtgttgggagaagggggaagggaatggcgggagggagtgtggaagggagttgtctagaggaaaaagagaagcaagtgaaggggttctatgttctctgctctatgtcccacacaacccaagaagctctatatttaattgtttaaatttgggcttttcacttgttgtgtgcaatacacataggacacatccaactctcacagacctttccttgcttatgaagttaggattcaaagagaattccaaacatgttccttacaaatacaatcagtttactgtatggggtttcattatgcaggacaattataagggcgtagagtttaagtcaaaacccatctaaatccacaaaataacggattgggggtctatttaaaataaacttctcgggaattccacttttattgggaac

SEQ ID NO: 112066 - DNA, 533 bp, Homo sapiens
ccgcagcagatgtaatcagtgccatgtaatttatggccattatcatcattgtcgtcattatcatcattgtcatcatcatcatcatcacttcgttcataagggtaagagaatctactcagatcagtgcaaattcatcattcttgtttcaataatgtccttctaagaagaaatacaagttcataattagctgataatcatcctctcttcctggtcactaaggctgtttttgattcacaatagaaattctgaaacaggatcagaaacttgaacctgagtcaaaccagagctaccatgcagagttccggtcataattttggtatacaagtttgaaagtcgaatcaatacaaacaagatgacctgagtactgaatgtgtagaacataagggaaaaaagcaaaacccataattatgttaacattctgtacttgtacagctatttggattgcttttttgtgtttctattctatttttgtttttcttttgaataaaacaaaattcccattcttgtaattaggtatcataggaatattttta

SEQ ID NO: 112067 - DNA, 440 bp, Homo sapiens
gtgagctcactaccttctctgtagaagctccttctatcttctcactgggagagagttgcccgatttatgctttcctcacttggaccccagagcagaccataccagactggagatcacagtccttcgcagttgacagttcccagtgacccctacaagggggaggtaagcctgagcagggccacccaccagacctggtgggacctccttcaactctgctcctgcaggggacatactggggatttggagtcctttcccttgtactcagtttctgcatcttagaggcaaagtagtccagaaaggcagaaaacacatcaagagtctaacacatgcttactccaagccctggcagcctagcgaccctgctctgggacccactctggccacagttttcccatctgtggaataaacaacacaacacctccagtaataacccctctatt

SEQ ID NO: 112068 - DNA, 242 bp, Homo sapiens
ggacacggagggtgcaccagcacccgtccacgtacctgcctgtgtgggggtgttcactcagcgttgtgcacgcctggtctcgtacccctccccccccccccgatggggaggtgctgtcgccatccatgggggacagaagaggaaactgaggctcagcagagttaagtcgcttcccctaggtcacactgccaaaaacagccaaccgaggtctatgccacgagactcaccacgaggaatcatga

SEQ ID NO: 112069 - DNA, 598 bp, Homo sapiens
gctatctatgacaaacccacagccaatatcatactgaatgggcaaaaactggaagcattccctttgaaaactggcacaagacagggatgccctctctcaccactcctattcaacatagtgttggaagttctggccagggcaattagacaggagaaggaaataaagggtattcaattaggaaaagaggaaatcaaattgtccctgtttgcagatgacatgattgtatttctagaaaaccccattgtctaagttttattttgattcacttcttgttgttctgggctttatggtcaagtaatttgttttagaaaactttactgggaggtgacatcagcaacatggtggcacaggagacttctacctctccctccacccatggacacgtggaataaacacctacacatggataaattttctttgagagaaagtcagaaaaagttgagagtctcttacacagcagacaactgagaaaatattcacatcaagcaggtagaaaaagctgaggcacacgcaggcacaaatatcaccctgggtactgcaccataaaccaggaaaaactcccaacacataacttctccctgaggagagaagggtatgg

SEQ ID NO: 112070 - DNA, 161 bp, Homo sapiens
ccgcctggacttgggacagaattctgagaatatgcctggacgggggccccatcagggccagctgggaggggaggagggtgactggcgtctgtctcccctgcccagacagttctgggacgtgaggcgccctttttcccaggctgcaccagctcactgtggaa

SEQ ID NO: 112071 - DNA, 816 bp, Homo sapiens
gtagtaatcctgtgcactctcaccagggcagggagctgtcttgacccccagtggaggctgacaatttttttcctgtgtacactggacccctttcatagaggtgggtgctatgcaagtggagctggtgactgatggctgaccattgatacaggctaggaataccaatgagcaaggtgagcactatgttctcagaggacgacttccagtcaacagaaagagccccatatggtccacaactacagtggtcccaggatctgccaagagtccaggtttttagagaacaggccaacctggaggacaggagtcccaggagaacccagaggatcactggaggagaacaagtgctgtggggccccatcacccagatatttcccacagttcggcctgctgacctaaccagagtcatcatgcctcttgagcaaagaagtcagcactgcaagcctgaggaaggccttcaggcccaagaagaagacctgggcctggtgggtgcacaggctctccaagctgaggagcaggaggctgccttcttctcctctactctgaatgtgggcactctagaggagttgcctgctgctgagtcaccaagtcctccccagagtcctcaggaagagtccttctctcccactgccatggatgccatctttgggagcctatctgatgagggctctggcagccaagaaaaggaggggccaagtaacctcgcctgacctgatagaccctgagtccttttcgcaagatatactacatgaccaagatcactcgactttgggtccatttatggctccgcaagtatccgagtcaacggggctgatcaca

SEQ ID NO: 112072 - DNA, 249 bp, Homo sapiens
ttctgttggtcacccagggactaaacaagtgtgtgtgggtggttctgaacaaacctctgaccattagctgcaaaacaactgaagggacaggtcctagaaatgagagtcagaattattatctgaacgactgaaagagttctctgtgttaatggtaataccttcacttttataagggaatttcctcctgcaacccaagttaatgcatgtagaattttaaagggaatggcttttggtttcagatttctattc

SEQ ID NO: 112073 - DNA, 631 bp, Homo sapiens
  misc_feature (607)..(607): n is a, c, g, or t
  misc_feature (609)..(609): n is a, c, g, or t
  misc_feature (615)..(615): n is a, c, g, or t
agagaattgattcataatgtaatattagagattatgtggtgagattgagagaaagtaaagataatacggttagaagatgggagtcataaatagaagatatgttagatcaaaaaatatgcaaatattccaatatctgaaacacttctcatcccaagcattttggataaggaatactcaacctgtattaacaattctctgaagtcttcagatactgtatctggtctgtcctggtcacaaagcaattcttttagaaacattattctggaagcatgatagcttacaatttaatgccatgatacagtggccactatcaccactgtctgatccttcacaggatgtgtctccgtgtccctctcagccagaaggtttctgattcccacagggatcagtctccatatttacaaattttgatgctttctgaagactgactttacccttgaatttctgctcaaagctttgtgctttttcagttagaggatattgtttgcttagtgaaagtactagcatccaggcctttcttcccaataactggctttcctggttcagggatctagtcttcaagcatgcatgcatgcatatttatttatttgtttgtttgtttgacagngngactcngtctcaaaaaaaaaaa

SEQ ID NO: 112074 - DNA, 311 bp, Homo sapiens
gagtatcacctctatggaactaataaaccttcctagaatccgtttttgaataatgtctggctcacaagaacattttcatcaaataattttaactctttttgccaagagatgtaagcaaatatgtgaaactgatcaagagaagtgaaaagctctgtacagtcaaatagaagttagcaactggcaaattagctcaaggtcagattttaaaaatagaattcagaatcatgacactcagaagtgatttgtaatttcacgagtagagacatcctgatattgcataagggatgttttccttttctaagagcagccct

SEQ ID NO: 112075 - DNA, 993 bp, Homo sapiens
gtgtgtttgtgtgtttaaaagtagacttttttttgaagagcaattttagatttacagcaaaattgagtggaaggggcagagatttctcatgtactccctacccctacacatgcacaattttccccattatcaacctcccccaccagaatggttgttacatctgatgacacattgtaattgcacagccttatcacccaaagcccatagtttacattagggtttactcctggtgttgtatattctatgggtgtgagatacatgtttaaaaatattttgtattagataaattggggataatagtcatttcaagaacaaaatgttggataaattaaattagctaataaacacagagtgctttaaacattcctagtgcaaaataagatcttgttgtttgtggtggtggtggctattcaggcttaaggtctagattccacttagtatgtaagtaaataatagcaatcctggctgtcatctgtatgtgtaatgtagtaatcagttttgtttagctagttcttatgtgtagcacattaaagcaatcttgaatagtgaggggacctcattactagattaccattaaatggtaatgttaagtgaccctgaaaccaaagtaatggaaaattgtcttcctttttttctttttttttttttttcccttgagatggagtcttgcactgtcacccaggctggagtgcagtggctcatggcaacctccacttcttgggttcacgagattctcctgcctcagccacccaagtagctgggattacagatgtacgccaccacacccggctaatttttgtatttttagtagagatgaggtttcaccatgccggccaggctgatctcgaactcctgagctcaagtgacctgcccacctcagcctcccagagtgctgggattacaggcatgagccactgtgcccagcctgtcttcctttttctcaaacatttaatttgctgtttcttgatcacatatcatccttctttcctttca

SEQ ID NO: 112076 - DNA, 194 bp, Homo sapiens
gtatgtggtatgttaggattcccaaattagagttgggttcaaggaaggtatggttgaggaagtgaaatttcaagataagcacaagaatgggagaacagtagtctctcttctctcttttttttttttttttttaaaataaagagacagggggaaaaatccgcccagcggaaggaaaaattgggggacccgggccc

SEQ ID NO: 112077 - DNA, 278 bp, Homo sapiens
cattgcactccagcttggagacagagcgatactccatatcaatcaatcaataaataaaatcaaccagaatttggggctaaccaaaaatgaactacaaagagtaacagatgaacctaactgtattataaatgaataatataaccacagtggaaggagtggaaaaggaaagaactaacccaagtaactttggaagcagtattttggctgtgtactgtaaggctaaagacaaaaagtattgtacagtaagctgtctctatccatgcgttctgtatccatgg

SEQ ID NO: 112078 - DNA, 675 bp, Homo sapiens
ggatcatgcatggatgagactcttttcatgtcagctgacatttatcgcataggagccacatggcatgtcctctgttgtgctctgaagatccaaagaagaaagataaatatattttccccaagttattcagtctgggagaggagacttaaaatgctgcattctaaacttacttttccccaggtggagaattttaatacaggtaagaataaatgcctagtcatattttccctaaaagatgagagaaggaatttttaaagggaggagtagcattgtgaaggcacacagtgacacatggaaacctctttccctcagcagcacggagtgccgccctcttccctacacaaagcagatccctccagagagaagacactgttaactagaaaaaccttgcctgggcgtggtggttcacagctgtaatcccagcactttgggaggctgaggagggtggatcacgaggtcaggagatcgagaccatcctggtcgacatggtgaaacccctaaaaatcatctctactaaaaatacaaaaattagctgcgtgtggtggcgggcgcctgtaatcccagctactcgggaggctgaggcaggagaattgcttgaacccagggggcagagattgcagtgagccagcactccagcctgatgacagagcaagactccgtctcaaaaaaaaaaaa

SEQ ID NO: 112079 - DNA, 838 bp, Homo sapiens
gaacaggagaagctgtctttggctcggctggaaggtgaagggattccagatgccggttcctggcttgctccccgctctccatttggcttcatcctggggctctcttcctccccacagaggggtggtgggcactctgtgccacacctctcctctctgggatctcaggtctgtccctgaaacctgctggtagaagaacctctagagtccttgcctccttcccaccgtgtgaccattgcccattggcacatctgtcaagacacagatttttggaagaaaaaagaaagagtgaatgctgcagagatggattgttaattttccaaatgagatatgactctgagatcccacctacccagctggtaggacgttccaccatgctccctaaggtggtttgagtgtttggaatgacaaagactctctcatcaccctgaaaccttagtccggcggcgcctctgagtcttctgcttgacgaggcctgaccttgggcttccccatgtcctttcagaatccagtttgagcaagaatcctgctaagtcagatggagtctcgctctgtcgcccaggctggagtgcagtggtgcgatctcggctcactacaagctccgcctcctgggttcccactattctcctgcctcagcctcccaagtagctgggactacaggtgtctgccaccacgcccagctaattttttgtatttttagtagagatggggtttcaccgtgtcagccaggatggtctcggtctcctgaccttgtgatccgcctgcctcggcctcccaaagtgctgggattacgggcatgagccacagcgctcagccctaatttttgtatttttagtagaaa

SEQ ID NO: 112080 - DNA, 326 bp, Homo sapiens
cagacctggaaggaaggatgcctgtgccaggggcaggaagtcagtgtccctgaataaaattccgtgtctgaaattaggagctggtacctggagaagaacgtgcaaacctggtggccggctgcgtggtgacatttgtagaatttccagcactcctctacgccaggctggagccagtttctagaaggatatttgggctgttttgtaaacatctaaagcatctcttgagcactctggtttcgtgagaccactttatccttctcccgtttcttaaccacgggcacggaatgttctggacatcccgcctcaggtgccatgtgatgtgtcct

SEQ ID NO: 112081 - DNA, 685 bp, Homo sapiens
catggtggctcacgcctcccagcactttgggaggcccagacgggcagatcacaaggtcaggagttcgagaccagcctgaccaacatggtgaaaccccgtctctactaaaaatacaaaaattagctgggtgtggtggcatgcgcctgtaatcccagctactcggaaggctgaggcaggagaattgcttgaacctgggaggcgaaggttgcagtgagccgagattgcgccattgcactccaggctgggcgacagagcaagactctgtctcaaaaacaaacaaacaaacaaaaaaaacaaaagactttagtgttcaccatggctcgtttgcaagatttcctgcatgtaggaacacgaatgacccagtgcaggccaaaacaaaccagagacctgcattcagcagatccggcccaggaaggcagcaggaagtttccatgggcccatgcttactgcatacttgcctgtgtagtttttgccaatccagtggactttctagaatggaatttaaagataacagcatttcatgggcaaaaaggagggtgctgcttggctgagcatggtggctcacacctgtaatctcagcactttggggaggccaaggcaggtggagcgtctgaggtcaggagttcgagaccagcctggccaacatgttgaaaccccatctctactaaaaatacaaaaattagcc

SEQ ID NO: 112082 - DNA, 347 bp, Homo sapiens
ggtggacctagaaagatcaagaggatttgggccattcagaattagctgggaaatgaaaaaactagggccagttggtggacaagcacccaggctaggtagctggacaatcagtgcctagaaatattggcagaggcagctagttaagggttaaatgcttttctaagaaagataagcataagctacccagtctagtttctcgtagatttctgggtttttttgtttttgttttctttgagatggagtcttgctctgttgcccaggttggagtgcagtgacgcagtcggcaacctctgccttctgggttcaagcgattcctcagcctcctgagtagctgggactacaggtgc

SEQ ID NO: 112083 - DNA, 362 bp, Homo sapiens
atgttagtcaggctggtctcgaactcctgagcttgtgatccgcccactttggcctcccaaagtgctgggattacaggcgtgagccaccgtacctggtggtaagtcctcttggttgtaccctgctgctttcccagggtacactgaggcctggaacatctttgatccttcaccctgaactattgtcctctgacctttgtaggtaaccaaggcctggcctatggtagtggcagaaagatagaataaggtggggttgctaagggattatttttttcctacagtgttctacgtctctgttttcctagtaagtttttattaaggcaagtaggctcttacattgatacactgtaattttgacaagggca

SEQ ID NO: 112084 - DNA, 560 bp, Homo sapiens
ctgtgaagccgtttttcttcttctttttgagactgagtctcactctgtcatccaggctggagtgcagtggtgtgatctcagctcactgcaacctccacctcctgcattcaagtgattctcctgcctcagcctcctgagtagttggaattacaggtgcgcaccaccacgcctggctaatttttgtatttttagtagagacaggattttgccacattgcccaggctagtctcaaactcctgacctcaagtgatccacctgcctcagcctccccaagtgctgggattacaggcgtgagccactgtgccaggtcagcagtttttcttttggcgttgcttgtactgaaagtgttaaatttaagcctggtgtcatgaggagctgagcagaattgttgccatttctacttttttttttttttaatttagttgtgacatacttggctcagctagcacttactgccatttcatcttccttttttttttcatttccattagtagggtttggttatactgtctattttcaaaggctattagaaggcgttagtagcttttcagaccttgtag

SEQ ID NO: 112085 - DNA, 729 bp, Homo sapiens
agaggaggtgcgccggttcatgggtcccggagggcccaagtgagccgctcccagaaacggaatctcactctgttgcccagactggagtgcagtggcatgatcacagctcactgcagcctctacctcttgggctccaacgatcctcctgcctcagactcccaagtcgctgggactacagtcgtgcatcaccatgcctggataatttttaaattttttgttaagacagggtctcactatgttgcctaggctggcctcgaactcttggcctcaagcaatcctcccgcctcagcctccccaggcactgggattacaggtgtgagccactgcacccagcctgacacccctctttggaccagcatgtaccctccccagtgccccccattactgacatttaccttgctgggacccacctattggcttttggattgaattgttcaagaatagaagggcgaggaagagagaaaacagggcgggggagaggtgggaaggaaaaggggaagagccacagaaaccttcagcaagttggctttggctatgggccatcagtttctccccttagcttcccgtagtgtcagggaaatactaccaggcacagaggagccacctcatctttttggattgttgggtcactgtacttctccatgagttgcaaaccctctctgcaattaatctgtaggaccagcttgaccaatggagttgtaatgtttggaatcaactcagtgtgggtga

SEQ ID NO: 112086 - DNA, 289 bp, Homo sapiens
cagtggcaccatgtcagctcaccgcaacctccacctcttaaaaggcttttgatggcaaaatgtgagtctcaatgcaggccctagaataacagccccagcactgtacatccattaattcattaaatcctttggccaggcgtggtggctcatgcctgtaatcccagcactttgggaggccgagttgggcggatcacgaggtcaggagatcgacaccatcctggctaacgcggtgaaacctaaaaatacaaaaaaattagccgggcgtagtggcgggtgcctgtagtcccag

SEQ ID NO: 112087 - DNA, 294 bp, Homo sapiens
ccctgaaatctatatccacaaagcacagttatatctatatactgaaaatccattcaagactctcagaagaaaaagaaatgaaggagttacaaacacagtattaactacagcttatcaaatcaagaactaagaatggttccaccaagtagaccgcccctgctaagaagttttgataaccaagtagcccgtctgcctcaaattatggaaactggccctgaagcttttattctcaacacaacaacttacaaactcaattcataaactatgtggttttggccagggatggtggctcac

SEQ ID NO: 112088 - DNA, 272 bp, Homo sapiens
aacagagcgagactaggtggctgttctgtgtactgtgggatattgagtagcatccctggcctccccagtatctcaaatatgaaaacatgttttctatctcgattactgagcttttcggtgcctccttcggttctgcacctaagctaagagccccttcatctcaccctgatctctatccagtttctaacacagcagtcttgtaagatgcccggacttaaacggttatttcctgtgaaacaggtgaaaggggctttcatctctaaaaagtcgga

SEQ ID NO: 112089 - DNA, 186 bp, Homo sapiens
gcaaaaccccatctttacaaaaaatgccaaaaataaaagccggatatggtgaaatgcgcctgaggctgaggcagggaggatcacgtaagccctccccagcctgagcctgggaggttggggctgcagtgagctgcccctcatagctgccactgtactccagtagtctgggtgacagagtgaaaccct

SEQ ID NO: 112090 - DNA, 238 bp, Homo sapiens
ttttcgatgggcccaacatgttagcaactagaagaaaatactaataactcctaatatacacataaattccaaactgttttgctaaaagtccacaacgagtttctaaacatatacatctgcctttgtaaatagagacattcaacaaatagtcattgtgcactgacttatgtcttctcctcaccaaccacacctccccagggtctcatgatgactaagtaggacagagggaaggagtcta

SEQ ID NO: 112091 - DNA, 408 bp, Homo sapiens
ttaccaaaaaaaaaaaaaaaaaaaaaaaaaaacagaagtattagtgaaattattttaaacctgtatgaggtgataactgcaagtctaggcctcctgttcttcagactggccagctatcaggtgggggttcccacaacccctttcttggattcaacaaatttctagaacggctcacaaaatttagggaaatattttcttatatttactgattattataaaggacacaattcaggaacagccaaatggaagaaatgcacagggcaacggatgggggaatgggtgtggaacttccacgccctctctgggcataccctagagcacctccatgtgttcaccaacccagaagcttccagaaacggtatttttgtttctatgaaggtttcattacataggcataattgactgaat

SEQ ID NO: 112092 - DNA, 386 bp, Homo sapiens
accgctgtaaaccacaactctcaacagggttgcatttgcctcatgtttggggggttgccagagactggttctggcttggtttagtccccttgcttagtgggactccttggaaactctactatcttgcttgtgaaaattctgatgtcctttttctccaagtataaaattggctgatagaaatggaatcatttcagagagactttagcataaatactatcgacttggtgcggtgttgatgaaaatataaattctccttcttaggcttttggtatgtttgtctcaaagagaaaataagtgaccatgaagatcagtagctggtatgaacaaatacctttttatgagacgccacagaatttcctgttctgctaaaacaaggctttgacatt

SEQ ID NO: 112093 - DNA, 231 bp, Homo sapiens
cgatcttagggaagtcctttccctgctgcagaggaggtggagaacccttacatcatggccaggcattgcagcaggtaagggagagagagacaggtagacacagacaagcatcgcagccgggtaagggagagaaaggcaggtagacacagccaggcatcgcagcaggtaagggagagagaagcaggtagatgcagcaggtaagggagagagaggcaggtagacacagccagg

SEQ ID NO: 112094 - DNA, 526 bp, Homo sapiens
atccgatgagtaaatcttggcagtatgataaatgttgcctgtgtcagttaactttcagaatttaccgtgtgtgtgaaatactcatattcattataaataaatggattaatctctatggccctttggctacataaaacaaaaaaatctgccatgtgctcagagttcagaaaaagctattcttgtgtggtaatcttttaacaatcaggtttttaatactctcctttaacacaagactgctaaatgatcagcttctcaaattagtgtatcataacgcatgacagaaaatcattaaatggaatcactaatgaggaaaggcattgctgatttttataccttaatcacttgacattgttcatctttataagagggctaaatattacttactacctctgactaggaatactgttaaattgtattactgtgctgatatgcaagaaattctgtccaaatacagaacttatttaaattattaaaaacatatgggccaggcatggtggctcacgcctgtaatcccagcactttggga

SEQ ID NO: 112095 - DNA, 5283 bp, Homo sapiens
  misc_feature (1277)..(1277): n is a, c, g, or t
  misc_feature (1342)..(1342): n is a, c, g, or t
  misc_feature (1620)..(1620): n is a, c, g, or t
ggcacgagggcagcgcgggccgggccgggacggggactgtcggctgcaggcagccatgcccacgaactttacggtggtgcccgtggaggctcacgccgacggcggcggggacgagactgccgagcggacggaggctccgggcacccccgagggccccgagcccgagcgccccagcccgggagatggaaatccaagagaaaacagcccattcctcaacaatgtcgaggtggaacaagagagcttctttgaagggaagaacatggcacttttcgaggaggagatggacagtaaccccatggtgtcctcgctgctcaacaagctggccaactacaccaacctgagccagggcgtggtggagcacgaggaggacgaggagagccggcggcgggaggccaaggctccgcgcatgggcaccttcatcggcgtctacctgccgtgcctgcagaacatcctgggcgtcatcctcttcctgcgcctgacgtggatcgtgggggtggctggtgtcctggagtccttcctcatcgtggccatgtgctgcacatgtacaatgctgaccgccatttccatgagtgcgatcgctaccaacggtgtggtcccagctggcgggtcctactacatgatatcgcgctcgctgggacccgagtttggaggcgctgtcggcctctgcttctacctgggcacgacgtttgcaggggccatgtatattttggggaccatcgagatttttctgacgtacatctccccgggtgcggccatcttccaggcggaggctgcaggtggcgaggcggccgccatgctgcacaacatgcgtgtgtacggcacgtgcacgctcgtgctcatggccctggtggtcttcgtgggcgtcaagtatgtcaacaagctggcgctggtcttcctggcctgcgtcgtgctgtccatcctggccatctatgccggcgtcatcaagtctgccttcgaccccccggacatcccggtctgcctcctggggaaccgcacgctgtcacggcgcagcttcgatgcctgcgtcaaggcctacggcatccacaacaactcagccacctccgcgctctggggcctcttctgcaacggctcccagcccagcgccgcctgtgacgagtacttcatccagaacaacgtcaccgaaatccagggcatcccgggcgcggccagtggtgtcttcctggagaacctgtggagtacgtacgcgcacgcgggggcgtttgtggagaagaaaggtgtgccctcggtgcccgtggcagaggagagccgtgccagcncactgccctacgtgctcaccgacatcgcggcctccttcaccctgctggttggcatctacttcccntccgtgaccggtatcatggcgggttcaaaccggtccggggacctcaaggatgcacagaagtccatccccacggggaccatcctggccatagtgacgacgtctttcatctatctctcctgcattgtgctgtttggggcctgcattgaaggcgtggtcttacgagataagttcggggaggccctgcaggggaacctggtcatcggcatgctggcctggccctccccctgggtcatcgtcatcggctccttcttctccacctgcggtgccggcctgcagancctcacgggggcaccgcgcctactgcaggccattgcccgtgacggcatcgtccccttcctgcaggtgtttggccacgggaaggccaacggggagcccacgtgggcgctgctgctgacagtcctcatctgcgagactggcatcctcatcgcctctctggacagcgtggccccgatcctctccatgttcttcctcatgtgctacctgttcgtgaacctggcctgcgccgtgcagaccctgctacgtacccccaactggcgtccacgcttcaagttctaccactggaccctgtcctttctgggtatgagcctgtgcctggcgctgatgttcatctgctcctggtactacgcgctgtccgccatgctcatcgctggctgcatctacaagtacatcgagtaccgcggggccgagaaggagtggggcgatggcatccgtggcctatccctgaacgccgcccgctacgccctgctgcgcgtggagcacggtcccccccacaccaagaactggaggccccaggtgctggtgatgctgaacctggacgcggagcaggccgtgaagcacccccgcctgctgtccttcacgtcgcagctgaaggccggcaagggcctgaccatcgtgggctcggtgctggaggggacgtacctggacaagcacatggaggctcagcgggccgaggagaacatacggtccctaatgagcacagagaagaccaagggcttctgccagctggtggtctcgtccagcctgcgggatggcatgtcccacctgatccagtcggccggcctgggcggcctgaagcacaacacggtgctcatggcctggcccgcatcctggaagcaggaggacaaccccttctcctggaagaactttgtagacaccgtccgcgacaccaccgccgcgcaccaggctctgctggtggccaagaacgtcgactcgtttccgcaaaaccaggagcgcttcggcgggggccacatcgacgtgtggtggatcgtgcacgacggcggcatgctcatgctgctgcccttcctgctgcgccagcacaaggtgtggaggaagtgccggatgcgtatcttcaccgtggcccaggtggacgacaacagcatccagatgaagaaggacctgcagatgttcttgtaccacttgcgcatcagcgccgaggtggaggtggtggagatggttgaaaacgacatatctgctttcacctacgagaggacactaatgatggagcagaggtcgcagatgctgaagcagatgcagctgtccaagaacgagcaggagcgagaggcccagctgatccacgacaggaacaccgcgtcccacaccgcggcggcagccaggacccaagcgccgcctacgccagacaaggtgcagatgacctggaccagggagaagctgatcgctgagaagtacaggagcagagacaccagcctatccggtttcaaagacctcttcagcatgaagccggaccagtccaacgtcaggcggatgcacacggctgtgaagctcaatggcgtcgtcctcaacaagtcccaggatgcgcagctggtcctgctcaacatgccaggtcctcccaaaaaccggcagggagacgagaactacatggagtttcttgaagtcctgaccgaggggctgaacagagtcctcctggtcaggggtggcggccgggaggtgatcaccatctactcctaatgcccaacagcatcacggcactctgggacaggcacggaggacggcgtgggcagcctgggcctgggcttggcccagggaaacagacggcagacacacctgtcccccagtgatgccacccaagctgcccatggggcttcctacggaagtttctaggcccgtcacctagggctctcctgttcagccttaacaggctcagcaaatcagggcgtggctggacgatttccttgcatctgagggcagacgctgctaccggagtgacctggacgtggccagatcttctcgcaggtcacaagaagccagtgagcccttgccttggtttctggaagttcttttccttggctggatttacccagtggttaggttgcatttctaccccatccagaacattcttggaagagcacccggagctgaagctgtccctgatgatgaaggtgaaacgtcagccctggccatggctccgctcagggccccggtcacctccgagtcactctgttccttgactgtctttgtgtttctgtacctcaaggcactgaagctggaggactctgtccatgcccgtgtcaccctcgtgtgggagcctctgggctcggcaggtccacatttcatgagctgaggcgtgggccagggccatctggaaagggaactcggcttttccagaacgtggtggatcatctgtcgggtgtgtggtgaacacgttcagttcatcagggcctacgctccgggaaggggcccccagctgtggctctgccatgccgggctgtgtttgcagctgtccgagtctccatccacctttagaaaaccagccacttcttttcataagcactgacagggcccagcccacagccacaggtgcgatcagtgcctcacgcaggcaaatgcactgaaacccaggggcacacgcgcgcagagtgaacagtgagttcccccgacagcccacgacagccaggactgccctccccaccccaccccaccccaggagcacggcacacagttcagcctctgagctggctcacacgtgccatccccaccccggtgctccagggaaggaggacacggacccgacgtgggaggtcctcaggcagcagtggcgcctggtgtcaggtctgtctggctgagtcccgggcgtcccctgccatggcctgtgccttgcatggaggcggcggtggcactgaagagatagctttcaagggcccaacactttgcacttcggctggctgtgagtttctgctttgtaggttgtggtcacatttgcaggctgcgggcagtggcaccgacttgggcctccctttctatgtggcatatttatttatttaaacaccccagggagttacgtggtaacaaggttgtccataaagaggttgcttctatatactagaggccccagatggccaggccttgggctacgtctggcttgcatggtctcccaagggaatcagccccatcaacaaagttcaaatcggggcagaggctgcacttgtgcccccagatgtttctgaggagccagactagggctggcattgctgtagagtgacggctgctgcccagagcgtgtcccagacatcacagcggggctcagcagttcccacagcctctgcctgccttggctaagcatgagttaagcagcaaaacgctcctccatgtctggatggggccggcaggtcctgtgtcccctgcacctggaggagagcaggctagaggcacagcggccacatggtgctggctctgaacgttggttggtggctggaaaacagccctgcttctgagggccgctcagttctgcacacgaaaccacctcctgagggctcagctctgcccccgccctgggctgcagcctctgcacgcaagcaccaggcatcctttgtgttgtcaactccgtgtaaccagtaactacagccatttacaattgactccgtttccttttgtaggtttccctgtctgtctgtgttagtagaaaaataaaatcctatgaaatctga

SEQ ID NO: 112096 - DNA, 327 bp, Homo sapiens
cacccgggggagggggccgcggcggcccaggccgggggcccggcgccgcctgctcgaaccggggagcccttgggggctgcggttgcaggaaccttccctctaccctgcttctgagggccgctcagttctgcacacgaaaccacctcctgagggctcagctctgcccccgccctgggctgcagcctctgcacgcaagcaccaggcatcctttgtgttgtcaactccgtgtaaccagtaactacagccatttacaattgactccgtttccttttgtaggtttccctgtctgtctgtgttagtagaaaaataaaatcctatgaaatctga

SEQ ID NO: 112097 - DNA, 2709 bp, Homo sapiens
cggcgaattcgtggtgctgctcggcgaattcgtggtgctgctcggcgaattcgtggtgctgctgcccttcctgctgcgccagcacaaggtgtggaggaagtgccggatgcgtatcttcaccgtggcccaggtggacgacaacagcatccagatgaagaaggacctgcagatgttcttgtaccacttgcgcatcagcgccgaggtggaggtggtggagatggttgaaaacgacatatctgctttcacctacgagaggacactaatgatggagcagaggtcgcagatgctgaagcagatgcagctgtccaagaacgagcaggagcgagaggcccagctgatccacgacaggaacaccgcgtcccacaccgcggcggcagccaggacccaagcgccgcctacgccagacaaggtgcagatgacctggaccagggagaagctgatcgctgagaagtacaggagcagagacaccagcctatccggtttcaaagacctcttcagcatgaagccggaccagtccaacgtcaggcggatgcacacggctgtgaagctcaatggcgtcgtcctcaacaagtcccaggatgcgcagctggtcctgctcaacatgccaggtcctcccaaaaaccggcagggagacgagaactacatggagtttcttgaagtcctgaccgaggggctgaacagagtcctcctggtcaggggtggcggccgggaggtgatcaccatctactcctaatgcccaacagcatcacggcactctgggacaggcacggaggacggcgtgggcagcctgggcctgggcttggcccagggaaacagacggcagacacacctgtcccccagtgatgccacccaagctgcccatggggcttcctacggaagtttctaggcccgtcacctagggctctcctgttcagccttaacaggctcagcaaatcagggcgtggctggacgatttccttgcatctgagggcagacgctgctaccggagtgacctggacgtggccagatcttctcgcaggtcacaagaagccagtgagcccttgccttggtttctggaagttcttttccttggctggatttacccagtggttaggttgcatttctaccccatccagaacattcttggaagagcacccggagctgaagctgtccctgatgatgaaggtgaaacgtcagccctggccatggctccgctcagggccccggtcacctccgagtcactctgttccttgactgtctttgtgtttctgtacctcaaggcactgaagctggaggactctgtccatgcccgtgtcaccctcgtgtgggagcctctgggctcggcaggtccacatttcatgagctgaggcgtgggccagggccatctggaaagggaactcggcttttccagaacgtggtggatcatctgtcgggtgtgtggtgaacacgttcagttcatcagggcctacgctccgggaaggggcccccagctgtggctctgccatgccgggctgtgtttgcagctgtccgagtctccatccacctttagaaaaccagccacttcttttcataagcactgacagggcccagcccacagccacaggtgcgatcagtgcctcacgcaggcaaatgcactgaaacccaggggcacacgcgcgcagagtgaacagtgagttcccccgacagcccacgacagccaggactgccctccccaccccaccccaccccaggagcacggcacacagttcagcctctgagctggctcacacgtgccatccccaccccggtgctccagggaaggaggacacggacccgacgtgggaggtcctcaggcagcagtggcgcctggtgtcaggtctgtctggctgagtcccgggcgtcccctgccatggcctgtgccttgcatggaggcggcggtggcactgaagagatagctttcaagggcccaacactttgcacttcggctggctgtgagtttctgctttgtaggttgtggtcacatttgcaggctgcgggcagtggcaccgacttgggcctccctttctatgtggcatatttatttatttaaacaccccagggagttacgtggtaacaaggttgtccataaagaggttgcttctatatactagaggccccagatggccaggccttgggctacgtctggcttgcatggtctcccaagggaatcagccccatcaacaaagttcaaatcggggcagaggctgcacttgtgcccccagatgtttctgaggagccagactagggctggcattgctgtagagtgacggctgctgcccagagcgtgtcccagacatcacagcggggctcagcagttcccacagcctctgcctgccttggctaagcatgagttaagcagcaaaacgctcctccatgtctggatggggccggcaggtcctgtgtcccctgcacctggaggagagcaggctagaggcacagcggccacatggtgctggctctgaacgttggttggtggctggaaaacagccctgcttctgagggccgctcagttctgcacacgaaaccacctcctgagggctcagctctgcccccgccctgggctgcagcctctgcacgcaagcaccaggcatcctttgtgttgtcaactccgtgtaaccagtaactacagccatttacaattgactccgtttccttttgtaggtttccctgtctgtctgtgttagtagaaaaataaaatcctatgaaatctga

SEQ ID NO: 112098 - DNA, 1429 bp, Homo sapiens
gtcaaaattaagcgtaactggcggaacctcagaggcattgacaacagggttcgtagaagattcaagggccagatcttgatgagcaacattggttatgcaagcaacaaaaaaacaaagcacatgctgcacagtggcttccggaagttcctggtccacaacgtcaaggagctggaagtgctgctgatgtgcaacaaatcttactgtgccgggctgtgtttgcagctgtccgagtctccatccacctttagaaaaccagccacttcttttcataagcactgacagggcccagcccacagccacaggtgcgatcagtgcctcacgcaggcaaatgcactgaaacccaggggcacacgcgcgcagagtgaacagtgagttcccccgacagcccacgacagccaggactgccctccccaccccaccccaccccaggagcacggcacacagttcagcctctgagctggctcacacgtgccatccccaccccggtgctccagggaaggaggacacggacccgacgtgggaggtcctcaggcagcagtggcgcctggtgtcaggtctgtctggctgagtcccgggcgtcccctgccatggcctgtgccttgcatggaggcggcggtggcactgaagagatagctttcaagggcccaacactttgcacttcggctggctgtgagtttctgctttgtaggttgtggtcacatttgcaggctgcgggcagtggcaccgacttgggcctccctttctatgtggcatatttatttatttaaacaccccagggagttacgtggtaacaaggttgtccataaagaggttgcttctatatactagaggccccagatggccaggccttgggctacgtctggcttgcatggtctcccaagggaatcagccccatcaacaaagttcaaatcggggcagaggctgcacttgtgcccccagatgtttctgaggagccagactagggctggcattgctgtagagtgacggctgctgcccagagcgtgtcccagacatcacagcggggctcagcagttcccacagcctctgcctgccttggctaagcatgagttaagcagcaaaacgctcctccatgtctggatggggccggcaggtcctgtgtcccctgcacctggaggagagcaggctagaggcacagcggccacatggtgctggctctgaacgttggttggtggctggaaaacagccctgcttctgagggccgctcagttctgcacacgaaaccacctcctgagggctcagctctgcccccgccctgggctgcagcctctgcacgcaagcaccaggcatcctttgtgttgtcaactccgtgtaaccagtaactacagccatttacaattgactccgtttccttttgtaggtttccctgtctgtctgtgttagtagaaaaataaaatcctatgaaatctga

SEQ ID NO: 112099 - DNA, 5291 bp, Homo sapiens
  misc_feature (1277)..(1277): n is a, c, g, or t
  misc_feature (1342)..(1342): n is a, c, g, or t
  misc_feature (1620)..(1620): n is a, c, g, or t
ggcacgagggcagcgcgggccgggccgggacggggactgtcggctgcaggcagccatgcccacgaactttacggtggtgcccgtggaggctcacgccgacggcggcggggacgagactgccgagcggacggaggctccgggcacccccgagggccccgagcccgagcgccccagcccgggagatggaaatccaagagaaaacagcccattcctcaacaatgtcgaggtggaacaagagagcttctttgaagggaagaacatggcacttttcgaggaggagatggacagtaaccccatggtgtcctcgctgctcaacaagctggccaactacaccaacctgagccagggcgtggtggagcacgaggaggacgaggagagccggcggcgggaggccaaggctccgcgcatgggcaccttcatcggcgtctacctgccgtgcctgcagaacatcctgggcgtcatcctcttcctgcgcctgacgtggatcgtgggggtggctggtgtcctggagtccttcctcatcgtggccatgtgctgcacatgtacaatgctgaccgccatttccatgagtgcgatcgctaccaacggtgtggtcccagctggcgggtcctactacatgatatcgcgctcgctgggacccgagtttggaggcgctgtcggcctctgcttctacctgggcacgacgtttgcaggggccatgtatattttggggaccatcgagatttttctgacgtacatctccccgggtgcggccatcttccaggcggaggctgcaggtggcgaggcggccgccatgctgcacaacatgcgtgtgtacggcacgtgcacgctcgtgctcatggccctggtggtcttcgtgggcgtcaagtatgtcaacaagctggcgctggtcttcctggcctgcgtcgtgctgtccatcctggccatctatgccggcgtcatcaagtctgccttcgaccccccggacatcccggtctgcctcctggggaaccgcacgctgtcacggcgcagcttcgatgcctgcgtcaaggcctacggcatccacaacaactcagccacctccgcgctctggggcctcttctgcaacggctcccagcccagcgccgcctgtgacgagtacttcatccagaacaacgtcaccgaaatccagggcatcccgggcgcggccagtggtgtcttcctggagaacctgtggagtacgtacgcgcacgcgggggcgtttgtggagaagaaaggtgtgccctcggtgcccgtggcagaggagagccgtgccagcncactgccctacgtgctcaccgacatcgcggcctccttcaccctgctggttggcatctacttcccntccgtgaccggtatcatggcgggttcaaaccggtccggggacctcaaggatgcacagaagtccatccccacggggaccatcctggccatagtgacgacgtctttcatctatctctcctgcattgtgctgtttggggcctgcattgaaggcgtggtcttacgagataagttcggggaggccctgcaggggaacctggtcatcggcatgctggcctggccctccccctgggtcatcgtcatcggctccttcttctccacctgcggtgccggcctgcagancctcacgggggcaccgcgcctactgcaggccattgcccgtgacggcatcgtccccttcctgcaggtgtttggccacgggaaggccaacggggagcccacgtgggcgctgctgctgacagtcctcatctgcgagactggcatcctcatcgcctctctggacagcgtggccccgatcctctccatgttcttcctcatgtgctacctgttcgtgaacctggcctgcgccgtgcagaccctgctacgtacccccaactggcgtccacgcttcaagttctaccactggaccctgtcctttctgggtatgagcctgtgcctggcgctgatgttcatctgctcctggtactacgcgctgtccgccatgctcatcgctggctgcatctacaagtacatcgagtaccgcggggccgagaaggagtggggcgatggcatccgtggcctatccctgaacgccgcccgctacgccctgctgcgcgtggagcacggtcccccccacaccaagaactggaggccccaggtgctggtgatgctgaacctggacgcggagcaggccgtgaagcacccccgcctgctgtccttcacgtcgcagctgaaggccggcaagggcctgaccatcgtgggctcggtgctggaggggacgtacctggacaagcacatggaggctcagcgggccgaggagaacatacggtccctaatgagcacagagaagaccaagggcttctgccagctggtggtctcgtccagcctgcgggatggcatgtcccacctgatccagtcggccggcctgggcggcctgaagcacaacacggtgctcatggcctggcccgcatcctggaagcaggaggacaaccccttctcctggaagaactttgtagacaccgtccgcgacaccaccgccgcgcaccaggctctgctggtggccaagaacgtcgactcgtttccgcaaaaccaggagcgcttcggcgggggccacatcgacgtgtggtggatcgtgcacgacggcggcatgctcatgctgctgcccttcctgctgcgccagcacaaggtgtggaggaagtgccggatgcgtatcttcaccgtggcccaggtggacgacaacagcatccagatgaagaaggacctgcagatgttcttgtaccacttgcgcatcagcgccgaggtggaggtggtggagatggttgaaaacgacatatctgctttcacctacgagaggacactaatgatggagcagaggtcgcagatgctgaagcagatgcagctgtccaagaacgagcaggagcgagaggcccagctgatccacgacaggaacaccgcgtcccacaccgcggcggcagccaggacccaagcgccgcctacgccagacaaggtgcagatgacctggaccagggagaagctgatcgctgagaagtacaggagcagagacaccagcctatccggtttcaaagacctcttcagcatgaagccggaccagtccaacgtcaggcggatgcacacggctgtgaagctcaatggcgtcgtcctcaacaagtcccaggatgcgcagctggtcctgctcaacatgccaggtcctcccaaaaaccggcagggagacgagaactacatggagtttcttgaagtcctgaccgaggggctgaacagagtcctcctggtcaggggtggcggccgggaggtgatcaccatctactcctaatgcccaacagcatcacggcactctgggacaggcacggaggacggcgtgggcagcctgggcctgggcttggcccagggaaacagacggcagacacacctgtcccccagtgatgccacccaagctgcccatggggcttcctacggaagtttctaggcccgtcacctagggctctcctgttcagccttaacaggctcagcaaatcagggcgtggctggacgatttccttgcatctgagggcagacgctgctaccggagtgacctggacgtggccagatcttctcgcaggtcacaagaagccagtgagcccttgccttggtttctggaagttcttttccttggctggatttacccagtggttaggttgcatttctaccccatccagaacattcttggaagagcacccggagctgaagctgtccctgatgatgaaggtgaaacgtcagccctggccatggctccgctcagggccccggtcacctccgagtcactctgttccttgactgtctttgtgtttctgtacctcaaggcactgaagctggaggactctgtccatgcccgtgtcaccctcgtgtgggagcctctgggctcggcaggtccacatttcatgagctgaggcgtgggccagggccatctggaaagggaactcggcttttccagaacgtggtggatcatctgtcgggtgtgtggtgaacacgttcagttcatcagggcctacgctccgggaaggggcccccagctgtggctctgccatgccgggctgtgtttgcagctgtccgagtctccatccacctttagaaaaccagccacttcttttcataagcactgacagggcccagcccacagccacaggtgcgatcagtgcctcacgcaggcaaatgcactgaaacccaggggcacacgcgcgcagagtgaacagtgagttcccccgacagcccacgacagccaggactgccctccccaccccaccccaccccaggagcacggcacacagttcagcctctgagctggctcacacgtgccatccccaccccggtgctccagggaaggaggacacggacccgacgtgggaggtcctcaggcagcagtggcgcctggtgtcaggtctgtctggctgagtcccgggcgtcccctgccatggcctgtgccttgcatggaggcggcggtggcactgaagagatagctttcaagggcccaacactttgcacttcggctggctgtgagtttctgctttgtaggttgtggtcacatttgcaggctgcgggcagtggcaccgacttgggcctccctttctatgtggcatatttatttatttaaacaccccagggagttacgtggtaacaaggttgtccataaagaggttgcttctatatactagaggccccagatggccaggccttgggctacgtctggcttgcatggtctcccaagggaatcagccccatcaacaaagttcaaatcggggcagaggctgcacttgtgcccccagatgtttctgaggagccagactagggctggcattgctgtagagtgacggctgctgcccagagcgtgtcccagacatcacagcggggctcagcagttcccacagcctctgcctgccttggctaagcatgagttaagcagcaaaacgctcctccatgtctggatggggccggcaggtcctgtgtcccctgcacctggaggagagcaggctagaggcacagcggccacatggtgctggctctgaacgttggttggtggctggaaaacagccctgcttctgagggccgctcagttctgcacacgaaaccacctcctgagggctcagctctgcccccgccctgggctgcagcctctgcacgcaagcaccaggcatcctttgtgttgtcaactccgtgtaaccagtaactacagccatttacaattgactccgtttccttttgtaggtttccctgcccccctgttccccaccacctaaaccaataaattggttcttgatatgaaa

SEQ ID NO: 112100 - DNA, 4977 bp, Homo sapiens
  misc_feature (1277)..(1277): n is a, c, g, or t
  misc_feature (1342)..(1342): n is a, c, g, or t
  misc_feature (1620)..(1620): n is a, c, g, or t
ggcacgagggcagcgcgggccgggccgggacggggactgtcggctgcaggcagccatgcccacgaactttacggtggtgcccgtggaggctcacgccgacggcggcggggacgagactgccgagcggacggaggctccgggcacccccgagggccccgagcccgagcgccccagcccgggagatggaaatccaagagaaaacagcccattcctcaacaatgtcgaggtggaacaagagagcttctttgaagggaagaacatggcacttttcgaggaggagatggacagtaaccccatggtgtcctcgctgctcaacaagctggccaactacaccaacctgagccagggcgtggtggagcacgaggaggacgaggagagccggcggcgggaggccaaggctccgcgcatgggcaccttcatcggcgtctacctgccgtgcctgcagaacatcctgggcgtcatcctcttcctgcgcctgacgtggatcgtgggggtggctggtgtcctggagtccttcctcatcgtggccatgtgctgcacatgtacaatgctgaccgccatttccatgagtgcgatcgctaccaacggtgtggtcccagctggcgggtcctactacatgatatcgcgctcgctgggacccgagtttggaggcgctgtcggcctctgcttctacctgggcacgacgtttgcaggggccatgtatattttggggaccatcgagatttttctgacgtacatctccccgggtgcggccatcttccaggcggaggctgcaggtggcgaggcggccgccatgctgcacaacatgcgtgtgtacggcacgtgcacgctcgtgctcatggccctggtggtcttcgtgggcgtcaagtatgtcaacaagctggcgctggtcttcctggcctgcgtcgtgctgtccatcctggccatctatgccggcgtcatcaagtctgccttcgaccccccggacatcccggtctgcctcctggggaaccgcacgctgtcacggcgcagcttcgatgcctgcgtcaaggcctacggcatccacaacaactcagccacctccgcgctctggggcctcttctgcaacggctcccagcccagcgccgcctgtgacgagtacttcatccagaacaacgtcaccgaaatccagggcatcccgggcgcggccagtggtgtcttcctggagaacctgtggagtacgtacgcgcacgcgggggcgtttgtggagaagaaaggtgtgccctcggtgcccgtggcagaggagagccgtgccagcncactgccctacgtgctcaccgacatcgcggcctccttcaccctgctggttggcatctacttcccntccgtgaccggtatcatggcgggttcaaaccggtccggggacctcaaggatgcacagaagtccatccccacggggaccatcctggccatagtgacgacgtctttcatctatctctcctgcattgtgctgtttggggcctgcattgaaggcgtggtcttacgagataagttcggggaggccctgcaggggaacctggtcatcggcatgctggcctggccctccccctgggtcatcgtcatcggctccttcttctccacctgcggtgccggcctgcagancctcacgggggcaccgcgcctactgcaggccattgcccgtgacggcatcgtccccttcctgcaggtgtttggccacgggaaggccaacggggagcccacgtgggcgctgctgctgacagtcctcatctgcgagactggcatcctcatcgcctctctggacagcgtggccccgatcctctccatgttcttcctcatgtgctacctgttcgtgaacctggcctgcgccgtgcagaccctgctacgtacccccaactggcgtccacgcttcaagttctaccactggaccctgtcctttctgggtatgagcctgtgcctggcgctgatgttcatctgctcctggtactacgcgctgtccgccatgctcatcgctggctgcatctacaagtacatcgagtaccgcggggccgagaaggagtggggcgatggcatccgtggcctatccctgaacgccgcccgctacgccctgctgcgcgtggagcacggtcccccccacaccaagaactggaggccccaggtgctggtgatgctgaacctggacgcggagcaggccgtgaagcacccccgcctgctgtccttcacgtcgcagctgaaggccggcaagggcctgaccatcgtgggctcggtgctggaggggacgtacctggacaagcacatggaggctcagcgggccgaggagaacatacggtccctaatgagcacagagaagaccaagggcttctgccagctggtggtctcgtccagcctgcgggatggcatgtcccacctgatccagtcggccggcctgggcggcctgaagcacaacacggtgctcatggcctggcccgcatcctggaagcaggaggacaaccccttctcctggaagaactttgtagacaccgtccgcgacaccaccgccgcgcaccaggctctgctggtggccaagaacgtcgactcgtttccgcaaaaccaggagcgcttcggcgggggccacatcgacgtgtggtggatcgtgcacgacggcggcatgctcatgctgctgcccttcctgctgcgccagcacaaggtgtggaggaagtgccggatgcgtatcttcaccgtggcccaggtggacgacaacagcatccagatgaagaaggacctgcagatgttcttgtaccacttgcgcatcagcgccgaggtggaggtggtggagatggttgaaaacgacatatctgctttcacctacgagaggacactaatgatggagcagaggtcgcagatgctgaagcagatgcagctgtccaagaacgagcaggagcgagaggcccagctgatccacgacaggaacaccgcgtcccacaccgcggcggcagccaggacccaagcgccgcctacgccagacaaggtgcagatgacctggaccagggagaagctgatcgctgagaagtacaggagcagagacaccagcctatccggtttcaaagacctcttcagcatgaagccggaccagtccaacgtcaggcggatgcacacggctgtgaagctcaatggcgtcgtcctcaacaagtcccaggatgcgcagctggtcctgctcaacatgccaggtcctcccaaaaaccggcagggagacgagaactacatggagtttcttgaagtcctgaccgaggggctgaacagagtcctcctggtcaggggtggcggccgggaggtgatcaccatctactcctaatgcccaacagcatcacggcactctgggacaggcacggaggacggcgtgggcagcctgggcctgggcttggcccagggaaacagacggcagacacacctgtcccccagtgatgccacccaagctgcccatggggcttcctacggaagtttctaggcccgtcacctagggctctcctgttcagccttaacaggctcagcaaatcagggcgtggctggacgatttccttgcatctgagggcagacgctgctaccggagtgacctggacgtggccagatcttctcgcaggtcacaagaagccagtgagcccttgccttggtttctggaagttcttttccttggctggatttacccagtggttaggttgcatttctaccccatccagaacattcttggaagagcacccggagctgaagctgtccctgatgatgaaggtgaaacgtcagccctggccatggctccgctcagggccccggtcacctccgagtcactctgttccttgactgtctttgtgtttctgtacctcaaggcactgaagctggaggactctgtccatgcccgtgtcaccctcgtgtgggagcctctgggctcggcaggtccacatttcatgagctgaggcgtgggccagggccatctggaaagggaactcggcttttccagaacgtggtggatcatctgtcgggtgtgtggtgaacacgttcagttcatcagggcctacgctccgggaaggggcccccagctgtggctctgccatgccgggctgtgtttgcagctgtccgagtctccatccacctttagaaaaccagccacttcttttcataagcactgacagggcccagcccacagccacaggtgcgatcagtgcctcacgcaggcaaatgcactgaaacccaggggcacacgcgcgcagagtgaacagtgagttcccccgacagcccacgacagccaggactgccctccccaccccaccccaccccaggagcacggcacacagttcagcctctgagctggctcacacgtgccatccccaccccggtgctccagggaaggaggacacggacccgacgtgggaggtcctcaggcagcagtggcgcctggtgtcaggtctgtctggctgagtcccgggcgtcccctgccatggcctgtgccttgcatggaggcggcggtggcactgaagagatagctttcaagggcccaacactttgcacttcggctggctgtgagtttctgctttgtaggttgtggtcacatttgcaggctgcgggcagtggcaccgacttgggcctccctttctatgtggcatatttatttatttaaacaccccagggagttacgtggtaacaaggttgtccataaagaggttgcttctatatactagaggccccagatggccaggccttgggctacgtctggcttgcatggtctcccaagggaatcagccccatcaacaaagttcaaatcggggcagaggctgcacttgtgcccccagatgtttctgaggagccagactagggctggcattgtgcagcctctgcacgcaagcaccaggcatcctttgtgttgtcaactccgtgtaaccagtaactacagccatttacaattgactccgtttccttttgtaggtttccctgtctgtctgtgttagtagaaaaataaaatcctatgaaatctga

SEQ ID NO: 112101 - DNA, 305 bp, Homo sapiens
agcaccaacctgtcctgtctcccgcagaacatacggtccctaatgagcacagagaagaccaagggcttctgccagctggtggtctcgtccagcctgcgggatggcatgtcccacctgatccagtcggccggcctgggcggcctgaagcacaacacggtgctcatggcctggcccgcatcctggaagcaggaggacaaccccttctcctggaagaactttgtaggtaggcatggctggcggcccttcggcatcccctcaccgtcccctctgtgtcctctcagtgtcccctcgctgtcccctcgctg

SEQ ID NO: 112102 - DNA, 2679 bp, Homo sapiens
ggcacgagggcagcgcgggccgggccgggacggggactgtcggctgcaggcagccatgcccacgaactttacggtggtgcccgtggaggctcacgccgacggcggcggggacgagactgccgagcggacggaggctccgggcacccccgagggccccgagcccgagcgccccagcccgggagatggaaatccaagagaaaacagcccattcctcaacaatgtcgaggtggaacaagagagcttctttgaagggaagaacatggcacttttcgaggaggagatggacagtaaccccatggtgtcctcgctgctcaacaagctggccaactacaccaacctgagccagggcgtggtggagcacgaggaggacgaggagagccggcggcgggaggccaaggctccgcgcatgggcaccttcatcggcgtctacctgccgtgcctgcagaacatcctgggcgtcatcctcttcctgcgcctgacgtggatcgtgggggtggctggtgtcctggagtccttcctcatcgtggccatgtgctgcacatgtacaatgctgaccgccatttccatgagtgcgatcgctaccaacggtgtggtcccagctggcgggtcctactacatgatatcgcgctcgctgggacccgagtttggaggcgctgtcggcctctgcttctacctgggcacgacgtttgcaggggccatgtatattttggggaccatcgagatttttctgacaggcacggaggacggcgtgggcagcctgggcctgggcttggcccagggaaacagacggcagacacacctgtcccccagtgatgccacccaagctgcccatggggcttcctacggaagtttctaggcccgtcacctagggctctcctgttcagccttaacaggctcagcaaatcagggcgtggctggacgatttccttgcatctgagggcagacgctgctaccggagtgacctggacgtggccagatcttctcgcaggtcacaagaagccagtgagcccttgccttggtttctggaagttcttttccttggctggatttacccagtggttaggttgcatttctaccccatccagaacattcttggaagagcacccggagctgaagctgtccctgatgatgaaggtgaaacgtcagccctggccatggctccgctcagggccccggtcacctccgagtcactctgttccttgactgtctttgtgtttctgtacctcaaggcactgaagctggaggactctgtccatgcccgtgtcaccctcgtgtgggagcctctgggctcggcaggtccacatttcatgagctgaggcgtgggccagggccatctggaaagggaactcggcttttccagaacgtggtggatcatctgtcgggtgtgtggtgaacacgttcagttcatcagggcctacgctccgggaaggggcccccagctgtggctctgccatgccgggctgtgtttgcagctgtccgagtctccatccacctttagaaaaccagccacttcttttcataagcactgacagggcccagcccacagccacaggtgcgatcagtgcctcacgcaggcaaatgcactgaaacccaggggcacacgcgcgcagagtgaacagtgagttcccccgacagcccacgacagccaggactgccctccccaccccaccccaccccaggagcacggcacacagttcagcctctgagctggctcacacgtgccatccccaccccggtgctccagggaaggaggacacggacccgacgtgggaggtcctcaggcagcagtggcgcctggtgtcaggtctgtctggctgagtcccgggcgtcccctgccatggcctgtgccttgcatggaggcggcggtggcactgaagagatagctttcaagggcccaacactttgcacttcggctggctgtgagtttctgctttgtaggttgtggtcacatttgcaggctgcgggcagtggcaccgacttgggcctccctttctatgtggcatatttatttatttaaacaccccagggagttacgtggtaacaaggttgtccataaagaggttgcttctatatactagaggccccagatggccaggccttgggctacgtctggcttgcatggtctcccaagggaatcagccccatcaacaaagttcaaatcggggcagaggctgcacttgtgcccccagatgtttctgaggagccagactagggctggcattgctgtagagtgacggctgctgcccagagcgtgtcccagacatcacagcggggctcagcagttcccacagcctctgcctgccttggctaagcatgagttaagcagcaaaacgctcctccatgtctggatggggccggcaggtcctgtgtcccctgcacctggaggagagcaggctagaggcacagcggccacatggtgctggctctgaacgttggttggtggctggaaaacagccctgcttctgagggccgctcagttctgcacacgaaaccacctcctgagggctcagctctgcccccgccctgggctgcagcctctgcacgcaagcaccaggcatcctttgtgttgtcaactccgtgtaaccagtaactacagccatttacaattgactccgtttccttttgtaggtttccctgtctgtctgtgttagtagaaaaataaaatcctatgaaatctga

SEQ ID NO: 112103 - DNA, 1367 bp, Homo sapiens
ccgaaaaaaagaacaaagaaaaaaaaacaaaacaaatccgagccaagtacgaggccccgtggtcatcagagacgagggtgaacacgttcagttcatcagggcctacgctccgggaaggggcccccagctgtggctctgccatgccgggctgtgtttgcagctgtccgagtctccatccacctttagaaaaccagccacttcttttcataagcactgacagggcccagcccacagccacaggtgcgatcagtgcctcacgcaggcaaatgcactgaaacccaggggcacacgcgcgcagagtgaacagtgagttcccccgacagcccacgacagccaggactgccctccccaccccaccccaccccaggagcacggcacacagttcagcctctgagctggctcacacgtgccatccccaccccggtgctccagggaaggaggacacggacccgacgtgggaggtcctcaggcagcagtggcgcctggtgtcaggtctgtctggctgagtcccgggcgtcccctgccatggcctgtgccttgcatggaggcggcggtggcactgaagagatagctttcaagggcccaacactttgcacttcggctggctgtgagtttctgctttgtaggttgtggtcacatttgcaggctgcgggcagtggcaccgacttgggcctccctttctatgtggcatatttatttatttaaacaccccagggagttacgtggtaacaaggttgtccataaagaggttgcttctatatactagaggccccagatggccaggccttgggctacgtctggcttgcatggtctcccaagggaatcagccccatcaacaaagttcaaatcggggcagaggctgcacttgtgcccccagatgtttctgaggagccagactagggctggcattgctgtagagtgacggctgctgcccagagcgtgtcccagacatcacagcggggctcagcagttcccacagcctctgcctgccttggctaagcatgagttaagcagcaaaacgctcctccatgtctggatggggccggcaggtcctgtgtcccctgcacctggaggagagcaggctagaggcacagcggccacatggtgctggctctgaacgttggttggtggctggaaaacagccctgcttctgagggccgctcagttctgcacacgaaaccacctcctgagggctcagctctgcccccgccctgggctgcagcctctgcacgcaagcaccaggcatcctttgtgttgtcaactccgtgtaaccagtaactacagccatttacaattgactccgtttccttttgtaggtttccctgtctgtctgtgttagtagaaaaataaaatcctatgaaatctga

SEQ ID NO: 112104 - DNA, 3632 bp, Homo sapiens
  misc_feature (1277)..(1277): n is a, c, g, or t
  misc_feature (1342)..(1342): n is a, c, g, or t
  misc_feature (1620)..(1620): n is a, c, g, or t
ggcacgagggcagcgcgggccgggccgggacggggactgtcggctgcaggcagccatgcccacgaactttacggtggtgcccgtggaggctcacgccgacggcggcggggacgagactgccgagcggacggaggctccgggcacccccgagggccccgagcccgagcgccccagcccgggagatggaaatccaagagaaaacagcccattcctcaacaatgtcgaggtggaacaagagagcttctttgaagggaagaacatggcacttttcgaggaggagatggacagtaaccccatggtgtcctcgctgctcaacaagctggccaactacaccaacctgagccagggcgtggtggagcacgaggaggacgaggagagccggcggcgggaggccaaggctccgcgcatgggcaccttcatcggcgtctacctgccgtgcctgcagaacatcctgggcgtcatcctcttcctgcgcctgacgtggatcgtgggggtggctggtgtcctggagtccttcctcatcgtggccatgtgctgcacatgtacaatgctgaccgccatttccatgagtgcgatcgctaccaacggtgtggtcccagctggcgggtcctactacatgatatcgcgctcgctgggacccgagtttggaggcgctgtcggcctctgcttctacctgggcacgacgtttgcaggggccatgtatattttggggaccatcgagatttttctgacgtacatctccccgggtgcggccatcttccaggcggaggctgcaggtggcgaggcggccgccatgctgcacaacatgcgtgtgtacggcacgtgcacgctcgtgctcatggccctggtggtcttcgtgggcgtcaagtatgtcaacaagctggcgctggtcttcctggcctgcgtcgtgctgtccatcctggccatctatgccggcgtcatcaagtctgccttcgaccccccggacatcccggtctgcctcctggggaaccgcacgctgtcacggcgcagcttcgatgcctgcgtcaaggcctacggcatccacaacaactcagccacctccgcgctctggggcctcttctgcaacggctcccagcccagcgccgcctgtgacgagtacttcatccagaacaacgtcaccgaaatccagggcatcccgggcgcggccagtggtgtcttcctggagaacctgtggagtacgtacgcgcacgcgggggcgtttgtggagaagaaaggtgtgccctcggtgcccgtggcagaggagagccgtgccagcncactgccctacgtgctcaccgacatcgcggcctccttcaccctgctggttggcatctacttcccntccgtgaccggtatcatggcgggttcaaaccggtccggggacctcaaggatgcacagaagtccatccccacggggaccatcctggccatagtgacgacgtctttcatctatctctcctgcattgtgctgtttggggcctgcattgaaggcgtggtcttacgagataagttcggggaggccctgcaggggaacctggtcatcggcatgctggcctggccctccccctgggtcatcgtcatcggctccttcttctccacctgcggtgccggcctgcagancctcacgggggcaccgcgcctactgcaggccattgcccgtgacggcatcgtccccttcctgcaggtgtttggccacgggaaggccaacggggagcccacgtgggcgctgctgctgacagtcctcatctgcgagactggcatcctcatcgcctctctggacagcgtggccccgatcctctccatgttcttcctcatgtgctacctgttcgtgaacctggcctgcgccgtgcagaccctgctacgtacccccaactggcgtccacgcttcaagttctaccactggaccctgtcctttctgggtatgagcctgtgcctggcgctgatgttcatctgctcctggtactacgcgctgtccgccatgctcatcgctggctgcatctacaagtacatcgagtaccgcggggccgagaaggagtggggcgatggcatccgtggcctatccctgaacgccgcccgctacgccctgctgcgcgtggagcacggtcccccccacaccaagaactggaggccccaggtgctggtgatgctgaacctggacgcggagcaggccgtgaagcacccccgcctgctgtccttcacgtcgcagctgaaggccggcaagggcctgaccatcgtgggctcggtgctggaggggacgtacctggacaagcacatggaggctcagcgggccgaggagaacatacggtccctaatgagcacagagaagaccaagggcttctgccagctggtggtctcgtccagcctgcgggatggcatgtcccacctgatccagtcggccggcctgggcggcctgaagcacaacacggtgctcatggcctggcccgcatcctggaagcaggaggacaaccccttctcctggaagaactttgtagacaccgtccgcgacaccaccgccgcgcaccaggctctgctggtggccaagaacgtcgactcgtttccgcaaaaccaggagcgcttcggcgggggccacatcgacgtgtggtggatcgtgcacgacggcggcatgctcatgctgctgcccttcctgctgcgccagcacaaggtgtggaggaagtgccggatgcgtatcttcaccgtggcccaggtggacgacaacagcatccagatgaagaaggacctgcagatgttcttgtaccacttgcgcatcagcgccgaggtggaggtggtggagatggttgaaaacgacatatctgctttcacctacgagaggacactaatgatggagcagaggtcgcagatgctgaagcagatgcagctgtccaagaacgagcaggagcgagaggcccagctgatccacgacaggaacaccgcgtcccacaccgcggcggcagccaggacccaagcgccgcctacgccaagggagttacgtggtaacaaggttgtccataaagaggttgcttctatatactagaggccccagatggccaggccttgggctacgtctggcttgcatggtctcccaagggaatcagccccatcaacaaagttcaaatcggggcagaggctgcacttgtgcccccagatgtttctgaggagccagactagggctggcattgctgtagagtgacggctgctgcccagagcgtgtcccagacatcacagcggggctcagcagttcccacagcctctgcctgccttggctaagcatgagttaagcagcaaaacgctcctccatgtctggatggggccggcaggtcctgtgtcccctgcacctggaggagagcaggctagaggcacagcggccacatggtgctggctctgaacgttggttggtggctggaaaacagccctgcttctgagggccgctcagttctgcacacgaaaccacctcctgagggctcagctctgcccccgccctgggctgcagcctctgcacgcaagcaccaggcatcctttgtgttgtcaactccgtgtaaccagtaactacagccatttacaattgactccgtttccttttgtaggtttccctgtctgtctgtgttagtagaaaaataaaatcctatgaaatctga

SEQ ID NO: 112105 - DNA, 2944 bp, Homo sapiens
  misc_feature (1277)..(1277): n is a, c, g, or t
  misc_feature (1342)..(1342): n is a, c, g, or t
  misc_feature (1620)..(1620): n is a, c, g, or t
ggcacgagggcagcgcgggccgggccgggacggggactgtcggctgcaggcagccatgcccacgaactttacggtggtgcccgtggaggctcacgccgacggcggcggggacgagactgccgagcggacggaggctccgggcacccccgagggccccgagcccgagcgccccagcccgggagatggaaatccaagagaaaacagcccattcctcaacaatgtcgaggtggaacaagagagcttctttgaagggaagaacatggcacttttcgaggaggagatggacagtaaccccatggtgtcctcgctgctcaacaagctggccaactacaccaacctgagccagggcgtggtggagcacgaggaggacgaggagagccggcggcgggaggccaaggctccgcgcatgggcaccttcatcggcgtctacctgccgtgcctgcagaacatcctgggcgtcatcctcttcctgcgcctgacgtggatcgtgggggtggctggtgtcctggagtccttcctcatcgtggccatgtgctgcacatgtacaatgctgaccgccatttccatgagtgcgatcgctaccaacggtgtggtcccagctggcgggtcctactacatgatatcgcgctcgctgggacccgagtttggaggcgctgtcggcctctgcttctacctgggcacgacgtttgcaggggccatgtatattttggggaccatcgagatttttctgacgtacatctccccgggtgcggccatcttccaggcggaggctgcaggtggcgaggcggccgccatgctgcacaacatgcgtgtgtacggcacgtgcacgctcgtgctcatggccctggtggtcttcgtgggcgtcaagtatgtcaacaagctggcgctggtcttcctggcctgcgtcgtgctgtccatcctggccatctatgccggcgtcatcaagtctgccttcgaccccccggacatcccggtctgcctcctggggaaccgcacgctgtcacggcgcagcttcgatgcctgcgtcaaggcctacggcatccacaacaactcagccacctccgcgctctggggcctcttctgcaacggctcccagcccagcgccgcctgtgacgagtacttcatccagaacaacgtcaccgaaatccagggcatcccgggcgcggccagtggtgtcttcctggagaacctgtggagtacgtacgcgcacgcgggggcgtttgtggagaagaaaggtgtgccctcggtgcccgtggcagaggagagccgtgccagcncactgccctacgtgctcaccgacatcgcggcctccttcaccctgctggttggcatctacttcccntccgtgaccggtatcatggcgggttcaaaccggtccggggacctcaaggatgcacagaagtccatccccacggggaccatcctggccatagtgacgacgtctttcatctatctctcctgcattgtgctgtttggggcctgcattgaaggcgtggtcttacgagataagttcggggaggccctgcaggggaacctggtcatcggcatgctggcctggccctccccctgggtcatcgtcatcggctccttcttctccacctgcggtgccggcctgcagancctcacgggggcaccgcgcctactgcaggccattgcccgtgacggcatcgtccccttcctgcaggtgtttggccacgggaaggccaacggggagcccacgtgggcgctgctgctgacagtcctcatctgcgagactggcatcctcatcgcctctctggacagcgtggccccgatcctctccatgttcttcctcatgtgctacctgttcgtgaacctggcctgcgccgtgcagaccctgctacgtacccccaactggcgtccacgcttcaagttctaccactggaccctgtcctttctgggtatgagcctgtgcctggcgctgatgttcatctgctcctggtactacgcgctgtccgccatgctcatcgctggctgcatctacaagtacatcgagtaccgcggggccgagaaggagtggggcgatggcatccgtggcctatccctgaacgccgcccgctacgccctgctgcgcgtggagcacggtcccccccacaccaagaactggaggccccaggtgctggtgatgctgaacctggacgcggagcaggccgtgaagcacccccgcctgctgtccttcacgtcgcagctgaaggccggcaagggcctgaccatcgtgggctcggtgctggaggggacgtacctggacaagcacatggaggctcagcgggccgaggagaacatacggtccctaatgagcacagagaagaccaagggcttctgccagctggtggtctcgtccagcctgcgggatggcatgtcccacctgatccagtcggccggcctgggcggcctgaagcacaacacggtgctcatggcctggcccgcatcctggaagcaggaggacaaccccttctcctggaagaactttgtagacaccgtccgcgacaccaccgccgcgcaccaggctctgctggtggccaagaacgtcgactcgtttccgcaaaaccaggagcgcttcggcgggggccacatcgacgtgtggtggatcgtgcacgacggcggcatgctcatgctgctgcccttcctgctgcgccagcacaaggtgtggaggaagtgccggatgcgtatcttcaccgtggcccaggtggacgacaacagcatccagatgaagaaggacctgcagatgttcttgtaccacttgcgcatcagcgccgaggtggaggtggtggagatggttgaaaacgacatatctgctttcacctacgagaggacactaatgatggagcagaggtcgcagatgctgaagcagatgcagctgtccaagaacgagcaggagcgagaggcccagctgatccacgatcctaactctgggtacgcgagctcg

SEQ ID NO: 112106 - DNA, 808 bp, Homo sapiens
ggttttctttctttttttaaaaagttgagatattatcagtggtaggctggtaaaatgtccctaaaagaaaaaaagccctgatttgtagcatttgctgattcctacctttactatggctgatttcaagttaccaagaggcgatgaacatggagttggaaagagaagcacagaattggtaagcacaccacttacgtacagtgagatgcacagatttcatttttagttggatgaacggtttattttttttcaaacttatgtgacaccaggtatcaggcacacatggggaagcacagataaataactagttcttacttttcaaaatgtcatagtttagcagactgtttcaatgaacttttaagtagggaaagggctcttacactgagaatagttgattaggtctctctttttccactgagaacaaaataaatgccaagtagatccttaaatacctagattagatatgagagaactgaggtctgtaactggcttatttgatgttaggatgatggattatgatttttaagaccctgtttctaaggatgtcaagttaagcataatagattcttgttttgcttgtgtatgtgttggtatgtgtacatgtctaattatcacctttattgaggtataattcacatacaataaaactcactacatttaagtgtacaatttgttgaattttgacagttatcaaaccctatcacaatagaatatttttgccaaactgagaagtttacttgagttcttttccagttaaactcccaaccctccaggagactgccagtctgatctctttcactatagatgagtt

SEQ ID NO: 112107 - DNA, 669 bp, Homo sapiens
gatgtgatccatagaggatcaataacctgttgtttgaaaaactataagttttttatatatttccatttatatttcctttggcaattaagaacatttaaaagaaagtgctggtggatttcatttgagctaagtagaatgtaggaaattcttctgccatccatatacctcgttctatgtaggcagccacagaccaatgagggaagagtatgtaagttgcagcaagtaaaacagccttgctggagatggacacttattaagacaatctggctgctgggtcagatgccctgtcctacctggagcttctcattccagtgcctaatctgtgaagacttgaacatcctgtgttctaataagaggccttatatactagacatgcaacttttaacagtaacattataaagttggaatttttggggaccattatggctagaaagaccatggaatggagaaaggctagcgttaagatggggaatcctgttttctccccattaatcctgccattgatcctgacaaaattaatcaagggccaattgtaaggcaaaaatatacaacaaataaactaaatggggaaatgagtgaacattaacacacatctattatgtactaggtagtattttgttatttctaaattttcatattcaactaatcttttataacttagaaaaggag

SEQ ID NO: 112108 - DNA, 799 bp, Homo sapiens
gaaatttacactccctcgaacaatgaataagtgttctcttttctctgtatccttgccagtatctgtcatttttctgctttttaataattagccattatgaatggtataaaatggtacttcattgcgatttttaattggaatttctctgatcattggcaatgtttaacattttttacatgcttcttggcaatcattgtcttctatttgaaaaatatctgttctcattctttgcctgctttatagtgaggttacttgttttattcttgttgtttgatttccttgtatattgtagacattagttctttgtcacatgtatagttcacaaacatttttctcatttcatgggttgtctgctcacctgctaattaaaagctccttttcaggaactttttagtttaattaagttccatttgtctatttttgttattgctacatctgcttttgagatcttggtcatgaattatttgcccaggccaatgtccagaagcatttatcattgggtttcttctagaatttttatcatttcaggtctaacattttagtcttttaatccatgttgagttgatttttttacatggtgagagtcacgggttccatttcatacttctgcatgtggtaatataatttttcaagcacaacatgttgaatagaatgtcatttttccatgtatgcttttattgattttgtaaatgatcagtacgtggctttatttctaggttctctattctcttacattgatctgggtgtctatttgtatcagtaccatgttgtgttggttattcaagctttctagtataat

SEQ ID NO: 112109 - DNA, 273 bp, Homo sapiens
gagtaggcaaagatcagatcctaggcagtctgattctggaggcttttctcttaaacatgctgtcttgggtactggatggatgtagtgacattagttagaattgaaaacagggagaggattaaagagaataggagattaaagggaaatatgagtttaattttggacatatttctagattcttgtgggaaattctgatagatagaataatggtcagccgggcacggtggctcacgcctgtaatcccagcactttgggaggccgaggctggtggat

SEQ ID NO: 112110 - DNA, 696 bp, Homo sapiens
gtccgggttcccagaggtcgtaaaagagagtttataaaattagggagtctggctgggcatggtggctcacccctgtaatcccagcactttgggaggctgaggcaggcagatcacctgaggtcaggagttcaagaccagcctcgccaacatggtgaaaccccatctctactaaaaatacaagaaaattagccgggcatggtagcgggcgcctgtaatcccagctactcaggaggctgaggcaggagaattgcttgaacctgggaggtagaggctgcagtgagctgaggtcacaccattgccactctagccagagcaacagaacaagactctctctagaaaaaaaaaaaatagggagtctatattcccctgtctcctgtttaattgcccagggcccaccctttgtcttctacacccaggctccttccaaatgtacctttcctcggggggttatctaggtcaaggttcctcaaatattttttaatttaattttttaaaattttaattgtctgtaatcctagcactttgggaggctgaggcgggcggatcatgaggtcaggagattgagaccaacctggccaacagggtgaaaccccatctctactaaaaatacaaaaattagctgagcgtggtggcacgtgcctgtaatcccagctactcgggaggctgaggcaggagaatcgcttgaaccagggagtc

SEQ ID NO: 112111 - DNA, 359 bp, Homo sapiens
tcattcagatccagcaatcccacttctgggtattgttaaacaaaaattatgggaggccgttgttttggactgagctcctacactaggtcccaacagaccagaccaaaccaaactggaattactcatgctatgccacataaccaaacggaaacttcaaggtaggagatagatcccaaaacagatcagtttttttctgaaaatgggagattacagtcttcctgagccagtgtaataaggaagtcccctgtgctttaacccttaccagaaagtaaccgaagtaacctgatgttaaataaaataaaagccaatcaaatctataactaaacttcttgtaattttgtcttttggtagttctggtg

SEQ ID NO: 112112 - DNA, 450 bp, Homo sapiens
gatggtacagtaaccagagagacagaactctaagaaagaatcaaaataaaatggtggaaatgttagaagcatttttacacaagtagaaaaagcctttgatgtgctcatcagtagaatcgacacagccaaggtaagaactagtgagcttgaatataaatctatagaaacttcccaaattgaaattaaaaaaaaaaaaaaaaaagaataaaaacaaaagaccagaacatccaagaactgtgagacaaatttagggatataacataagatgtaactagagtaaaagaaggaaaaataaagacaaaagagagcaaaataaatgtttgaaataataatttcaaactttccaaaattagtgaaaaacaccaaaccatggattcagtaatttcagagaatgtctaaccaaataaatacaaacaaataaacaaaactatatcgaggtataggacattc

SEQ ID NO: 112113 - DNA, 813 bp, Homo sapiens
gatacaaaatgtctcctttggcccagattacagtttgcttttaagtggtagtatatttcaggctattatgcagtgcagaatattagctttaatatcacgtttaagaaaaggaagaagggattccttaagacagtagaacctcattaagccctatagacagtttgggattgttcttgatgctttaccattcataccaatttaagaatgtgaaaaccgtaatggggcatgcgtggctttaggaccaggcagcccaggcgagctgcgtgtgcattattgaagtggcctatctcctttcaattgttgggttcagtttcagggaaaggagagcttccccctcccaggctatataaaaaggtaattgctccaggggaaagatagagacctcccccttccttcccagaggttcttcttgaaatgtaaatgccgagtctgcaaaccacgggaacccagaagttgtaacagatggttttgcatgcagttgccttgtgaacaaagattcctcagctaatacagcaataatgtagtacttaggggcagtgaatccccgggtgggggggcggattggggattggtatctcgagacaattgcaactcctctaggggccccattgtctctggcagcatcctcattggtagggctttgtttttacttttattcagttggtgattaaatttcccataggttttttttctttctttcttctttttgagtagtcaggaatttcaccctttcataaaaatgttcccttgggtggagcaagttaataaacaaactttgctgcttgtctcgcctcgattcttggtcttccttga

SEQ ID NO: 112114 - DNA, 1071 bp, Homo sapiens
ctaggtgaggacaggcatttcctgcccaactgttgcatttcccaagaccaccctggcctgccatgcccccatcttgtgcctataaaaactcccaagaccctagcaggcagactagaggcagctgagctggacgtcgagaggaacacactgacactggcacacctgcaggccaccgaccggcagaagcagaacgacacaaatttggtagggacagttagaggagagtccaggctgctgatcagccagacttcaggggaaaaccatctcccttctggctcccccatctgctgagagctactcccattcagtaaaaccttgcactcattctccaagcctcggtgtgatctgattcttctggtacatcaaggcaagaacccagggtacagaaagccctccgtctttgcagaagataaagggtctaactgagcttacgcaagccgactacggatggctaaactaaaagagcaccctgtaacacacacccactggggcttcaggagctgtaaacattcacccctagacactgtcatggggtcggagcccaacaacctgcccatctgcatgctcccctagaggtctgagcagcgggacaatgaagaagcgagccacatctgcatcgcacaccctgcgagggggacaagggaacttttcctgtttcgacgggacaggaagtgttacaggccaccatctttaattagaaaggcagtgagtgccaaaaaacaaggaatgcaagattcagactaaaaatgtgtctcattcgctaggataattgtgccaactttcgttataggaagccaaaagatcctatcagggtagttatcagatcattaattttgtgtcacatacaacctgtattgttacctttaagaacttcctgtatcctcggcttcaaatatttcagaaagtggtcaggtgtagtacagagatctggggcaatcattgcatgttggagtcccggattccaagggcttttgggaacagatttgtgagaaaagagtgaaaaggaagcaagcaggaggatgtttatttttaataaagggaccctgccctaacttcctgaactaaaaccag

SEQ ID NO: 112115 - DNA, 605 bp, Homo sapiens
gtcgtgagagggtggagggtgctggggggatctgaaggaatcagggcttaggaagctgctggagctttggagagcgctgtttagaggtaacaatgagtgtgaaggtaattttcagggaattaaaaatatactttcaggaaataagcgctgaagggagaacaatagggtcaagtgttgctttttaaaaataggatgaaattgtgtctgttttaaggtaaactgagagaaccaatgaaagaggaaaagttaaagatgctagaaacaaaggggatcagtgagggaacaagaacagggcatctagaggataagtgtttgaaggaatagataaaaagtagtctcaaaaatgaggaagctttttactttgagcgatgaaaacagtttttatctttttagcaaagttgtagttaggatcttctgtctgtttttaggggtctccactggtattaaaggcctgaagaaagtatggcgggaaccaacaagaaaaaaaaattgtcaagcagtaatgagagaccaggtggaaatatggagaataatctgtaatagccagtcagtattctgtggtccaagagcaaaaagggaattgagaattcagagttgaccccatt

SEQ ID NO: 112116 - DNA, 711 bp, Homo sapiens
aagtgagatcatacaggatttgtctttctgtgtctggcttatttcacttagtataatgccctccagccacatctgtattgttgcaaatggcaggattttccccttttaaaaaatttttaattaaatttttatttttatttaaaagaaataggaggtctcagtgtgttgcttagactggtctcgaacttctgggctcaagtgatcctcccaccttggccttccaaagtgctgagattgcagatgtgagccaccatgcctggcctgagccactgtgcctggtcccctttttattgttgaataatattccattgtgtctatatcacatttttttatcaatttatccatcgatggacaattaggttgtttcacccagcctggatgacagagtgagactctctaagaaaaaaaaaattgaaaaatcgaaaaacagaaaaatgaaatggaaagtaatcagtattgttaaggatgtggataaattggagccctcatatattgctagtgtagccactgtgaaaaatttcactagttctttgaaaggttaaacatataattaaccgtatgacccagtaattctgcccctaactatgtacccaagagaaataaaaacacaatatgtctttacggaaacttgcatatgaatgtctgcaacagccaaaaggtggtggtaacctaaaagttcattaactgatgaatagagaaacaaaatgtggt

SEQ ID NO: 112117 - DNA, 665 bp, Homo sapiens
ttctctttcacaggctagaaatctataatggaaacggagttaataattggtatatagaattacatttcattaaacttacacataatcttaaatactaaaatgtgtattagaacaaaatgagaagctgtgttctgtagaaatttcctgtcaagatgtctagacttgtaattatgaattctatttctatggttggaaataaacaggtataatcaagaaattatcgcacctcaaggtgaaaaggtatacaagtgatttagagcttagtcaaaatttcagttgaatttcttcctatattaaaaaaataataattccctcttctttcccaccttccttttatcctaaatctacataacccaatgacagggactagtagacaaacagatctgtcacctttgcaccctctataaacctttatcactggagcatgtgcataaaaacgtccttggctcctgctctgaaactcaaaggacagctgcctttctgccaatgccaggatgttaccaacacttcttagcctgagtccctttcctctaccccgaaggctccttgactcctacagaagtctgcctctttccctaggtgtttaagttactattattgctctgttaggtggataatgccatgtgctagtttctcttatccctcatccctcccctgttctgtga

SEQ ID NO: 112118 - DNA, 149 bp, Homo sapiens
tctgataggggcctgtcgatagcatcccaggctgtttttcactagcgagaagaaaaatacctgcagtggttatgactggaaaggtaataagcagaggtcagcccagcccctagaaacacaactttgattaatgttttcagagggcccca

SEQ ID NO: 112119 - DNA, 301 bp, Homo sapiens
cacatgggctctgtacctcaagagataaagaccagccccacctaagtggccctgcccaggatcaccagccctgataacaagactagctgggcacccgggccagccttcacctgctctggtcccagctgcccttgcttgggagagctgtggggcctggcaggggaggggtgaggttctgtccatggacttctgcctctgaatcctcactagttctgcctgtttgggagtctccagttgtagattgcaggaagcagagcacagggctatttgactgcttttagatgcattttttttttttaat

SEQ ID NO: 112120 - DNA, 207 bp, Homo sapiens
gctgtttcttgagttccttggctcatgcctctatgctaacttctcagcccaatttacattctaagaggtcatttctttcatgaattgcctttcataatctctttgggttaggatagttagatactccttaaataccctgaataagttttattaccatactcaacaggttattttataattatttgatggtgtcctgactagagtgtg

SEQ ID NO: 112121 - DNA, 585 bp, Homo sapiens
gatgaaaatgagaccagttatctttaagaacggtctgtttagggactggtgcaaaggatgaactgcacattgttgaagaagaggcaatgaattacaaaggcagtccaattaaagttaacactggcaactttgaaaatgtctgtacagccaaagctttcccttgggggctttgaaataacaccaccagcgctcttacagttgaagtgtgattcagggccagtgcatattagtggacagcacttagtagctgtggaggaagatgcagagtcagaagatgaagaggaggagaatgtgaaactcttaagtatatctggaaagcagttggtccctggaagtggtagcaagtttccacagaaaaaggtaaaacttgttgctgatgaagatgatgatgatgatgatgattttgatgatgaggaaactgaagaaaaagcaccagtgaagaaatctatacaagatactacagccaaaaatgcacacaagtcaaatcagaatggaaaagactcaaaaccatcatcaacaccaagataaaaaggacaagaatccttcaaaaaacaggaaaaaactcctaaaacaccaaagggacct

SEQ ID NO: 112122 - DNA, 320 bp, Homo sapiens
ctgaggtagaaatggtataatacaaaactttatttcatgcactgttttctaactaactgaagatgttcctaattgactgcttttgtacttttttgcaagcttccatagtgaccgtaatgcaccttgtcaatgctgtggttgacacggtgagcacagaaggtacagttgtaagtgctcgtgcttgtgtctgtgtcttgcagcagccgtgtcgtagagctcggccgcattgctattgcaatggtaggaaaaaacagtttgtggttttgagggggttgagtccttttattttatgcaggtgtgtatatacgtaatatgagtgc

SEQ ID NO: 112123 - DNA, 396 bp, Homo sapiens
tactagggaagatagataatgaaaaaattgtaacttttttcaaatagtgaagagaccagaaaaacatgcaaagtgagtgaagcaattgaggaagggctatgaaaaaaaccctactcaggtacaggggttcaaggaaactttcttagaggataaacaagactgaaagggtgagaggaagccagccatgcaaagaccgggaggaagttcattccagacagaagaaaccgcaggagtattcgctgagaagtgaggaaaagtgtggcgttttctaggaactgaaggaagacaaacacagctgggttataatgaatgaatggaagggtagaccaaaattgaagaggcagacaagaacaaggtcatatggatcttgtagaccctggtgaggaagtcgatttt

SEQ ID NO: 112124 - DNA, 179 bp, Homo sapiens
agggaggttacagcaatgctcccagaactcagtccagagagagaagagtgagtgaaggggagaaagaatgctgctgcccgggaccaggcatggtggctcacgcctataatcccaacactttggaaggctggtctcgaactcctgatctcaggtaatccacctgcctcagccttccaaag

SEQ ID NO: 112125 - DNA, 359 bp, Homo sapiens
gcgtgagctaccacacccggcctcttttgtatcttttaatctgttagttctgtcttccttttttcccttcctattgaagaagcagttgttcgtccctgtagaattccccaccttctcaatgttgctgatggcatctctgtggtagtggttagcatgttcctttatcccttgtttctcctgtaaacttaaagtctatgcatttaaccactactccagctgcctagtgaaagggaggagatgacagcacagcacccagggaacctctgagacctgctttgcttcctttcctcttccttttctggtcatttcctctcctgaactcactgtttttccttccggcccagacaccatgtttgcca

SEQ ID NO: 112126 - DNA, 207 bp, Homo sapiens
ctcgttttctaaatgatggatttaaaatgtcctgctaattaaactcaaactcgtctattgtgttctatattgcatctcttactaacaaaggaagcacaatagatacacattcatatgtgtctttgaatcaaaaagtgtgctgtatgtttactactttctgggcactgtttcttccataatgttattaataatagttctaataatagt

SEQ ID NO: 112127 - DNA, 170 bp, Homo sapiens
caatttaggttttctaaagtctcttataaagtatattaaagttttacactacggaagaatttcaaatatttttatgtaaatcaaaattaaattattaacccttttttttttaacttttgagaacagcaaaaatagctttcaattagagagtgcttcctgtactccaggca

SEQ ID NO: 112128 - DNA, 458 bp, Homo sapiens
ccatatcacttacaaacagaaaacttatgcttaagttgtttagtcagtttctgtgggcgggcatcaggaattagaaaaaagattcaaagataaggattgtacttctgtcacccatatggccttggggtacttgtcctctttgggtaactatctgtatgacattgaacaaagtacttagaatttccaggcattgatttctacgactgtaaaatgaggtaccaggttagatgatgggtatcctcaatattcttctattctgaaaagagtcttaaatttggatctagcttaggaaggtctaaatataatgttaaggcccctccgcactagactgtaagtttctggaaccaacttttaatctactctgtattcccaatgttctggggtaccttccacataagaggtacttaaccttttcttgaatgaataaataaagctggagaattaggcccacttgtcca

SEQ ID NO: 112129 - DNA, 303 bp, Homo sapiens
ctgtccgtggtgctgaaatgagatttacccaagagctgtactgaagatgaagatactgcagtgacctttagtagggaagatgtaatgacagtatctctataagccttaatgttttgttccaagggtaatttcttacacaacacaataaacgggtactgcttttcaagggaaataatacaccacattctctctctttctctcctactttcccaatcccatatacaagcagaacaactgttcctctgtctcacttgcgttctgctgggaaaataaagtcaagggtggtatagatcaaataatttt

SEQ ID NO: 112130 - DNA, 310 bp, Homo sapiens
taataacccagaatccctggatgccacaaatagataagcattctgctcatggtgcgctgatctacatctgcaactttatacaagttaacattttagactcctttttgccaacctagttttccaccttcttaacctttctccaagaatcttatcttgactaaatctgccactcctagctttaatttatcttctttctttctgtattgcactgtctctctaagtcataaatgcagcttaaccacttgttctgcatccctgtttttcctccctttgttgcatttctttcccattagaatggggaaatcagaga

SEQ ID NO: 112131 - DNA, 268 bp, Homo sapiens
ctagagcctccaaagggatcatggccctgatgataccttaatttcagacttctggcctccagagctgtgagagaataaattgttgttgcatttaagccacacagtttgcggtaatttgttgtggcagccccaggagactaaggcaccacctcagcgtatgcaggctggcctgacttccagctgccagaaactgcatttctttaccccaggcttcctctggctgccaagacctactctgcccacttattgaacaagctaggctgattgt

SEQ ID NO: 112132 - DNA, 428 bp, Homo sapiens
aggtcctcagacccgagctttgttttctgtgtaactaagggccgtaaccaacgtctcctccaatttcactctttgaataaacgtgtgtcttcaatccttgcagcgggggggatgtctgccgtcctgagcctaggatcagtctagtgcaattcttagaagttgatccaattacatagaaataaccagtgaatagattgtttctggagagaaaatggacaggtcagaagtgatggagccgctgtggagctcccccggccctagtcacggccgcgataccagcggatcactgggcgggaggccgtgtctctagtcctcagtctcgcgtgtgcagagacggaggtcgggtttcttttccgggctggaaaacaggagaggaggggctcctgcgagagtgagggaggcagcgctataatttggttctcttgcga

SEQ ID NO: 112133 - DNA, 410 bp, Homo sapiens
agcaatcagcccaccttagcttcccaaagtgctagaattacaagcatgagctaccacctgtaacttttttttttttaatactttaagttctgggatacatgtgcagaacgtgcaggtttgttacataggtatacatgtaccatggtggtttgctgcacccatcaaccaacccgtcacctacgttaggtatttttcctaatgctatccctcctctagccccgccatccccagacaggccccagtgtgtgatgttctcctccctgtgtccatgtggtctcattcaactcccccttgtgactgagaacatgcagtatttgggatacaaagtcaatgtgcaaaaatcacaagcattccaacacaccaataatagacaaacagccaaaacatgagtgaactcccattcacaattg

SEQ ID NO: 112134 - DNA, 493 bp, Homo sapiens
  misc_feature (276)..(276): n is a, c, g, or t
gtatgagctttattcacttcctcttcctctcgtttgagtgctgaaagaatgtggctgatgtctatagactagaaaaatctaggagaatatgattcattgtctaaccccatcaaggggttacatattttaaataagacgtcatttctcctcttcactccagcatctcctccttcaaaggcatttttcaccctcttgaaattaatacgctctattcgctcttttcacctaaaaaaaggtcaatcgtcgctctgagaaacaacagtgagatgcaaaatnagggtaaaatggcattgaaatgaatccctttgaaaaagtaagcggtttgctttatcagttaatggtctcatcagcgcttcagtttcctcttctgcaaaaatcagtctgttgaactagagcatatcaaaggttccttctagtgttttgattctaggacctctaaattcatgcaggctgcataatgcaaatttaacctgattaaagccttatttctcat

SEQ ID NO: 112135 - DNA, 370 bp, Homo sapiens
gggtaatctcttttggaatcatatgtttcatgttcccattggaccttgggttcaaaagcataaataaacatttagaaggagtgtttgcctcaaggtaggaccgaggcctgctggctgagtgcaccctggggaagagcttgggctgcctgacctcacgcttcattggatttccctctctaggcacagccaggagcacagcaaaactggaagggagaaacagggtgctggccaatttcatctttcccatgaaaaagttaatgacattcccactaaatgcgctttaacaccagtcagaggataatagggctggcaaagcattcgctctttttcctaaagagagtggaagaccctagtatcttaaaaaacaaaa

SEQ ID NO: 112136 - DNA, 526 bp, Homo sapiens
cgtggcccctgtgctgaatcaggtgtctcagggctcagcatggtatcccatcccatcctcctctgtccctcatcacaatttattgggccctccgtgtacagacctgtctaggtgctggagggggtcagaggtgaaacaaggcctgggtggggagggggctccctgagtggatggagagccctgggccaacacccagtgggacaactcctctgtgaaccactctctggtttaggagagggacgggtcagacgaggccaaggttgcaggggccgctgggctagttacctggagggtctcctggggcatcccaggctcccttctgattgggaccagccactttccagtctgtgcttcagcttcttcagtgctaacccagagctagtcattctgatttccaggaaggctgaaaatttaatcatagaatccctggagaggactgcctatagtatccacttacggcaggggctccctaagtggtggctggaattgtgtgctgtgtgcacccacccctcacctgccagccctt

SEQ ID NO: 112137 - DNA, 104 bp, Homo sapiens
atgaatggagcatattaatgtctcttctgtggatatgattgattctcccccttccttagtgttgtcttcaagcaaatatagttggaccgacactgagtttgatg

SEQ ID NO: 112138 - DNA, 453 bp, Homo sapiens
ttagttgtctttacagcactgaccatgggaatcacctcatccatgtatctgtttaccttctgtcatgcactagcatataaactccatgcaggcagggagtctgtctgtcccagccaccatgctagcccgtgatcccactgatccccagagcctggaacgatgactggcatatggcagcattcattaaatagttgctgaatgaatgaagaaatgtcataaagaacttgacaccatgcctggtcacatataagatgattaaaaactgttcattgatgataataataatattaccagtattattactgcatttcacaggtaagaatatgcaaaccccaagagggcaactgactcactcaggtcaaactctacgtctgatgtctatgacttctatgacacctcccattccatgggcacagaataacagaattcacccaccgcagcaggaacctgaaa

SEQ ID NO: 112139 - DNA, 125 bp, Homo sapiens
gagcggccagaagtgactttgctggcctcttgccatgaggctgcaggaaacagagtcctcgctgtgctgtgcggccttccccagcacacctccacccttgttccctcctggttcaggcccttcct

SEQ ID NO: 112140 - DNA, 346 bp, Homo sapiens
actgcactccagcctgggtgacagagcaagactctgtctcaaacaaacaaaaccaagaaacaaaaaacatttacctgcaattctccactcttgaaaaaatagcccttccgcatgggtcacctccttcactgctctgaagtctgtccttttaacccaccccaaatcttcctgtttgacccatcaagtctcagagacagccttcactcatgccaagcatgggcagtcaccttgcaaagcactcagggtccacattttggcagcagtcattaacgatcgaccagttcaattgtttgcggtcagtttgtggcagtttcggccgggcgtggtggctcacaccggtaatccc

SEQ ID NO: 112141 - DNA, 320 bp, Homo sapiens
aatcatttaagactttgagggactgttgggatggtgtgattggttttgaaatgtgaggacatgaaatttgggaggggccatgggtggaatgatagggtttggttgtgtccccacccaaatctcatcctgaattcccatgcgttgtgggagggacccagtgggaggtaactgaatcatggggacaggtcttacccgtgctgttcttgtgatagtgaataagtctaacaggatctgatggctctataagggggagtttctctgcacaagctgtctttgtctttgcctgccatccacgtaagacgtgacttgctcctcattgc

SEQ ID NO: 112142 - DNA, 357 bp, Homo sapiens
aagacgtcatttattgaaagattagaatgaactgatactgctaatttcatttagtcctcatacaaatctaggaaatagggcctcttatagtccccattatgcagtaatgaaactggcacttagattgtcaattgccaaaggctacacagccagttagtggtggagcttggacttgaagccagtatctgaaaccaccattagtatgtgcctcccatagaaagaagacaaaaaatataaagtagttgtttgaaaagaagacgactgtcagtcattttaagttttgaagaggtgtggcttgagatagttggaaatactgaatgcataaacaggtcctgaagggcagcctgtttaattttt

SEQ ID NO: 112143 - DNA, 360 bp, Homo sapiens
gccaaaggatttctcagttcctttcacactgaggttgcaataaattctggtgcacactgcctggggagaggctctgatagcatggcgcttgtgtgcaagtcaccagcttggctgggaatgaaagaacctcagttcatcctttgtccacaatgactagccatccctgactctcaaaatttatgttttaagaagagttagtcccacaactcttcttaaatacctcccaagaacagttttcaaatgtagtgtgagttattaaagaatgaataaaaatctcataggaagaaataaggtgcagtacacaattaaaaatcatgcccataaacactgtgtaattagggacttctcaaactggaagat

SEQ ID NO: 112144 - DNA, 650 bp, Homo sapiens
acctgctgccgccccagctgctgcatttctagttgctgcaggccttcctgctgtatctctagctgttgcaaacccagctgctgccagaccacctgctgccgccccagctgctgtatctccagctgctacaggccccagtgctgccagccctcctgctgccgcccggcttgctgcatttctagttgctgtcatcccagctgctgtgtgtccagctgccgctgccctttcagctgcccgaccacctgctgtagaacaacctgcttccaccccatctgctgcggcagttcttgctgctgagtgaagctgctctggatttgtgcaccttcttgctctcaaccttcagttcaggcacagagtatctattcagagaacatgtggacttcctgatgtcgtgaaaacagaggcatggactgatttggaaaatattttattagtatgtattctcttttatagaagtttttattcctattgaatctgaatttacagtcaaattccacatcacatgttttagaattctttattctaattcaatatacataaatcttcaaatggtatccttctagatgtttcttcctaatgttttctgtggtatcaattttcatgtggaattgtttgatgttcctcaataaaacttcatagtgttcaaaagc

SEQ ID NO: 112145 - DNA, 240 bp, Homo sapiens
aaatggaggaaatcaactagactactcacagtaattgtccacctccacagctctagctcctagcacagttaagcatgcaataaatatttgttattattgaataagcactgggattaggaatgaattaatctactttccaaatctgctgtaatgagatcctatgtttcataacaaaaaaaattatgggctgggcatagtggctcatccctgtaatcccagccctttgggaggccaaggtgg

SEQ ID NO: 112146 - DNA, 1179 bp, Homo sapiens
catctgacatagacccggacaacagctgcaggaagtggtacaggaatcacccccgatcaagacagaggctggaaggtccagggccttgtcccaggtcagccggctgtcaagcagggagccaaaatccaagctggggtgtgagcccaggctggctgaacctagactccacgggctgtggaaacatctggaagatggttgcatgaagcactttgtaaaggatctctctgggctctgatggccccaagagactatggactaacttgtcaccacaggcctggcacactgaagcccacaagcatgttacacagaatcacatccaagatccgcaacctcagccccgctctccttcccatccccacaccctgggcgtctctcgcctccattacacatttcctacctccacatcttcatccatgttgtgtcctctggctggaccgcccttcccttcaattccacagttcacaatcttagccagactttcaaggccctgctcacccatcctctcctccatcacactgttcttcagttccccacttgcagaaaattataatcataattgcaacatgagctaatgcatgtaacagttagttctgtgccaggcacagaggcagatcccatatatgctaaaaattatagtcaacattgtttcatttaaccctcactgggacgtactgccaaacccactttatggataagggatctgaggctcctgagaagttaagtgactttcccgatactacacagggaagagcaaaactgggatgtgaaggcaagcctgcttctgttcgctgctcaaactgtgctggaagagagaagagctagaaccatttgctgactctctgctgggacattccttgctcgactggcagcttcccaggttggaatggtatcttgttcacttccgtatccctggtacctaacatggcgctggccttgggagaggagggtgggtttctcacagagacgggtatttctggagccatgcttaaaacaagaagcaaaccctgagctcagaacagcctctctgggcctcagtttccttatctgtaaaatgggtataatgtcatagtcctccaccaccacctcacaaggttgctagggcagggagcactcaggagatgttggcttttgttgctaacaccaggatagggctgcatgaaccctataagggcacatggc

SEQ ID NO: 112147 - DNA, 302 bp, Homo sapiens
gttgggaatgacttgctgccttggtgagtgaaagctgggggctccgggacatgcagcgccttacactaagcaggatttctcagactgtgttttgtgggacatgagtttcaggagaaattaacaggtatgctacaaaaagaaacatttttttaaattgaattagtatggaaaacatgacataataaatcccccctaggaaattctcccccctcaaattggtataataaaggcttgatatccttcaataaagaaactcattgattttagttcagcttaatattaatctctggtgggaaacaggt

SEQ ID NO: 112148 - DNA, 829 bp, Homo sapiens
gagggagaaccctctggggatggtggtcagggagaagtgttcacatctttggcaagaatacttcttcatctttgtacttctagcactggatagtttacttgatacctagtgggtattcctgtttacctgatatacctgaggaatactcgattggaggataaataacttaaattcaaggtagaaaataaatagtaaatgcttgtggcaagtcaataaaatactgtgggagtagactaaagagagagttctcttgaggtgatggcttctagtttcctggacacatttgaaatgctgctttaaagttttctttaatgaattcctaagattattctttctgtgcttgattttaaagataggatgctgcactaacatatttacttttattgcttcattatgtccaaaaccacgtattactgtattacatataatttcttttcttcttttcttttttttttctcttgagatgaggtctcaccctgttgctcaggctggagtgcagtcgtgcaatcctgatttactacagccttgacctcctaggctcaagtgatcctcccacctcagcccctgtggctaggactacaagcacgtgccaccacgcctggctaatttttgtatttttttgtggagacaggatctcaccatgttgccgaggccagtctcaaacttccagcccccattgatccacctgccttggcctcccaaagtatggggattacagttttgtaattccttgcagaagtttgtggtggaggtagtacttgttaaaggctgggctgttgttgtacttagcaagtttaaagggaaggcattttgcatttcctctggataa

SEQ ID NO: 112149 - DNA, 519 bp, Homo sapiens
accgcggcgacttggcggcgggtgccatgcgtctggagcttcacattctctgccccccacccaccgcgccggcgctcccttgtcacgcctcgggaagcgcgcacctgccaagcaggtgagttcgagctgactcccggttggcccagcccggtccagctggaccgagagccaaaccacgtccgccctcgaggtgtcctagaaccctgggtggtgtcctcgggtgtggcctgggggctttcgagggcagatgccttggagcaggagaaatgggcagtgctactggacctgatggatccagcggcatccttttcctgaaagagattctaatgttccacctgtgctcttcctccctgcggggtcaccaaagtaactcaaagctgaccatcattgcctctaaccattagagcaaatagctctatcattttcttatttctcaccacctatttcgtgcctggcactgtgtttaatgctagatcacaagtaagtacagaaactgagttgcaacttaagttctcattt

SEQ ID NO: 112150 - DNA, 620 bp, Homo sapiens
caaaaaacacagggacagagaaaagatcagaggttgccaaggattagagctagggaaaaggctgactacaaaagagcagactgaaggcattttcagagacaatggaaccctttagtatgttcattgtgatggtggttacaagattacatatttgtccaaactcatagacctgtacaccaaaaacagcaaattttattgcattttaacgtttttaaattttaaaacaaatttacctatttaaaaaaaaaaacaaagacagcaacaacttaggatcccatattaccatcactatttaatgtgatcttagacaaatcacttaatatagagctttggttcccccaatttttaaaatgaaaaatatagtatttatatctcataggtctttataaaaaagttttttaaaggtttcaagatcctgccttttcacattctatttcttctgaaatgtttcttcccatcctctcttccctactttgcttggctaaatgctatttgattttcaggtctcagcttaaacgttattttttcataaaagcttctcctaactcacattttaaatcagggcctcagctatgcctttactgcccagtgtactcttatttcatacactgtgaaatgtc

SEQ ID NO: 112151 - DNA, 364 bp, Homo sapiens
ttcatcttcctatgggcattcatgtgaggaatcgtgctagatgtggaagtgttaagtccacagccctgtagccaccgccctcgcaagacatcctgctctgtctttcttaaacataatattcaaatagggggctccaggctcaggcaacgactggtaaccatctctgaacagaaaggactacagataccgtctttttcatgcactgttatatgcataacatttacatgattaaatatggtgtttgaagtaatttttattcagtgttgaccatcagaaacatggtcatgtttctaaccatgttttcatggcttaatctctttttaaaaattgtcggctgggcacggtggctcacgcctgtaatccc

SEQ ID NO: 112152 - DNA, 280 bp, Homo sapiens
cacagacggtgtccctgcccagcaactgcgaatccccctctccttccagaaccctctcttccacatggctgctgatgggccaggtcccccaggcggccatggagggggcggtggccatggcccaccttcctcccatcaccaccaccaccaccatcaccaccaccgaggtggagagccccctggggacacctttgccccattccatggctatagcaagagtgaggacctctcttccggggtccccaagccccctgctgcctccatccttcatagccacagc

SEQ ID NO: 112153 - DNA, 477 bp, Homo sapiens
ctaggatctcagagatcatccagccccaatccatcattttcagattaggatgtgacttattgagtctggccatttggttagtagatcccatcctctgttgcatactgaaggcaattgaacttctgtctcctgtatcatcaagttttctctctcttttggaactttcccttcagcccaggtattaggacaggttaggctttgctgtgctaacagataaaacaccacatcttgagagattgtttggagcttctagcaggcagcacagctatgtatatacttgtgaatgaagaacggtcctcctctatcagggaaggtcgtcctcttcaaccaagcctgcagcttcaggagggacacacgtggagcagtgagggagggaaacgacacccactgagccagccagatcagcccaatcaacctggcgatgttggggtgacagatgttgcagccagattgccttcacatccagaaacaccaaat

SEQ ID NO: 112154 - DNA, 789 bp, Homo sapiens
acctgaatctggtcaggttctgccacctattagccatctgctcttaggcaaaggctcaatctctctgagcctgtttttccacttgtaaatattaactactaaatattctgagtgtactatatgctgggcactgtgccaaacacattatacattatcacatttagcctttacaaaaatcttgtatgaaatgtatcattctcttaagtttaccaatatggaaattgaggctgagacagacaaactgggtgacatgctcaaagctgcatagcagtgagcagcagagctgcaatatgaagctgggttgtcttctcccaaattttgtgttcttaatcactaagcattactttccgtacagaattgttatgcaggctaaatagataatgcatataagagtgctttgtaaaactataatccgctatttactttagtttgaactgcagagatgagcagggatgatacaaatataaacgtggtttgtgtcatttagaagctcagtttaatgaataatatttaaaatatactttagcgcaaataaatataactcctatgtatggctatattagaatacatcatattctatatggtaaaaatccattattatcattatcatccccaatttcagagagggagagttacttaacaagagggctttctagaagcttctcagatcactttactgtccatgagacagagcctgcccactcatctacaccatctgtcattaagctactctaagagactgcgcttaagagacaaatatttagagagtccacaatcataaattatttt

SEQ ID NO: 112155 - DNA, 317 bp, Homo sapiens
aaactttattttgccgtattcctatacccttggttgtgccaaattgtcctggtgtgaaaaatgagtcaagttaaatgctttaggtgcttcttggatgtgtagggaagaatggaataggtatgtgaagttatggtagtcatacagtttacttagtatgataatataaattgatttgggagcaaggaaacgaagaccttcatttaagaagatgattatgatactctaggaatgaagtgaatatattttggttaactttaaaaaaaaaaatcggtcttcaaagatcctgtttgatgaaattgcctatggttaaaattccc

SEQ ID NO: 112156 - DNA, 223 bp, Homo sapiens
gctcctgctgcgtatttaaaatgtagcataatacataattgaatatgcgagcaactttaatttataaaaaacgtattttgctctcccatgtgtagttacgtatttcatgttgacacaaaaatttgaagatgtagagcagaattccagtttttgctgatttgatctgggacttcattttctgtacagtgaaaaaaaactgcctttttaagaaaaaaatgcttct

SEQ ID NO: 112157 - DNA, 425 bp, Homo sapiens
ctcgccctgcttcggctcacgctcggtggcctgcacccactgtcttgcacacactgtccgacaagccccagtgagatgaacccggtacctcagttggaaatgcagaaatcacccgtcttctgcgtcactcacgctgagagctgtagactggagctgttcttatttggccatcttggaactgcctacagtcttttctttgagacaaggtctccatctgtcactcaggctggagtgcagtggtacaaacacagcttactgcagccttgacctccagggctcgagtgatctcacctcagcctcccgagtagctgggattatgggcacaccaccaagcccagctaattttttaatattttatagtgacaggataccagtatgttaccccagctagtctaaaattctaggctcaagcaatccgcccacct

SEQ ID NO: 112158 - DNA, 673 bp, Homo sapiens
ggggttacaggtgtgagccaccatgcccaacctcattgaacacttttatacaccctaccactagccaggctaaaaagtgaagttacaaattaaaacggttaattctttccctcaaggagttcacgatctagtggcaagatcaaagagtccagtaactcctttaagaagttttgtgataaaggggaaagggaactataattaagcagatgcctgttttctgttgatcacttttttgagaggggtgtgtgtgtgtgagagagagagagaaagagaaagttttttatacagaggagacttgatcatgcttatttattatagtaggagagaaaggagctggtatgatgctgttcactgcctggttactttaattgcccccaacaattcagacttatgaatgaactgatcattattatcctcagtccactgggtaggggtgtagagttagtcagggagagacacagtgaatttccaagataaggggaaaagagaggcacagaaatacatatatctttttccttgttcttctctaacttctgtgggtcaaggctttgcacgctggcttagaaaacctgttatttcttccacagccaagattgttttgttttgtgattgttgacttgcagtattatgaattaccaaaagaagagaacccaaaaagcatactccggtgcca

SEQ ID NO: 112159 - DNA, 320 bp, Homo sapiens
tgaaagtatactccacagagtgagaggggcttgagcaagcagctgatgagccccagttggggtttaagtacccttaggggtttcgtgttggttacaccctatgcaaatgaaggattggtctgtggcagatcagaggctgaagtgaagttacaccctatgcaaatgaagactgtgaccaatcagaggctgaagtgaaggctccctgtctttagaccgtattctgcctcagttaagaagcaaataaaggccctcagggaaatgaaattaaaaccataatgatggtggtgtgtgcctctagtgccagctactcagggggctga

SEQ ID NO: 112160 - DNA, 399 bp, Homo sapiens
aatagttgaatatttgtacaagaaaaattgttgattggggtgggggaaatgaggcttggtggtgggagttaaatcatcttaaaattatgacttaccccttggtcaattcccagcaatagctacgaagctaacttggttaagccttgcttcctattcaccctgggaatggtttgataatttacattcccaggaacaacaaaaagttaaaaaatactactttacatgtgtaataggtgccaaatttgcaacctttaggtaagaagtcaaaacctcaaaagcaaagaaaatatttgcttgtttggattttgaaacttacattcaaattgatgcacatttcctttttctgtaatcacatgattgaaattaatattttacttcccctaaatttttttagggaag

SEQ ID NO: 112161 - DNA, 313 bp, Homo sapiens
gaggcacagcaaggaggccaggatagctgcaaccaagagaaagaaagggtgagtgccagaggttgaggcttttgcactgaagggagtaggtggtaagaaggggaaggtggaagctggagactaattaggaagctattgcaacggccaggtgaggaaggaaggtgcctggaatgggtggaaatggaggagacggcaagagatggctgggtctccatggtgtttaaagccttgagactgaatgaggcagtgagtgcagaaagaggacaaaaaggctaagaaacttcaaggctaaaaacctccaagattgagaggc

SEQ ID NO: 112162 - DNA, 461 bp, Homo sapiens
actcagaaaagaggccagacaaccagaagcgtagtttcttcatctacctccagtcatgactcatgtgtcactctgaggcagggatgactgcaacagaaaagcagatcttgctgtgactatttctttctcctttctttggatagctaaagaattttggtagccaaaattcatgggttctgaaattcctagaattatacaagcagtgagagtagagcatctgaaaacagacgacattgctttgaaaaaggtagttttgtgctaggctgtcataacatgcaacctggtgtttgctggaacatcctcctcaaggaaaaggattaagagaagtctctttgttggttcttctcagtttgcataaatcaacacctacacatctgacccataatgaggctctttttaactaaacagcatgttaagtgtgactttacagaaatgaaatcaacttcttaataaattcacca

SEQ ID NO: 112163 - DNA, 127 bp, Homo sapiens
ctgagtgcccaaatggctttctagtcatgtaatttccagcttctcttagtaaatacatgcttcaaggaaagcaaactacaccacttcacacaagtgccaccaaaagggtctacagcaagtaacatgc

SEQ ID NO: 112164 - DNA, 884 bp, Homo sapiens
tgtaagccactgcacctggctagtcttttgtttttttaaagctcatgttatttccttcaaattttattgccaaattgaacataaaaatgtatttctgtgaagttagaacagagaaaattagaaaaagtcaatcagcaaggaaaagagttaaaatggtatgcacgcaatgatgtggaaaatttggggtaaaggagaaagatgtgagattgaaataaactagaagaaaataataatagagagaaagaacaatagtttggaactccactgtagctcaacagtgaatgtgcttccctaaataactgattgtctctccggcagtaatgtagaaattggcaaggttgtagcccattccataaatctgatatgacatgttcctaattaaatacaagtcttttaatataactaaaggatacaggctaatctttatgaatcagaaagcaaacagaccttgaaatgcaggagtgtaactaatgtgcaacactgacaaagactaattaactataaataaacaaaaagagaaattacatcacctttaaaggatcataacatattttgggcaatctttaaagtgtaaatcttcttagaataactacttttgataaccaaggatagaaaatatttagatgaaatcgtatatttaacttgtattgaacttagatatatctttactaagaagatactaaaatttttcaatattgtttatgttgccttatgaatacaagagtcagattttcacaatgtgatagattttaaaaatctactcccctctcccccttctctctcttactttcaccctcaccctcttttgaccctcatttcatctttccctcccatttttcctctctttagtaaagtttaggctctacagcagattatttttcttc

SEQ ID NO: 112165 - DNA, 627 bp, Homo sapiens
atttttgtatttttagtagagacggggtttcaccgtgttagccaggatggtcttgatctcctgacctcgtgatccgcccgcctcggcctcccaaagtgctgggattataggcatgagccactgtgcctggccacatcttgcttttttttttatgatcagaacaaagggcccactctagttctctacatgtcaatcaatcaagcatgttgaataagggacatagaggatttaacttttgttatcataaatggaacttgcaggcatatatcaagaaccctatgaagaattcctctcccatcattttgataaagaactacatcattttttatagaattggtgaatgttcctaaactgctgaagctacatgttttttgttttgttttacaaagtcaggtgtttgagagttcttttccactctactactactcatagagcttgttttttctttgggtgtgtgctgatcctgttactgagattaattacatggctctgcagtgtagtttacataaaaatgatgttttccacttgattgctgcagatatcaagagtttgttattttcaaatacccatccaacaagagagatggggaggtttttagttatatatgctatatatatatatataact

SEQ ID NO: 112166 - DNA, 335 bp, Homo sapiens
tctagttctcttgctgtttccaccacatctgcaattactttctcccctggagtcttgaactcctcaaagttatgcatgaagattggaatcaacttattccaaactcttgttagtgttgctattttgacctcttcccatgaatgatgaatgctcttaatggcatctagaatggtagatcctttctaaaaggttgtcaattgattttaacagatccatcagagaactgactgtggcagctattactgtataaaatgttttgtttcatttttgagacggggtcttgctttgctgcccaggctggagtacagtgtaccatggctcactgcagttttgac

SEQ ID NO: 112167 - DNA, 110 bp, Homo sapiens
atttaagagaggcagacataccgacaccgtgtggtgctgggtgtgggggaaggtggtgttcaggcaggcagtgcagagtggctgtaaactatggagctgctgtagccctt

SEQ ID NO: 112168 - DNA, 854 bp, Homo sapiens
aaactcctgacctcaggtgatccacccacctcggcctcccaaagtgctgggattacaggtgtgaaccaccgtgcccagcttcattttttatttttttgttttactttgctttctgggtcattttgaattttatttttaaatctgagacaaaatattaaacatctgggtcctattacatgtagacgttctttacaaatgttgtgattgggatcaaggaacagtctgaagttcccgggcaggagaatcagctgagggctaggatgaatgttgccatttgtgttgagagaccagcaaggttgatttttgccagcagaaatgtagaaagaatgatcttgctcaaaatgagttaatgcagtgggttaaaaatgaatttgtaaatactttcatctgcctcagttattgctgcctaatatttgtttcacccacggtttctcttttccctgcaaattatgtgtacagtgtgattgactttctaaaggtgttgatatatactaatatatcctaatattctaaaggtgatgatacatatattttttttcccatgaaaatatcttagaagtaggtgtattgtaatagttacctaaaggaaatgcttcttaatctgagacattttccggcccattgagaggaacagtagcttttttgagaggctggcatctcaagatagaaagatgtctctaagtattgccctggagtgctactgaatgatttctttactctgtcattgagcccttattgtgtcaaaaaacaaatctcttggagaccctcacagaaagatttgtttcctaaaacctgagtgctagctagagctcataatttttgtgtttttttgagacagagtctcactctgtcac

SEQ ID NO: 112169 - DNA, 359 bp, Homo sapiens
gcaatcatcactatgatcaattttgggacatttttatcaccccaaaaaagaaatcctgtacctattggcagtcacttccctttcacacctaaactcctgaggtctaatcaactactaatttttgtctgtgtagatttgcctattctggatatttcgtataaatggaattcaacatattgtcatttgtggctgacttctttctcttagataatgttttaaatatttatccatgttgggcccactgtgcccaggagtagtaaagatttgaaaaatggggagcatatgcatgcctttcttggaccagacttttaagtcttgttatttataataatatgtaataaagagtgaaatacttgctt

SEQ ID NO: 112170 - DNA, 397 bp, Homo sapiens
tctgcaggagcccgtcagacttgaccagcattgccaagagctcagccgggcaaggcacagagcacaagacttggctgccctgatctccgctgcctgcgggtcatgcagccctccgcctccctctgggaagtcctcacctctgggctgggctccttgcatccccagaggtgcctcctcagcacctccatccccagttgccctggctgctagggttggactggccactcagctagggtacaagtctgccaggtgtgactgagaacctttgccatttgctgtctcctgtgactaagacagacacaagccagacagaggcatgaggctctttcctgttgcccggcccttctcccaatttccctcccccaacacacatacgcacacacacatacacacacac

SEQ ID NO: 112171 - DNA, 587 bp, Homo sapiens
atggagttcgatcatggaaattaatggttaaagatatgttctacaaggcaaagcagttggaatggttttagtcaattactgaaggcaattacattttatattgtaaagggactctcttatggccaacctgactgcctgtatttaagagttattatctttgttatttgtatgataaaatatttaacagaataaggattagagggttaagaaaagtgaggagtggagactggtttggcaatttcaagaatcggaaagagaagacgagtatcttatgcttttatttccctgttcaaatgccagcagccacacactcaaattgcctgagtcatgatcatgcaaaattaaccttgcctatttctgggatgaaaaataatttgaaagtatgcttgtaatataagatttttatttaaacatatgtttaaatattgatattcacttgaaaacaaactataaaatgtttaaatgaaaaaaactatcagatttctaagcaataaaagtgagatattagtgctcttaatacaaaaaacgtgggaataggtcagaagtagtataataactctagtttttgtcaagggtttggcctataa

SEQ ID NO: 112172 - DNA, 700 bp, Homo sapiens
gtggaagactgaatgaaacccgggcggattcccagcttgctccgtctcagcttgggcactgctgtttacagcctgtgtactcccctcccgccctgccacccacaagtgtctcacctccttcctcgacagatcgaatgacacaacaaacatttatcttgggtgcacagcgtgtcaggcgtcaggctaagcactttgataaactggttctttcaaacatcacaggtgtctgacgcaggcaccattatccacgtcatagaaaaaaaacagtgttcagtgagcctgaggttagcaatgtgtgcacctccacacactgctaaatgacaaagctgaattttgaagtaggatgccatgaggtgtctggagtagacaaccaaaatgacttaattgaggtgtcaggggactgtcttactttctggtcacataagcaatatacgctcattgtgaggtttggttgttccattacaaaaaagactgttttaaaagccattagcggagggatgggaggagttctcttctgcctgtgtcttcctcctaaacagcaaaatgacggtgtcctcaaagggatgtataacgagcgagaggcgaaaaagaacgtctgtgattttaaatccagtgtccttcaccagtgagcaatagtagttctgtgagtgggagagcgggaccgtggtgcttgcaaacaacactttaaaacactggaacc

SEQ ID NO: 112173 - DNA, 415 bp, Homo sapiens
cagccattccaagagtgatctctgaaaaacgttaatcagagcatgccaccctctgtgtaaagctaatggctccctgttggtcttagaatatataatggagtagcgaggccctgtgtaatacggttccatgccctctccattttttgcagatgccttctttctttgcttgcttggctgactacattgaccttctagttccctgacctgttaatactttttttcctgcctgaggacttctgtacagtttgttcttgctacctagaatgcaagaacactctttgcccattccttttccatctttaaatcttaatgcaaaggtcagtttctccaggtagtatctatttctgattgtccagactggattgggatcccctgttggatttctcacagtagcctgtttttgataagaattcat

SEQ ID NO: 112174 - DNA, 262 bp, Homo sapiens
tggtctagggatcgtgacactgggttcgagtcaggacagtgtacttcgtgtgtgcaagttatgtgagcaccaagcagtcgggcaaatcccataggtcaggacttgagaaaccacggttccaggctgcaatccaggctgtacagccatgccactgaacttaataagcatctacttcttcactttatttatttatttattattattttctgagacagagactccctctgtcacccaggctggagtgcagtggcatgatcttggc

SEQ ID NO: 112175 - DNA, 374 bp, Homo sapiens
ctgctgggattacaggcgtgtgccaccacaccccgctaaattttttgtatttttagtagagatggggtttcaccatgttggtcaggctggtctcgatctcctgacctcgtgatccacctgcctcggcctcccaaagtgctgggattacaggcataagccaccgcgcctggcctatacttttcttaatgtagccaatgaccattctaatgttgcttcttttgcagtaacattacatcattgtctcatattgagttaggcctggattttagttcctgcttcaccattaccattatctgcctcaccattcgcaattgccattacagcaggtgatcagagccacctgccgtgtgggtctgagcaagtcactttccctc

SEQ ID NO: 112176 - DNA, 179 bp, Homo sapiens
tattcagggtagcactgggaacaggagacccacctgaggctcagccctagccctcagcccacctggggagtttactacctggggaccccccttgcccatgcctccagctacaaaacaattcaattgctttttttttggtccaaaataaaacctcagctagctctgccaatgtcaaaaaa

SEQ ID NO: 112177 - DNA, 472 bp, Homo sapiens
atcttcctaaaatctccttccctggccttgcccttcataaaccctgttctgccataactggttaatttgataaccaagaaacaacaagtcttaaaataagtgttagtgaagcaatgatcagtgcatgggtgactgaggggccgacttcggttacctaaaggctgccagaccacccattatctactgaccaccactcgagaccgtttcccaccctccctccgagactgtgcgtggctggggtggcctctcaccatcgccacgtcctaaggtggcaacgagactcaggccaagaacacacagcgcgaccaaagcactgccatttcccgcaggaatcagaggcgggtgctttgtttggctgtttttgttttgttcttttttgtgtttttaataggagcggagaaatcagaagcaggaaggagcatctgggttttttcctgcttctgctccagggaccccatgaaacctcagagtc

SEQ ID NO: 112178 - DNA, 342 bp, Homo sapiens
aactactctttttatagaaaaccttgtctttacctacagatatatagctttacccttgtaggtctcagaataataatgacattccctaaaaaacaccataatacacaaccttcgtacaatgtgacatatactaatgaagtaacattagggatcacttccccacagttggctccccattcactgcccttcatattccaatgcaaaatcacctctgtttatactgttatagttacagtacttatacaaagcgtactactcttaagtgtgctgcctaataattttttcttttttgagacgtagtctagttctgtcacccaggctggagtgcagtggcatgatctc

SEQ ID NO: 112179 - DNA, 404 bp, Homo sapiens
tccctgcttctcttcccactcctagcatcattctgcacctcgaagggtcttgtgtgtccatggatggatattatagtcacatatccaaattcaaactctgttcatctttcgcctttctccaacagccacctcacagctgcacctcaggactagcggtgcccagacaggtggtgctgtcagtttcctcaggataaaccaagacattgctattcagaccccagaagggggctccaggtcatttgagcagagtctagaaggatgactgcaggttctaaatggacatgtcttcttagcatggtctggaaggctagacacaggccccagatgacttgtcttagcagaaggtaccccttactctatgggaagctgcatggctggaggaaggcccggaggtgttctctgaa

SEQ ID NO: 112180 - DNA, 152 bp, Homo sapiens
  misc_feature (140)..(140): n is a, c, g, or t
  misc_feature (142)..(143): n is a, c, g, or t
  misc_feature (145)..(149): n is a, c, g, or t
  misc_feature (151)..(152): n is a, c, g, or t
gatctgactgtagggactatattcattactgctggactatgctgctttccccaaccccctaggattttaaaaatagcacgctgcacttgaaacaggggaagacactgtataacatccaaatgttcttcttccctagaggncnnannnnnann

SEQ ID NO: 112181 - DNA, 351 bp, Homo sapiens
ctccatggccaaggaagactccatcaccccgactgttcatttgagagcctccttagtgggggtgtcccccaagggttgctctccttaatcaatcctgaacattgaataatgtttgggctgagagcagtcgcggcagctaccctagtttaaatgtcccagcgcacactgcatggctgcttctcagctgatgctgagttctgtattgtgcacattcacaggcaggggtgcagctttaccatggagacagcacagcaacatgcctggtgcctgccctcatgacagcaagaggatgccattcggcgaggtgtccttgaaacttctcttggaaaatctcagcttacaaaaagacac

SEQ ID NO: 112182 - DNA, 161 bp, Homo sapiens
taaagccaccaatatggcatatgagggtgtccaagaaaatcaaacataactccatttgattaagagcttgaaacaaaccatcactttattctggtcagagaagaacagtacaactgacctcttcttcaatcagcccacatgagaggtcacctcatgtaggg

SEQ ID NO: 112183 - DNA, 620 bp, Homo sapiens
ctcgtgccacctctgctcacgagtggtctgatgcttattcattatctggttcagcaaatccagataccttaacttaaaatatgtttacaatccagtttctctggagacaaaaccctcatcaatttacttcttaaaacgctttactggctgacatccgaacgcctctgcatgagatttcaacaatgagctcaatgagctcatcccccaccccttccaaacacagcacttgaatgccttcaactcttttgtaaaatcacatctccttagcatgtgagcaaaatctgatccatatcatctttatcatagagatcctgtcttatagctgtgccaaaatgcacttgtttgagcatgtaacttctcaacttaaaacttctcgaggtttcttcattgcctgtaacataaagtcccaactacttaacacaaaatgcgacattttaccatgtagtttctctcaggatgatctattaaaaaaccccaaatctcatcctgttcctgctgtaagccctttattggcttaaatccaaagttattaacatgatataaaaatttgatcatgtcatcccttaaagtcaaattcacacttcctaggacaatatataaaatttgatcttataactcct

SEQ ID NO: 112184 - DNA, 321 bp, Homo sapiens
ttccacaaagatttattaagcacctatactatatgccaagccctgtgctagatgctttcaataggaaataaagattccataagataagttagactattttaggagtttccacctttttaccaccaagctacccctttgatagttgttccctaggaggcatgtgttttgaaagatcctgtctattacatattatgcttgtgctaggctttctcagaatattgaaaatagcttttgaatctccactgtaattttcagggagtcctagaggtctagagatcttcataagaaaactgatcacttttttaaaaaattttatttatt

SEQ ID NO: 112185 - DNA, 378 bp, Homo sapiens
actcccaatgtttaatgtgtgaaaaggcttaaggtttaagtgagaaaaaagcaggaaattacatgcaatatattcagtactgtttttttttttaaattacaagactacacagatgggaaaaagaaattggatgataaatctttaatcaacacactgtaactgtttgcccaaaaagtgtgaagaatatcagacatatacagttggagaaaagaagccatgaatagaactgagagtcaaaaataaatggtcaggctgggtgtggtagctcatgctcataataccagcactttgggagaccaagtcaggaggatcccttgaggtcaagagttcaagaccagcctgggcaacatagcgagatcccttctgtaaaaaaaaaaa

SEQ ID NO: 112186 - DNA, 723 bp, Homo sapiens
ctttatcttttaaacagggacacttataagaatgaaaaggggcactattaataattatggtgagctcccagcactttgggaggctgaggcgggcagatcacttgaggtcaggagttcaagaccaacctggccaatatggtgaaatcccatttctactaaaaatacaaaaattagccaggcatagtggtgcgcacctgtgatccctgctatccgggaggctgaggcagagaatcacttgaacctgagaggtggaggttgcagtgagccaaaatcacaccactgtactccagcctgggagacagagtgagactctgactcaaaaaaaaaaaaagaataaattgcggtgagctacagtttcaaccagaactgtaccaggctattcttaacacatacaatattgagatggtttcatgagtcatctcgtatcatgacatttcttcagaatttctaggagagacggaactgaaatctcttctgtttaaagtatttttttcttaacatgtttcttctttaaatagaataaattaccttctgtgggaaatattttttaatgtttaaattgtgctacgttgcatacatttcctggatatggattaaaggaccaaatttattgctgaaaaagaaatgctggaatgattctaaatatccatgagtattacttaaatggggtaagggctgctgaaaatgataacatcaatgataataatgcacctcttagactgt

SEQ ID NO: 112187 - DNA, 409 bp, Homo sapiens
gatattgagtgtgaggcgtataataccagtagcgctagtttaagagtactgcggcaagtactattgacccagcgaataaggcttctgctgttactgctgtcaggtctcctgcataggaagggcttattgtctgagcataaatggggaaacctggagttcatctatctgcgaggaagctttggcacccagttaaatttcactgtctcaagcttcccttgtgtgtcctagagcttttctttaacagttgtcatgaggaagtctcatttgtcaagttgaccaattgtccattttttccctgtcatgaggaaatcctttcttaagccagctttattttctaaatggaaatttccagccttgaatgcagtagctgttgctctgggtagtccaggtcctaaagttcagttcttca

SEQ ID NO: 112188 - DNA, 469 bp, Homo sapiens
ttctgggggatgggggagtctctggtgtgcccggcgggttctgggggatgggggagtctctggtgcgcccgggcttgtagacgcatcaccacgatctccgcctccctcttcacccagcgttctccctgcgtgcacagctcagtgtccacgtctgccctttgtagaaggaagctagttctgtggggtgagggcccaccctagcgatctcacctggatcatctgcaaagaccatgtttcccaggaaggccatcgtctgtggtgttggggggctaggacttcaacataccattcttgggggacacatttcaactcataacaccagtaaataaagcatagagaagaaagtaaaaatcgcctgtaatccttccacccaagataaaacatgtaaatctaaaatgttgaatatatcatgtactttttacaaaataaggattactctggatataaggcttcacattctgcattttaa

SEQ ID NO: 112189 - DNA, 390 bp, Homo sapiens
aggaaaatgttaccacgttcaagagaaagtagtcaataacaaaatatcttcaagatgaccaagtgttcatattcgaagtcaaagatgttaaagcagtcattataaatatgcttgaggactatgaaagaaaatatgtatagtaattgaacaagtaggaaacctcaaacagagaaagagaaattttttctttttttcttttttttttctttgagatggagtctcactctgttgcccaggctggagttcagtggtgcggttttggctcactgcaacctctgcctcccaggttcgagcaattctcctgcctcagcctcctgagtagctgggattacaagcatgcaccaccacgcccagctgatttttgtatttttagtagagtcggggttttgc

SEQ ID NO: 112190 - DNA, 613 bp, Homo sapiens
gtaagcactgaatcttaaaaactctttgtttaattgatcaccctattatggttgcaaaaaatctcttgtatctaaaatttaggataaaagtcttaatgcattaaaattggttttcttttaaattaccggtcagttcttccatgagtaacaacaaaaaagaaagcaattaaattgcttcttgatttaatacatatactgaaagaaataaaacacttaaattttatatactaaacactaatcattaaaatatatttagaagtttgttagaacacaactttttaggaagaatttaaattcagatgtcattttagaactagatgtgtaatcacatataataaagtatttttaaaaagtgtgtatcagtgattctcaagtggaaagcacacaataaatttttgtttatgaaaaaggcaatcactttttcttgagaagttcagaaaaacaatttccttacctcttgccaaataaaatttagaatcatggaatttataaaaattttattgaagtgtgtgttatattgctataagaaaaacagttgaaagtcaaggttacacagcttcactctgagtgtattatcttgtattgactcttagtgtattaccttgaacattga

SEQ ID NO: 112191 - DNA, 370 bp, Homo sapiens
atactgtattgaccagatataggcatactgaccaataagcatgcagagctggagcagaaagtaagcatgatttggacaatgtgctggattagaagaacaaatgcaatgctacagatgacatcaatgtcaaagacctagaaatgctgagccaaggctgtaccctcacacgtcagtctcagaggcaggtgacagcccttacaaaggcaagagatggcctagcttcagaccagaacgtaaattcagcttggaagccttggactcaagctcccaagcaaaaatggctcttcctactgcatttttgttacttctaactgcaggtctccccagtctttagaatccaagaggctgaacaatatgttatccatctgta

SEQ ID NO: 112192 - DNA, 677 bp, Homo sapiens
gggtttaagtatatggctaggagtccatatattaacaaggcttttccccagtatctgtagtcctacctgggatctagaatattgtaatagttagaactcagttttagtagccaggttacctatgtggaatctctgcccctaactaactgtgtgaccttgggcaagcaagctagttgacttctctggacttcattcaccttcctcatgtacagagtgatgatggcacaagtacctgtatcatagagctgtgtaaatgctaacagaacttggacatggaaggtacttaaaactggacttggtatgtagtaggtgctcaacaaacttcattcttattagacatgattttccaaatatctcagtcttggctttctggactggggaacacttgaaggtatgaagaaatccaactctacctgggtgcttccttggtgatgctgggcactttccttgtgccagcatgttttgccttcacaactaccctgagaagtgtgtatcgtcgcctgtacttcacaaaagagaaatctgagtttcagagagttgaaatgacttggtctaaagtcccacaggttctcagtggagagagcctagatgtgaacccaagtcctcgtttcctctgtcagcagtctttttggagagagaagaaattattcacatgctcttccttaacctttctgtgg

SEQ ID NO: 112193 - DNA, 789 bp, Homo sapiens
gtacaggaagttaccaactcacaatttttatgttcctgaaagtttgtttgtgagctggttacttggaacatgttttcccataggaataatgatacaaataatagagtctcacacaagtccatcaaaggctattaacccaatatctagctaacatgcaaatatttgccataaaatgtgtaaagaacagtatggttcccatagtaatcaaatagaagaaaattatggcattaaatgtgtttttaattttggatgttgctgtttgaaggaaagaagctttaattggaggacaatgaagagctggagaaaaaattagaaggtattttcagaataccatcaaatactttaggtattttcagaagttttagatactcatgacactggatttttcaattatgttcaattttaccctcatacttgtggcttatcttttctcaattcaattttatcatacaaactgcttttaaattatgagtaaagtcatgatgtaaactcacagactgaattaaaagtgggagagagaatttgctgagataattctaaaggagttggaagagagaaaaatgataagggattattatgaatttgggctcatgtgtctgagtaagtcccatttggagaaattaactgaataagaaagaggtcataggtagaacagaattgaggagcatagtaaaagcaggaaaaagtacggtgtgaggcagaggtattgggtctcacaggtttgtgtgctaactaccaaatgtaggtgtgggcacataatggcaagctttccatgggagagagactggg

SEQ ID NO: 112194 - DNA, 286 bp, Homo sapiens
aacgtctagggggtatgaaaagcagctcttagaagtgggagatacccatgtgagctctggctctgctgctggagtggatggctctggagagagtggacacacattctatcccagaggagggggcagaaatccactggaatgaagtgctgggattcctgcacagtgcagggaccattaccccgtaccactcacagactcaccagaatgtggccacattctgagtggggactgaagaattcatttggtgctgcctctatccgtcctcgatgacttcctggcaaaggat

SEQ ID NO: 112195 - DNA, 550 bp, Homo sapiens
atacatcattttctttccataaatagacaacataaacaccacctgttaacaatgattcaattaattcaatcaatagagtcagtcttgctttgaggatcaaaactaagccaaaaccaaacaaagctcaaaacaatgttttccccacaataatagaatatttgtaccttagcttgttataaacatactaaaagtaatatgccatattaattagtctatgatgtcacaattgttgatgactcattactttttaattttttttttactttggcctcatctttattcttacaagtctaaaactcaaaattaataagagagtggtaaatcaatgataaaaagaccaaaattataattgtttcttacatcatatacaaaaatcaactcaagatggatttaagacctaaatgtaaagcctaaactataaaaaccctggatgataacctaggacattctggacataagacctggcaaacatttcatgatgaaaatgccaaaagcaactgcaacaaaaacaaaaaaaattgacaaatgggacctaattaaagagcttctg

SEQ ID NO: 112196 - DNA, 264 bp, Homo sapiens
taagtgcagggatgagaggggatgctgggtgcatcgttctctgtcatgtacttctgaaaggaaactgttttaaaaggaaagccacctttttaaaaagttttatgcatttttaagcagggagttcttaagagacctgcttcattaatctgccatgaatacgcctctgggagagaagagttaacattagtttcctctagtgtgccaaaaagcatatcatttgctttgtttgaaaatatgtctcatacacacacgtgtgtagattgg

SEQ ID NO: 112197 - DNA, 567 bp, Homo sapiens
gaaatgaggtgtttttagcttttcttgtgacttgctcttaaaatagagattcagacacatgtattatataatcaggaatctgaagagaaaactgtatattgcttttgatccgtctcccttagcaaagtacatattttcatactctatttctttacataagaatatcgaggggcacacatttttgtacatttttaggtatggttttgaaaatatctcaatggaagaagctaggcattccctgaaagatcaaaagcatctaaggctgctggtggtgatgcattttctcgatggggttgttgtggtgggcagctggatttaggagtgtcctttattgcacctgctcccattgttaggctgttggaagaaacgtggtgcacagcatgaggggaggctaatcctgaatgttttatggagcattacgactgcaggtagagaagcaaaaatcgacctcataaaaaccttaagttgtttttactatgaaaacaatatacatacccagtgaagaaaactgaacattataggggggaagggaacaaataaccctaacattttttaaaaagtactttt

SEQ ID NO: 112198 - DNA, 203 bp, Homo sapiens
gaaatgaggtgtttttagcttttcttgtgacttgctcttaaaatagagattcagacacatgtattatataatcaggaatctgaagagaaaactgtatattgcttttgatccgtctcccttagcaaagtacatattttcaaaccagatttcagcaaagacgtgaatcgggagtcgcacagtccatgagcaagtcgaacgttgat

SEQ ID NO: 112199 - DNA, 478 bp, Homo sapiens
cacaccgtgctcagctaagagtatcatttgcattcagtgtgattgacatagcagaggagggatgaagggtacagaggggaggggttcctcggctgtgcacgtgaggtgcagctgggaattctgatctgaggatgctaaagcaaggagatatgatgggccaggaagtgcagtctttgggctaaggcagggcaggatatgcaagtggagatattgccttgcacagaagtttttactgtatcctgtaaagaatgaggaatgtttgaatagttttaaaacatttgggaatagatcttcagttttatagtctgaaaagataactggcagtttaaatgatggaaatatgggagggaacaatctccaaggcagctggaattctcttctttatctttttcatccacagcaagtagactttttcttttattatcaccaccacaatatagttgtcatatcttattcttgatatttagattctaaagcc

SEQ ID NO: 112200 - DNA, 345 bp, Homo sapiens
tggaactctccattcggctggcctctctccctcctcatcccactcattctcctatggtcactgatttggttaatagtccccattgttaccctagtgtttctaataattcactatcaaatatggtgtttgttatagttttctgatatattgtttataagttagagacatttctatctatttctagtatgacttttatatgaagtgaatttttttttagctgttgatgtagtaggttacatttgatatatttttaaaagttgaatcatctttgcattcctctgataaaccctgtttggttacaatatattatccttttaaagatagactgtaggattctatttggta

SEQ ID NO: 112201 - DNA, 173 bp, Homo sapiens
tggtctggaaatgctgagctcaagcagtcctcacctcggcctcctaaaatgttgggattacccgtgtgagccactgtgttaggcctagacaacagaaatctggtttctcacagttctagaaggcagaagtctgaaatcaaggtgttggcagggctgagcttccctcagaggct

SEQ ID NO: 112202 - DNA, 2968 bp, Homo sapiens
cagattaaagcgagcaccagagcaggggaaaacaaagcgtgctcaactccaggggctgcaccgcgctctaaagaaaagaccagatcctcttccttccttctttccttccttccacaccttgcaagggtcctctgtcccgcactgcgagtaaatcatacactttggaagtttagcattagagagcccagcaggggagaaaattgtctgcaagttaaaaaaaaaaaaaaaaaaaaagtagaactagggcagtccgaggagattgaaagggcaaaactatcaagcaagaaaactgtaagttctgattagttttatgactttgccttcatgcctcaggagctcaactgatcacggctttcacgacaggctaaggtacttactacaccattctttggcgaaggctattcagcagtggtgacctcttccaatccaacactctacagattattatctctggactcccagctgacaccctgccggaggcaagagctactaagccaactggaactgtgccttttctcttgtcaaggtttttttcttacacaggaaaaagaaagaaaaaaaaaagatgaagttgggcaaagtggagttctgccattttctgcagctaatagctcttttcctgtgtttttctgggatgagtcaagcagaactctcaaggtccagatcaaagccctatttccaatcagggaggtcccggaccaagcgcagctgggtgtggaatcagttctttgtgctggaggaatacatgggttcagaccccctctatgtaggaaagcttcactctgatgttgataaaggagatggttccatcaaatacatcttgtcaggcgaaggggcaagttccattttcattattgatgagaacactggggatattcatgccaccaagagactggatcgtgaggagcaggcctactacacgctccgagctcaagcgctggataggctcaccaacaaacccgtggagcccgagtcggagtttgtcatcaaaattcaggatatcaacgacaatgaacccaaatttttggatggcccatacacggcaggagttcccgaaatgtctcccgtggggacctcagtggtacaagtgacagcgacggatgctgatgatcctacatatggcaacagtgccagagtggtctacagtattctgcaaggacagccgtacttctcagtggagccaaagacaggagtcatcaagactgcccttccaaacatggatagagaggctaaagaccagtatttgcttgttattcaggcaaaggatatggttggtcaaaatggaggactgtcaggaactacatcagtcactgtgaccctaactgatgtcaacgataatccacctcgctttcctcgaaggtcttatcaatataacgtcccagagtcattacctgtagcctcagttgtggccagaattaaagctgctgatgcagatattggagctaatgctgaaatggagtacaagattgtggatggtgatggtttgggcatttttaagatttctgttgacaaagaaacccaggaaggaatcattactatacagaaggagctggattttgaagccaaaacaagttacacgctacggatagaagctgcaaataaagatgccgaccctcgctttctgagcttgggtccgttcagtgacacgacaactgtgaagataattgtggaagatgtagatgagccccctgtgttctcttcacccttgtaccctatggaggtgtcggaagctacccaggttgggaatatcattggcactgtagcagctcatgacccagattcttccaatagccctgtgaggtactcaattgacagaaacacagacttggagagatacttcaatattgatgccaacagtggggtcatcacaactgccaagtctttggatcgagagacaaatgctattcacaatatcacagtccttgcaatggagagccagaatccatctcaagtaggaagaggctatgtggccatcactatacttgacatcaatgataacgcccctgaatttgccatggactatgagaccaccgtctgtgaaaatgcccagccggggcaggttatccagaaaatcagtgctgtggataaagatgagccatccaatggacaccagttttacttcagcttaacaacggatgcaacaaataaccacaacttttcattgaaagataacaaagacaacacagcctcaatactgaccaggagaaacggcttccggagacaggaacaatcagtttactatctgccaattttcattgtggacagtggatctccctcacttagcagcaccagcaccctcaccatccgcgtgtgtgactgtgatgctgacggcgtagcccagacctgcaatgcagaggcctatgtcctacctgctggcctcagtacaggagccctgatagccatactcgcctgtgtcttgacattattggtgttgatcctccttatcgtcactatgagaagacggaaaaaagagccccttatttttgacgaagaaagagacatcagagaaaatattgtgagatacgatgacgagggcgggggagaggaggacacggaagcgtttgacatggctgcactgagaaacctcaacgtcatccgagacaccaagacccggagggatgtgactccagaaattcaattcctgagtcgaccagcttttaaaagcatcccagataatgtcatctttagggaatttatttgggaaagattaaaagaagccgatgttgatcctggtgctcctccttatgactccctgcagacatatgcttttgaaggaaatggctcagttgctgaatcactcagctctttagattccatcagctcaaactctgatcagaactatgactacctaagtgactggggacctcgctttaaacgactcgcggacatgtatgggactggccaagagagtttgtactcatagccttggaaccttaattcgaaatgtactgaagaaaaagtaacagca

SEQ ID NO: 112203 - DNA, 303 bp, Homo sapiens
gctgactgtttaaccggtaatttaattttcctaacgactttctttacaggagctggattttgaagccaaaacaagttacacgctacggatagaagctgcaaataaagatgccgaccctcgctttctgagcttgggtccgttcagtgacacgacaactgtgaagataattgtggaagatgtagatgagccccctgtgttctcttcacccttgtaccctatggaggtgtcggaagctacccaggttgggaatatcattggcactgtagcagctcatgacccagattcttccaatagccctgtgag

SEQ ID NO: 112204 - DNA, 2829 bp, Homo sapiens
gggcagggtccccgcgcaccgcggagtgggctgtgattggaggaggagcccgtgccgggcgggcccgagcgggtgtcgagccggttcctccagtctgccccgcgcgcggagctgcgcgcactgggtccccaagagcccgcgggcgtccggcagccgagcgcacgttctttcggatgcacacgcccgggtccctggcgtctgacgccgtggggagggcagcgaggccccaggtacttactacaccattctttggcgaaggctattcagcagtggtgacctcttccaatccaacactctacagattattatctctggactcccagctgacaccctgccggaggcaagagctactaagccaactggaactgtgccttttctcttgtcaaggtttttttcttacacaggaaaaagaaagaaaaaaaaaagatgaagttgggcaaagtggagttctgccattttctgcagctaatagctcttttcctgtgtttttctgggatgagtcaagcagaactctcaaggtccagatcaaagccctatttccaatcagggaggtcccggaccaagcgcagctgggtgtggaatcagttctttgtgctggaggaatacatgggttcagaccccctctatgtaggaaagcttcactctgatgttgataaaggagatggttccatcaaatacatcttgtcaggcgaaggggcaagttccattttcattattgatgagaacactggggatattcatgccaccaagagactggatcgtgaggagcaggcctactacacgctccgagctcaagcgctggataggctcaccaacaaacccgtggagcccgagtcggagtttgtcatcaaaattcaggatatcaacgacaatgaacccaaatttttggatggcccatacacggcaggagttcccgaaatgtctcccgtggggacctcagtggtacaagtgacagcgacggatgctgatgatcctacatatggcaacagtgccagagtggtctacagtattctgcaaggacagccgtacttctcagtggagccaaagacaggagtcatcaagactgcccttccaaacatggatagagaggctaaagaccagtatttgcttgttattcaggcaaaggatatggttggtcaaaatggaggactgtcaggaactacatcagtcactgtgaccctaactgatgtcaacgataatccacctcgctttcctcgaaggtcttatcaatataacgtcccagagtcattacctgtagcctcagttgtggccagaattaaagctgctgatgcagatattggagctaatgctgaaatggagtacaagattgtggatggtgatggtttgggcatttttaagatttctgttgacaaagaaacccaggaaggaatcattactatacagaaggagctggattttgaagccaaaacaagttacacgctacggatagaagctgcaaataaagatgccgaccctcgctttctgagcttgggtccgttcagtgacacgacaactgtgaagataattgtggaagatgtagatgagccccctgtgttctcttcacccttgtaccctatggaggtgtcggaagctacccaggttgggaatatcattggcactgtagcagctcatgacccagattcttccaatagccctgtgaggtactcaattgacagaaacacagacttggagagatacttcaatattgatgccaacagtggggtcatcacaactgccaagtctttggatcgagagacaaatgctattcacaatatcacagtccttgcaatggagagccagaatccatctcaagtaggaagaggctatgtggccatcactatacttgacatcaatgataacgcccctgaatttgccatggactatgagaccaccgtctgtgaaaatgcccagccggggcaggttatccagaaaatcagtgctgtggataaagatgagccatccaatggacaccagttttacttcagcttaacaacggatgcaacaaataaccacaacttttcattgaaagataacaaagacaacacagcctcaatactgaccaggagaaacggcttccggagacaggaacaatcagtttactatctgccaattttcattgtggacagtggatctccctcacttagcagcaccagcaccctcaccatccgcgtgtgtgactgtgatgctgacggcgtagcccagacctgcaatgcagaggcctatgtcctacctgctggcctcagtacaggagccctgatagccatactcgcctgtgtcttgacattattggtgttgatcctccttatcgtcactatgagaagacggaaaaaagagccccttatttttgacgaagaaagagacatcagagaaaatattgtgagatacgatgacgagggcgggggagaggaggacacggaagcgtttgacatggctgcactgagaaacctcaacgtcatccgagacaccaagacccggagggatgtgactccagaaattcaattcctgagtcgaccagcttttaaaagcatcccagataatgtcatctttagggaatttatttgggaaagattaaaagaagccgatgttgatcctggtgctcctccttatgactccctgcagacatatgcttttgaaggaaatggctcagttgctgaatcactcagctctttagattccatcagctcaaactctgatcagaactatgactacctaagtgactggggacctcgctttaaacgactcgcggacatgtatgggactggccaagagagtttgtactcatagccttggaaccttaattcgaaatgtactgaagaaaaagtaacagca

SEQ ID NO: 112205 - DNA, 309 bp, Homo sapiens
aatgtttccagacattgccaaatgtctcctggggggcagtcacctccagttgagaactactgatctatgcatgtgtatgtttgtggcatgtgtgtatgtcagtctgtcagtagaagttagactccatcgttttgctttactcagctttaattaaacaggtgcaactgagagctcccacctgaattacatgtacacctggtgattttatcttccctgctagtggcctattctttaccaatgcttctcacagtgtaaagtgcatttgaatcacataggaatcttgttaaactgcagactccaattcagtag

SEQ ID NO: 112206 - DNA, 330 bp, Homo sapiens
gcttcttttagaagtgtcaatagcattgccatagtttaaagtcccacatcaatatttgtttattctccagccatgcagattatagccaccaccacctttcccttgccacatagctgctgcaagatatctggctcatacctgctgtttacatacagatttcccatccaacagaatcctgttgctctaagcaacactattagcctaacagaaacagccattctaagtaacctttgaatcttactgagcttcacagtattgtgcaccctggtccagattcagatttgacatttgaggctaactgtgactattgctattgaaacttctaaaata

SEQ ID NO: 112207 - DNA, 447 bp, Homo sapiens
cgggcatggtggcatgcgtctgtggtcttggctactcgggaggctagggtgggaggatcacttgagcctgggaggcagaggttgcattgagctaagatcgcaccactgcactccagcctgggtagagtgagactccatctaaaaaaaattaatgaataatttttaaatacttatgaattgtttatttctcaaactttccattaatattttccagccaaggttgatcctgggtaattgagacagggaaagagaaaccacagataaggagagactactgtataatgatattaattagtaaggtttaagtaagtatagaatttgattgtctgtacataatttaaaaagataaagctggttattcagaattatgttgtgtgtaaaggtgtaatgagaaaatgaaaatcatcaattccaaaaatgatcattaactttttcgtacctatggaa

SEQ ID NO: 112208 - DNA, 394 bp, Homo sapiens
ggtcttctggaagccctggtttcaccacaaattgtgactgtcaggacacagtgctgctatggtcaggattcctttccatatgctgcttcagcctcagacctcggtgggccttaagagtaggggctgctcagccaggcgcagtggctcacgcctgtaatcccagcactttgggaggccgaggcgggtggatcacctgaggtcgggagatcgagaccagcctgaccaatatggagaaaccctgtctctactaaatatacaaaattagccaggtgtggtggcatgtgcctgtaatcccagctacttaggaggctgaggcaggagaatcgcttgaacccaggaggcggaggttgcggtgagccaagatcgcaccattgcactccagcctgggcaacaa

SEQ ID NO: 112209 - DNA, 347 bp, Homo sapiens
cttttgccaccagggtggggggaaaagagtgcttctttgccccaaatgctggtttcataaaacctaaagatgtcacatggaaacacaccattcccccaatccccctcaaaaaactacttgcacttaaatgaaagagtaaagctgtaggactttactgagcagtgtcctgtggggtccttgcactgccatgctcttgaggggctcgaggtgtatgaattccccagcattacttctccttagaggtttcagatgagcagtatgagctccaaactcatgctagacccaagtatttcatgaaagaacaatccttgaatgactttatacagcaaagctatatttcactgtgt

SEQ ID NO: 112210 - DNA, 371 bp, Homo sapiens
agagtaaaaagacaatctaccaaatgtgagaaaatatttgcaaatcatatatctgatcaagaattaatatccagaatatataaagaactgtaacctaacaataaagacactccaatttaaaagtgggcaaagagctctctcgctctctctccttctcacattcaaatttacaaaaaggcaaagaactctagtagacatttcttcaaagtaaatacacaaatgaccaataagaagatgaaaagatgtgcaatatcagtagtcattcaggaaatgaattctgtcagaaagggactccccacaccaaaaaaaaaagaaatgaaaatcaaaccataacgagacaccactttacacctgctaggatggctacaatt

SEQ ID NO: 112211 - DNA, 324 bp, Homo sapiens
ctcacattaagctcaaagagagacctggccttcagccatttgatgtccttcccaagaggaccatctgggaaagccagtttggctccaagagcaagagttggtagggatggaaccactagaaaaccaaggccttgatgggggtgctggttaatcagcagcaattggaaaacaaggctcttgcttgagtcaaaggagttgcagccagaggacccagcagggataccaattatgaacccacaaaagtaccatgagacaaagaggcagctttcaacatctgccaggtctccaacatgtgatgccatcttacgatggcactaattcagg

SEQ ID NO: 112212 - DNA, 254 bp, Homo sapiens
tccgccctcctgggcttcccaaagtgctgggattacaggcgtgagccatcgcgcccagccattcctacttttgagaaacagtctagtgttgggtaaggcttataggcaattgtactatagtgtgataagtgttgtaatagtttaatttataaagtgctgtgtgaacacgggagagagtgattatttttgctaagagatttcacagacttttaagctggatcaaagtatgaggagagtttgctgggcgttaaagg

SEQ ID NO: 112213 - DNA, 416 bp, Homo sapiens
ccatgtttacttggctgccaccctcccctcctaccacgtgtacacacaaaactcctttgcgccaccccccgccaacttacccctaccaagaccttgacctggccttcctttggccctccatctcagcctgccccttgggcccttagaaattattaacctcgggccaggcacagtggctcacgcctgtaatcccagcactttgggaggccaaggcaggcagatcacctgaggtcaggagtttgagaccagcctgaccaacatggagaaaccccatcttggccgggcgcggtggcttacccctgtaatcccagcactttgggaggccaaggcaggcggatcacaaggtcaggagatcaagaccatactggctaatacggtgaaaccctgtctctactaaaaatacaaaaacaaaatta

SEQ ID NO: 112214 - DNA, 465 bp, Homo sapiens
ggcaggagaatcgcttgaacccaggaggcggaggttgtagtgagccaagatcacaccattgcactccagcctgggggcgacagagtgagactctatcgccaaaaaaaaaaaagattattgggacaattgatgaagtatggttacagactgtggatttgacaacaacattggattaatgctaagtgacctcattttgacaactgttctgtggttacataagggaatgcccttgttcttaggaaatatgctgatatatttaagggtaaacagacatggtatctcaaacttactcttctaatggcacaggaaaaaatatgcatatatactatcacacgtaaagagaagtagaacaaatggagccaaatgcacacagttggtaaatctggtaaagaatatattggagttccgggggttttctgcagttttttagtaaatttgaaattttatcaaaataaagttacagaa

SEQ ID NO: 112215 - DNA, 660 bp, Homo sapiens
gggcatgccaccatgcccggctaatttttttgtatttttggtagagagtgggtctcaccatgttggccagactggtctcaaactcctgacctcaggcaatctgcccgcctcagcctcccaaagtgctgggattacaggcgtgagccactgcacctggcccccactcttaatttcattccaacctcagcaatgtctcccacatataatctcatcatttgaattcccatgaacaatcctcgaatgcagagtgtttccacttgtttggaaggctataccacatttctaacatatttcgccctttcttccccgctatccttttgcccagcaacaattccaccagaggcagtttggctgttctctaccctccacacctgtcctgttatcagccctccctcaccccagcaccctaagttcttgcaacattaagttactcaacatcctaaagtagaacccatgttctcccatcgctataccttttcgatccagcttttctctcaagatggatgccagacacatttcaaatccctatgccccttgcagctctgacacttactcttctaagaaattgtaccaggttttctcctcattcacccctatggcccagtcccatctccagggcctgaattactcagcccttttgcactttgtgcttctatctat

SEQ ID NO: 112216 - DNA, 527 bp, Homo sapiens
catgagagatccatgcaccccaggtggagtggggagaacttggggagatcagataagaaatgaggacagaccaggccctcggctcatacccgtaaccccagcactttgggaggctgggattacaggcagatcccttgagtctaggagttcaagaccaacctgagcaaggaaacctcatctctacaagaaaaaactcagaaagaaatgaggagaagggctggcttctggatgctcctgacggaggcaggattcatccctggggaggaggcatcagggcctctgtgaatctcaggggtcgtgggttctcgagaagggatgaggggaccagtgttcttcctctgccaaggacagaccaagagagcgtcttgtcagatggtggctggagaggaggaaggtggcagtggacgagcttcaggaaccatctgtcagggagactggaaggagccacccacgggaagggtcaaactcaggggttcccgcctcttagaaactggggccagggctggtctggggctttttattctggg

SEQ ID NO: 112217 - DNA, 228 bp, Homo sapiens
agagttaatcatactttgatgttgtttacatatctgctttcccaccagactgaaggtctatgaggacaggagtcatgcttgaccatttgtactcccggcactagcatagaattgcaggtgcaaacaaaggtgagattaataatccctgacctgccagatcctgtcagaggacacattctaaaattaagtacttgcaactcaaagccctaaggaagacagcaggaaatg

SEQ ID NO: 112218 - DNA, 389 bp, Homo sapiens
tctcttccattgatttttctctttaatgtttcctttcttccaactactttggatttatagtgctttgctcttcattttgtagcttcttcaagtgaaaccttaggtaattgattttagatatttcttcttttctagtataaacatttaaaactataaatttctccctaaacgttgctttatctgcatcccacaaattctcatatgttgtatttttcattttcattcagttcaaaatatttttaaatttcctttgtgctttcttactttactcatggattatttaaaagtggattatttggtttccatatatctggaggttttctgtatgtcttattgttaaattctaatttaattctgttttggtcagagaaacatgttctgcatgattt

SEQ ID NO: 112219 - DNA, 398 bp, Homo sapiens
ggacaacttcaaatattatatttaaatctttcaatatgaggcaaaaaaaaaaaaagttcaaaaataacaaaaatgatatctgaaaggcaaaattttagccatcatatatttttaaaagttctggacacaaaaaatctgatgtatgaaacagaaattgaatcaaatttcttttcaaaggtttaaaatgcactctgcttatttggcagtgcctggaaaaagacaatgaactgtgtactgtggctatttgcccaagtccaagttgtgccctaaaatcaagttcaggagatgacagtgttccaaaacaagtcaaattagatccctgtggcttacacaaaccataactacaaagaaattcaaaatgttaaagctgaaaacagcctaattctagcctcctcaat

SEQ ID NO: 112220 - DNA, 779 bp, Homo sapiens
catgatcacgaaggtggttttccctgggcgaggcttatccattgcactccggatgtgctgacccctgcgatttccccaaatgtgggaaacttgactgcataatttgtggtagtgggggactgcgttcgcgctttcccctgaatttttgtaatgaaaaaatagacggcaagggttattcttaaaactgcagttttgtagcttgggtggcatgttaagtgttctccttacagtcgcaacgatgggaaacagaaagtaacgtgttatcctctccgccgccgtgagctcttttaacactagctaagtggccgcagggctcttctctttcctttccacttggggctgctttttgcagatcgcttcatagtctccagtcttttgggttctcatgctctgtgaaaaccttcgtgttttttcatagcccccagagtcacccttcacacagcctctgcttctaaccgcagcctccgcaggagtttgtaggatgtctgtgctagcggggaatgtgttctcacctcctagagccagggaagaaactacgcagtcgggtgctgttctttgggatgaaagcagggtccccgttcggttgttaacataacacgcttgctttctgtaggggaagggaggtctctcccggcgcccaggtgcccttgctcatgttcaccgaggcctgcaggtcagaaccgcagtctcacctgtcgccagaatgtgctgcgatctaccccaactacccgaactacccagcaataaaataggacacattacggaaacatgaaatagcg

SEQ ID NO: 112221 - DNA, 348 bp, Homo sapiens
agcctcctgagtagctggagttacaggtgcatgacaaaatgcccagctaatttttatatttctagtagagacagggtgtcaccatgttggtcaggctggtctcaaacttctgacctcaagtgatccacccgccttgcctcccaaagtgctgggattacaagcatgagccactacaccaggccagctttagcatagttaatgaggagattatatctctgaatcacaaatgcatattatttatcatgtctagccgtcttttcccagaagcccaactaatatatatttacagatttaattttacgtacatggtgatgttaatgagttgatgttacagattacgtgctatcc

SEQ ID NO: 112222 - DNA, 412 bp, Homo sapiens
agatgctgacaccttcagaaagacgtgtttgtggcatcagcgtcatttctttctgtggctaccaaggccgagaacttctctgtgctccatctcatggccagggttcttacagccgcaggccttctgtgtgcattagctagctaacttgtttcttctttcattcatccaataagtatgactaaactcctgcagtatcttcagcatcggcaattccacactaaataagtaaaacccttgccttcacagagatcgaaaacaaacaggaaaactgtaatgtcatgttgggtgtctggagctgtggagagaaatgaagggggccctggagagccatggctgtgccaaggccagggtggcgtcctggagaacctgccttggagtggagtgctggatctggggaggggggagtgctgct

SEQ ID NO: 112223 - DNA, 194 bp, Homo sapiens
ccagggatgctgccagacaccctacaatgcacaggatagccctgcacaacaaagaattcttcagcccaaaatgtcaatagtactgatgttgagaatccttgctctagaaataaggaagtggcaaaagaaagagtaagacaagaaaatccaagaaaaatctcacctactctgaatccccttaagagtccaactgg

SEQ ID NO: 112224 - DNA, 363 bp, Homo sapiens
gtaatcaccacaggaatccagacggggagtggggtcagttcactggtacaaggatcttgatcaaaggaactcatttcccacctgatccctattcactccagggtccacatctaggagtcccaaagaccggcatgcatgggttgggtcaacaggctgcctggaggtttacctcattccaggagttggagaagcactgtgggaggaactggggttcaaatctgcaaacctccaaaacataggagggatcttctaaaagtttctgagagttctaaccacagattaggggaaaaaaaagatgccctttcatcaacatgggatgaaatgctaggatttagacatggtttttttgtgtgtttttgtttt

SEQ ID NO: 112225 - DNA, 572 bp, Homo sapiens
tgttttattttgaaataattgaaatattaatttccttgaattttcttctcgttgactgtgctatagtgctattatatgaaaatataaatagaaggaaaagatatcaggattatctctctctctctttctcttaaagaatcaagtttatttatgaatgaaatgacgtgaggcctgggatttgcttcaaaataatctcggaagtagggggaaggagtggatagggatatagaagaaacaagattggctttggggtgataattattgaagctgggtgataagtacaaggggattttattgtactgttgctacatatgaaattttccataataaagaaacgttcttaaaaaggcaaactgggccgagtgcagtggctcacgcctgtaatcacagcactttgagaggccaaggcgagtggatcacttgtcaggagttcgagaccagcctggtcaatatggtgaaacccggtctctactaaaaatttaaaaattagctgggcatggtggtatgcatctatagtcccagctacttgggaggttgaggcattgcgccactgcactacagcctgggcaaca

SEQ ID NO: 112226 - DNA, 383 bp, Homo sapiens
atgggcacctccagcatcttcctctgcgtgctgttcctctgtggggcactgggtctcaccatgtcccctgcccggggaaggctccgctgctacatctgtggcttcaccaaaccctgccaccctgttcccaccgagtgtcgggacgatgaagcttgtggcatcagtattggcacttcaggaaaaagctgcctctcaagggcccagtgccctctgccaggctatgccacctactggctgcactcctacactctgtggcaccactgctgcgagcaggacctgtgcaacatagccgcttccccacagcagctcaccagcctcctcgcctccctgcccctctttgtggccagcttcgctgggagaggacacctcctccactagcttcc

SEQ ID NO: 112227 - DNA, 348 bp, Homo sapiens
gagtagaacaggtatttccattgctgtagcaaggtctgccagacaccaagctgctctcagcccatcccctgaggagcccagaagggatatgaacttccacccacctctcccctttcccagttctcagtgccactccttgcctaagtgcacggtaacactcgccactatttcatgtgttgatacctgcagctcccaattttcttaagaggatctgaccctgggaactgatgagggcaccaggagtgccctctcctttgacatgagaccttgagtcttgtccatggggccctggcctggcccttttcatccccaaggctgtaacattctcctgcacaacacaacacacgt

SEQ ID NO: 112228 - DNA, 566 bp, Homo sapiens
ataagacatgtagaaacactatggagaattgtctcccagcatatcttggaagcaagagctcatgctgtctagagcagacaaaccacacacataggtgtgcccaagcatctgtaatttttctgtttgtgagaggctatttttctctcatgttcgagaggccactcgatacactggaaagattcaatgtcgagataaaggacatttaagttctgattcttattctgcttctccttcaccatgagaccttaagcagcactccttgtctccagacctctgtttgtttatctgtgaagtgggcacaccatctgtcctgcctccctttaacttgctaattgtgaggcttaaaaagaatccttgaccaaaatggctttataatctaataggaaatctgggggtagaattggttcagtggttcaacatgagaactctggtcatcttccctgcaattccttaggtcagcagtggacaatgggaacataatgtgagccacatatgtcatttaaaatattcggttgcctcattttttaaagtaaaagtaaaaataaaaataaatgattaaaattaat

SEQ ID NO: 112229 - DNA, 554 bp, Homo sapiens
ggacttttcccaggagctgtcaccacagggagttaactggaaaccaagccttggggatgctttaggaacaggggcctcatcctcaagacatgactgatttcagtcacccctgaaaggctttgccttcccacctagccctctgcctcttccagatgccacatcgccatttctcaactgcctgttttgtgcccagcaatttcacacgtgttgtcttggctaagctccctgctccccaaaaaatcttcgcagcctgggcattcagccatgagggagccacggctgtagccagtggaatgacgtaccctcagtccaggatgtgcacccgggcagccaggtcccacagccactactttcttgcccccaccactgctcccacagttcccagaactcagtctccagatctgggctccaggatgcagaggctgtcctcagggtgaggggcaggtgttctgcacagtgcctcttccctgcagaggaaagtgcccccaaggcattcccagccccatcttccctccaccgcagagcctgaagcccacatcctgtgctggggccac

SEQ ID NO: 112230 - DNA, 243 bp, Homo sapiens
ctggcaagatagatagggcagaaatgcttgtgacgccagaggaaaccctgttttataaccagtgcattctggttctgctgtcagttttagaatcataaaacaggaaagaatcctgagatgtgttatcccagccttcattcatacctccagagagctgttatgaccagaattatctgttgtggagagggaaacaccttgacatttgaccttatttcttctgtctgggtagctgggcatgccact

SEQ ID NO: 112231 - DNA, 278 bp, Homo sapiens
gcatagtaaaaaacggccgcggggcaaccggaggctgattctgaatccattgctaggaatggcgtgctggatgtcttgattggctcgatcagcgggagtcccagcgtagctctatgtcaaattacgctgggttactctgcatttgcatagggcgtgaatttcttgtatccccaccctaatcttttttatgcaggcaggttctctgcctgagctgtgccatgttgcccttttctctattactgcacatgtggtaacaaaaaaaaggaagatgaagcctc

SEQ ID NO: 112232 - DNA, 332 bp, Homo sapiens
cttttttccatcttctatttcagtgttgctcttaagatagtacctactcagtctctcaggatctcgaatatgttcatacatatgagtttgcaaaccaatgagattaaaagagtgagcaaatcttagcatcctctggaaaataccacagtgtcacgtctacatgctaaagggttgggagctgtactgggaatatcttaagcagtttgttaagtggctgccatctcttactgccattgagattgaaactgtctttgcagcctgataaatcacctatggtaacagcaaaagagaggcaaggcgaggcaaggtgacttatgaatggctaaccagaa

SEQ ID NO: 112233 - DNA, 252 bp, Homo sapiens
cacctgcctcagcctcccaaagtgttgggattacaggtgtgagccaccacacctggccaatttcttataaaggtaaatatacattgatcattcaacttagaaattctacttttagaattttttatccaagagaaaaatatatcttcacaaaaagctttgtagaggaatgttcatagaatctctattcttagtggtcccaaaccagtagtaacaatccaaatgttcatcaactggtgaatgtatgaacagact

SEQ ID NO: 112234 - DNA, 316 bp, Homo sapiens
aagtatactgatttcctactattacagtagttctcagccctggtattaaaaatttgactttaggccaggcatggttggctcacacctataatctttgggaggccaaggtgggcagattgcttgagcctggaagtttgagaccagcttgggcaacatagcaaaaccctgtctctacaacaatacaaaaaattagctcagtgtggtggcatgcacctgtagtcccagctactcaggaggctaaggtagaagaatcacctgagcatggggaggtcaaggctgcagtaggccaagactacaccattgccctccagccgag

SEQ ID NO: 112235 - DNA, 976 bp, Homo sapiens
ggcacaacgacggaaagaacgagaagaactggcccaacagtatgaagccatcctacgggagtgtggccacggccgcttccagtggacactgtattttgtgcttggtctggcgctgatggctgacggtgtggaggtctttgtggtgggcttcgtgctgcccagcgctgagaaagacatgtgcctgtccgactccaacaaaggcatgctatggccctcatcgtctacactagggcatgatggtgggacgccttcctctgagcggacggtctgagctgacctggctgaggtcaggaagagccaagtgtcatgcatcattcatcagccttctccaagtcaaacaagcagtcatatcggcccgttacttcctcaatcatatattagtccaagaggtataacagtgcaacttttttccatcattcattgccagccatactcttcatagggaggcttagaggacttgagacgaggtccaaatccacccaatctggctcattttctcgctaatattttactccgaaggataatagtggagcacccagggaaggacaaacgacgaggagaagacaacttctgaagacctgtgactctttgacagtgatacataagggaactgacattgggatgagagcattgataacggcaacaacatggactcaatggagagcgttgggatggcccaacttccaatgtctacctcccaaaacgttaataggggcatatggcaacgattactaccaaggagattaggggagctctccgtagagacgttaacaccaaaggttatcccaatctaagcgtaggagaagagagatgagctgttaagggagccatcccgctactctaagagcacgttattacagcattacacattggtagagttaaatgccactattaggggtggattcttggaccgccacgagcaagcacgtgacacgaaagcgccacgcagtggaagattagcgtaaagaagaacatg

SEQ ID NO: 112236 - DNA, 439 bp, Homo sapiens
tgctgggattgcagttgtgagccactgcactaagcctgagtcgacttttttggattccacacttaagtgagatcatgcagtatttgtctttgtatgcctggcttatttcatttaagataatattttccaggtttatctgtgttgtcttaaatgacaagatttattttgttgttgttaaggctgaatagattctgttgtatatatatgctacattatctttatctcctcatctgttgatggatacttaggttgattccctatcttggctattgtgaatagtcttgcaataatcatgagagttcagatatctcttcaacatattgacttcattttttggggatatatacctagtagttggttttatatccatctcattaataactacatgaaagacaaaaagagaaaagaagaataatccagctatctaaagtcacgaaaa

SEQ ID NO: 112237 - DNA, 516 bp, Homo sapiens
tctctccatgtctctccctccctccttcgcctctttctttccttccccccatctccaagtctgtaagcagttggacaaggctatttagaaaggcttggagagacaccctagggggattgaaggtcctcagcctcagtggttagacattatcaatgacacacatcgagtgtactgaggtatattggtgctctcttaaaacacatttatttcctttcctcatgcaactaccagtgtcttttaaaaagagaggcagacgatgtctactgaaggcaaaatagagaattgaattaatcacttggataatccaggcgttgttgctctcccttctagctgctaaaaaaaaaaaaaaaaaagtgaaatttgaacaatttggactggctatctatctgtgattaaatttgtaagatatcaactaatcctataagctgttgcttgacttttcattctaccggtgttaacaaagatggatgcgcacacctgaatgggcctccagtggaggtcgttatatgggttaag

SEQ ID NO: 112238 - DNA, 762 bp, Homo sapiens
aatagaaatgttattgaatataacatacataaagaaagtggcacaaatcataaggatagaatcctaatgaattttcacaaagtgaactcccatgtaactactatgaagatcaaggaggagtactggcactctagaaggccccttatgctctcacccagttattaccttctgtcaggtaaccacaatcttgacatctattaccataacttaatgtcttctgttttttgttttttttgttttgtcttgttttgttttttgagatggagtctcactctgtcaccaggctggagtgaagtggtgcgatctcagctcactgcaacctctgcctcttgggttcaagctattctcctgccttagcctcctgagtagctgggactacaggcacgtgccaccacgcccagctaatttttgtatttttagtagagacagggtttctccatgttggccaggatggtctcgatctcttgacctcatgatctgcccacctcggcctcccaaagtgctggtattacaggcgtgagccactgcgccaggccctgctttctaactttaaataaatgtacccttttgtgtatggtttctttcactcagtattatgtttatatgctccttccatgtcatatgtagcagtaattcattcattctcatcgctgtgtagtattgcattgcacagatttacaaccatttatttatcctttctactggttcccaaattttgactacaaacagaactagaattacccagtcatagtttatgcacgt

SEQ ID NO: 112239 - DNA, 417 bp, Homo sapiens
aatagaaatgttattgaatataacatacataaagaaagtggcacaaatcataaggatagaatcctaatgaattttcacaaagtgaactcccatgtaactactatgaagatcaaggaggagtactggcactctagaaggccccttatgctctcacccagttattaccttctgtcaggtaaccacaatcttgacatctattaccataacttaatgtcttctgttttttgttttttttgttttgtcttgttttgttttttgagatggagtctcactctgtcaccaggctggagtgaagtggtgcgatctcagctcactgcaacctctgcctcttgggttcaagctattctcctgccttagcctcctgagtagctgggactacaggcacgtgccaccacgacacagtgcaccatgacacag

SEQ ID NO: 112240 - DNA, 387 bp, Homo sapiens
attttatggttagtatctgaaaaattaaactttataataggacttagtgtttgcgaagattttaggaaacaaatattttatatagaagaaatccctgtatttttaacatcacaagaaatgggtaaattactagatgagagtttttttttttttcctagattccagatggaaacattatttccataattagaattaaaaattgatcccgatattttaattttattattttattctgtatttgattttaaacattcttaagttcttggtcccaggaagtagagattattgaacataatttatagacagtaaatggcaatcatcgtatatattggattgaaagaaaaatacagcatacactgcttcaaaagtaaatgttttctttaaagg

SEQ ID NO: 112241 - DNA, 698 bp, Homo sapiens
tgcagtggctcacacctgtaatcccagcattttgggaggccaaggcagccggattgcctgaggtcaggagttcgagaccagcctggccaacatggtgaaaccccatctctactaaaaatacaaaaattagctgggcgtggtggcacacgcctgtaatcacagctacttgggaggctgagacagaagaattgcttgagcccaggaggcggaggttgcagtgagctgagatcatgcccctgcactccagcctagccaacagagtgagattctgtttcaaaacaaaacaaaacaaaacaaaattatttgttttcttttcttttcctacactaggatttcagtgtttaggtttacagagaagaagatacttgaggaggcaaaaaggagtaaaattgcagttccttttttttctaatagttacttttttaattaaagaagaaaatagttctatagtcattgttccatttgggaaatcaatgtttgataataaaagttctgttggtggctcattttttaaatctgggttgaaccctgtttctctcctagttgataatttgatcctcccatctcagagtttagtggttgatccgtaaaatgaaaaagatgtattgatccaattacctaatcattcattttgtcattctacaagtttctatttgaaataagccataatctcagcctcacgtatctgataaaggagg

SEQ ID NO: 112242 - DNA, 177 bp, Homo sapiens
ttgtggctaaaagtaaatactctggagacagaatacacctaaccagctgggtgaccctggacaaattacataaaatcttcatgctgcagtttcctcatctgtaaaatgaagataaaaacagtaactttagaagattgctgtgaggattaaccaagataatgcctgtcccatggtaaa

SEQ ID NO: 112243 - DNA, 542 bp, Homo sapiens
aagccccagacaccactgtcaacaacactatctgccaggtgacagccactagaattgcaggcacaggacttgggtagaagcatccaggtctcaaatcgaccctaacctcctctccagctcactaccgtgggtggaatgctgttctccccagaggtggccacattcgggatgtgggaaaactgaggggcccaggggcctcagtgctgacctagcattgctgctccagcattgctgctcccagtccctcccatcccagccctctccttccagacagatggaaagattgctggagcggggcacattgacctgtgtcattcaagtacaatttatagagcaaggaagggagggaggaaagtgatggagtgagggcatccagggcccaggctggactcccgttctatgcttggggtctcagtttggtctgctcaccccagcctttctccaggccccatccatgatcctgcctccacctgccctggttcccttatacccagactccagccacagccatgtgagaagatgtcacacacatactcaggcac

SEQ ID NO: 112244 - DNA, 274 bp, Homo sapiens
acaagtcttgcacattttctgtttaatttattaactaaatgtttcataatttttgatgatgttataagtatttttaattgcattttttggattacaggctgccgccactgcacctgcctaatttgtatattttttttttagtagagacagggtttcaccttgttggccaggctggtctcgaactcctgacctgaagtgatctgcctgcctcggcttcccaaagtgctaggttcacagacgtgagctaccacacctggcggatctgtagtttttt

SEQ ID NO: 112245 - DNA, 564 bp, Homo sapiens
actgaaatagctatttctgatcacagtatgccattaaaaggtattaaacagaaggtttaaggcattttagatcttcaactcttattataacctctagcctttcaaggaccaaaataagtgtttgtgcatttactgatttatttaggttcattgtgtaccttatcagaggccaactgaaacttatgggattgttatctgaagactaacagacctttagataccaacacattctaatctcttcaaggctggtcctactatggcccacatctatgggagcttattagagatgcagacttaccagcctcacctcgcacctacgagtcagaacctgcattttaacaagatccctaggggatgagcattcacatcaaagtctgaacatcaccactcttgcactgttctaacaattattcaggaatatctatctgaatttttatttttgagaaaataagatttaagctttctgagaagaggatcattccttttttttttttttttttgagacagtggctcactctgtcacctaggctggagtgcagtggcacaatcatggctcactgcagc

SEQ ID NO: 112246 - DNA, 894 bp, Homo sapiens
cctgcctcagcctctcgagtagctgggactgtaagcatgcaccaccagcctggctagtttttgtgtttttagtagagccggtgtttcaccaggttggctgggctggtcttgaactcctgacctcaggcaatcctcccacctcagcctcccaaagtgctgggattacaggcgtgagccaccatgcctgactggtagtttgtgtctttcaaaatatttgtctttatcatgtaagttgttaaaattatgagtataacattgttcataatattcccttatttttaattttggatggttctataatgctgttttgttttgtttcattatttatattggtaatttgtgtcttatttcttggtcagtctggctagaggtttgacaattttattgatcttttcaaaatacctacttttgttttcagtgacattctttattctgttttctgtttcattgatttctgctcttattttaatattttcatccttttgtttaccttgagtttaagctcttttgatagttttttttactggaagcgagattattcattagagaccacagatgcaatttgctattaccacattacatctttccttactaccttttcagttttttcaataagcaaaataacataagacacctttaaattagctaaagtatgtttccctttgtatgctcttgcttggttttgttaggaattcatgtgtaggaaaatactaaatgtatttgccacagacctgtgtctcattagctcagggaaagtgggaaagatcctcaatattaagaaaacagaatctgatttttctgaccttgttagaagtgtcataccaattcattgtggtaagtaatggctcaggcaagtctgttatgataatgccgttttagatgattaatgtaggt

SEQ ID NO: 112247 - DNA, 378 bp, Homo sapiens
aatcggacatctctgtacgctattcttacagagaatacccctgggagtaggattgtctcaaacaattccacatgtctgcttctcagggacctgtacccaccaccctgtccttccacaaagaatgtaactaagcaaaaaccctagttctgtagcaatgaccgcatttgagaacgagcccacaccccgcacttagttcaccatcatttctcttggcactgcaagaaggaggtcagaatgcagttatgttgcggggaggtcactgccacattgcagatcttttgctcataatgaagcttggcaagttaggctgggagacggcagggctgtctcatcggtgttggtttagtcgctatgggtgggtcagaacataaggggtac

SEQ ID NO: 112248 - DNA, 762 bp, Homo sapiens
taattttaaatatatgcattaatttggggcaggtaaccacgtttgctgaatgcctgcctgtcactgataaaatcaacaactttccacaaaatatcaactaaaaatgctatagtaggaaagcctgaattgaccgataactgaggaagaaatggaaagctattaaagaactgcctgttccctcaaagggtagcaggattggatggattttttcatacattcttccaaggatcagataatccccatgttgtatgaactgtttaaaaacatataaaaatcagtctcagaggcaaaatgattcggtttcctaaatccattgccgtctccccccaactccctcatgtgcagtgattatgtcttattcaacatcgaatctctgtgcctggcttgtaggaggtgcacaacgtgttgattaatctgagaggaacgtggcacaaccaaagacagcttgcagagcagccagccccagcctctgatgttataaatgtagatgtgctggtggtgggccagttctgtcgtgggcttgggtcagacctcacttgaggactgtgattactcttgggctttaagctttgagaggggagaggagaaattagaaaaggaaatggcgggcctcgtatacaggatttatgagcaggttgtctgaaaataggatgagttgcctcacataatagtatttttcctatcatcacacaagcttaagcagagtcttgggtgatactgtaggggggcagtcacatgcttcgtagtggattgggctggatt

SEQ ID NO: 112249 - DNA, 283 bp, Homo sapiens
tagtaagagcagcgtcagacaggacagtctaaaaaggactcaccattcccaaccccagggggctttcctgctacactaaaggagaacacatccatccacatttcaccttaaccttcctctactaagttctggataaaataccttacttatgaataaataataacaacaatcataactcctttagagagagggacctgtcaaatgtactctactagagatgccatcttttcccagccctccacatgcagtgcacctgcacactctgtcccaatggaagagcagg

SEQ ID NO: 112250 - DNA, 495 bp, Homo sapiens
ttagtatacatggggttttgcgacgttggccaggctggtctcaaactcctggcttcaagtaatccgcccacctcgacctcccaaagtactaggattacaggcatgagccaccatgcctggcctctatgattatgttttaaattttgagtagtatcccctttaccttgaattataatagaatgtaatatataaagcttttattataaattaagtcagaggaacgctagtttgaattgtatagttatggtttacatgagtaaagggttagtactaaaaggaagaatgcttaggtagaagtaaaaaatcatgaatatatcttgcttagtgcttatcttaaatccttagctgagaattatgtgactctgcctttaacattttttcacaatctataccaagaaagtataccattacattcatgggaaacgattgctccaataataaatatatattaagaaaatctgtcataaatcaccatactgtttgcaaaaaaaaaaa

SEQ ID NO: 112251 - DNA, 391 bp, Homo sapiens
ttgagattttttgtttgtgattcttttttttagttcatcagctattgttagtgtattttctgtgtagcccaagacaattcttccattgtggcccagggaagacagaagattggacacttctgatctagaatattcttcccctctccattgatacatttatattcacacttgaggttttagcctaaattttactttctcagtaaaccttcattgactacttctaacataagatccgcctctgccactcctatcaaggctttatcaaacagcttccgactaagctaaaagaaacactctatgcattttaaaagtagtgtatttaatagatctgattcattgcactggtgatggaagagttgaaatgccaaataggggactgtgaggcaactta

SEQ ID NO: 112252 - DNA, 391 bp, Homo sapiens
gtttcctttattataaaactgtagcactctcagtgagttctgtgagccattctagtgaattactgaacctgagggaggtcatgagatcccccaaatttgtagtcagctaggcagaagtacaggtagcttgggatacctgagattggtggctgatgtcagatgtgaaggcaatttggggactgagcccttcgcatgtggggtctgtgctaactccaggtgtttagtatcagagaggaattgaagtgttgggcacccagttgaagtcatagaatcagtgtcagagcatacacaccattatcacaatccaatatgaggaacctttgtggagtgatggaaatctgaaatctttcagttctttacttacctgatctctttgcagcactggacatgg

SEQ ID NO: 112253 - DNA, 918 bp, Homo sapiens
gctaggggctgacacttaataaatccatgtgaatggatgcaggaactctgctccgatctgttctatctgcttagtttttgcatacaattttgtttgaacaaagaaccacgtggtttatctatcagtcagggctcagcaggaaacacatggcacatatataattgggataatttgaggagagtttagtaaaggaattgtttacaaaggtgtgggcagggtgtagggaacccacacaggagggtataactggggtctagtgtcagcgggcgccatcatcattcctaggccagatgagggaaggttaagagttaatggccgggcgcagtggctcaagcctgtaatcccagcactttgggaggtcgaggagggcggatcacaaagtcaggagatcgagaccatcctggctaacatggtgaaaccccgtctctaccaaaaatacaaaaaattagccgggcatggtggcgggcgcctgtagtcccagctactcgggaggctgaggcaggagaatggcgtgaacccgggaggcggagcttgcagtgagccgagatcgcgccactgcacttcagcccgtgtgacagagcgagactccgtctcagagaaaaaaaaaaaaaaaaaaaagagttaaggggagaaggtgacgaggtagacaagatccttggctgagaccttcagtgaagggatgcagccaatcctcagagaccctggcaggcaggagcagggggaataagtacgctgactccatctccccttcccctgatttccttctgggcctccagttggcagaaccaaatcggaaggcggagggcaagacagtccattgaagtccacatggggagaagggtggagaggcaatgtgggggttgcggggagcaccaaaagaagatgcccgacagagatggctagcacccccgcccccac

SEQ ID NO: 112254 - DNA, 893 bp, Homo sapiens
gctaggggctgacacttaataaatccatgtgaatggatgcaggaactctgctccgatctgttctatctgcttagtttttgcatacaattttgtttgaacaaagaaccacgtggtttatctatcagtcagggctcagcaggaaacacatggcacatatataattgggataatttgaggagagtttagtaaaggaattgtttacaaaggtgtgggcagggtgtagggaacccacacaggagggtataactggggtctagtgtcagcgggcgccatcatcattcctaggccagatgagggaagtggctcaagcctgtaatcccagcactttgggaggtcgaggagggcggatcacaaagtcaggagatcgagaccatcctggctaacatggtgaaaccccgtctctaccaaaaatacaaaaaattagccgggcatggtggcgggcgcctgtagtcccagctactcgggaggctgaggcaggagaatggcgtgaacccgggaggcggagcttgcagtgagccgagatcgcgccactgcacttcagcccgtgtgacagagcgagactccgtctcagagaaaaaaaaaaaaaaaaaaaagagttaaggggagaaggtgacgaggtagacaagatccttggctgagaccttcagtgaagggatgcagccaatcctcagagaccctggcaggcaggagcagggggaataagtacgctgactccatctccccttcccctgatttccttctgggcctccagttggcagaaccaaatcggaaggcggagggcaagacagtccattgaagtccacatggggagaagggtggagaggcaatgtgggggttgcggggagcaccaaaagaagatgcccgacagagatggctagcacccccgcccccac

SEQ ID NO: 112255 - DNA, 265 bp, Homo sapiens
caccatgttgctcagactagtcttgaactcctgcaatcctcccacaaagtgctgggattacaggcgtgagccactgcacctggccacaatcttccattttaacttgtcaaatttattagcataaacttgtttaaatattcctttattatccttgcatgtctgtagtacttgtagtgaaagaattccctttcatttctgaaactggtcatttgtgttttttctgaatcagactagctagaagtttatcaattttattgatcacact

SEQ ID NO: 112256 - DNA, 473 bp, Homo sapiens
tacgaaatcccagggctttcccttgccacccttctcattgtctcctgctatcatcaggaagttatttatgattttaaaaagaaaaagcccagcctgggcaatatagtaagagttggtctctactatacttttaagaaaattaaaaaatgttcttaaaattagccaggtgtggtggttcacactgtgtaatcccagctacttgggaggctgaggtgggaggattgcttgagccctggagacagaggttgcagtgagccgacatcatgccactgcactccagcatgggtgacagagtgaggccttgcctcaaaaaaaagaaaaaaaaaaaaaagaaaaaaccctctgttatattgcacttaatcccattttcttttattccagctatcctggactgcaggtcagttcatcagttataatccctccctctgttcctatcctcctttctttgagtgaaacaattctacttccttaaa

SEQ ID NO: 112257 - DNA, 379 bp, Homo sapiens
cttcgaatcttttgtgtttcaaggagtttattggagatctgggctgggatgggctgggcttcctgacctgaatgttctctgagactgaaaaaagagaaacacatccttccaaatcaacctaccatttcaactcctttatctcttggtaatttgagtcctgaaccccaccacaaatacctctttgtgtgtatatgtgtgtgtatgtgtattttgctgctttcacattttttccatatcaaataaattggctcttatacaagttctatataaagactgttttggagaaaaagaggagagggaaaaaatgctttctttttctttcctgactcaacccattacatgattccctttgacctttgtcttcattttttttctctca

SEQ ID NO: 112258 - DNA, 273 bp, Homo sapiens
taaagtgaagataaaatatccaatttcgctggattattatgaggattaaatgtacataacaccattaacacagcacctgtgtcataacgatacactcattaaatggtaatactaaaaacaaagctttgttgatgaccatcaaactctccagcctctcttgaatcctggcctcaagctgcagtattctcttaacagactctgcacgtcaatgatttgtggctttgaaaatgcaataccttgtttttttcctgcaatgctcttctggcaaactcc

SEQ ID NO: 112259 - DNA, 446 bp, Homo sapiens
ttcttccaatccatgagcatgggttttgtgttccatttgtgtcatctatgatttctttcagcagtgttttgtagttctccttgtggagatctttcaccaccttggttaagtatattcctaggtattttattttattttattttattttattttcatttttgcagctgttgtaaaagggattgagttcttgatttgattttcagcttgcttgttgttggtgtataaaactgtatgttctcatttataagtgggagctaaactgtgagtacctaaaggcatacagggtgatataatggacttagaagagaccttgaaagggaaggttgggaagggggctagggataaaaaactactcgggtgacaggtgcaccaaaatctcagaatctaccactatagaattcatccatgtaacaaaaaaccacttgtacccccaaagctattgaaat

SEQ ID NO: 112260 - DNA, 1201 bp, Homo sapiens
acacaccaagttgccatctcttcaaaaaaggaatctagagacatcagtgtgtgcacaagcatggtttgtgaatttggaagtgtgtatgtgcatagttgtgctcaagaatgtgttgatgattataccttctcagaatgaaggtaattttttttttttctttttttttgagatggagtcttgctctgttgccaggctggagtgcagtggtgctctcagctcactgcaacctctgcctcccggcttcaagcagttctcctgcctcagcctcccaagtagctgggactacaggcacacaccaccactcccggctaattttttgtgttttagtagagacggggttttaccatgttggccaggatggtctcgatcccccgaccttgtgatccacccgccttggcctcccaaagtgttgggattacaggtgtgagccaccgtgcctggcctgaaggtcatttttataaagatctctccacgtcttagatttgattcttcctttaaatatttttctcattgacatttgaaagcacctgaccttatataaaatgaacaattttcataactccataaaaggagaattatggcatcatctatttctttctcttgtctcataaatctaaaccatcaacctgcttatttttgtatactgtcacactgtgtattccctgcattgaatgcctgtctgttgacattatctgtaaaaattgtgggaagttttctgcaccctgaaatttctgttatgcggattaaatatccactatccatgtttttccaagtcttacagtagaaagggtaaatgcagccctcacagcagcctgttgttcgtcctgcaaatgtgtttccatcacattacacaaagcctctttgtcttcgtggttctaccctactaataagttttttaaaaaattatgtaatgtgtgtatatacaaatacctatatgtatgtgtgtacacatacagctgatatctgctgagattatgtatgcatgaactatagaattaacttgtaattttaagaaaataaattattttgtaaagataaatctcatgtttaagaagaggaattacagttgaatcatttagggatgcctcagcctaaacataatatggaaaaagccataaccaaaagtcattttagagtactgctaggttactcaacctatcatcacatttaattaaaatgtcagtttgaaccatgaaaaatc

SEQ ID NO: 112261 - DNA, 216 bp, Homo sapiens
cgtcgactctgacatcccgtatgcatctgtgctcaaatgtcttctagtcccaaatgttcagcattcctcaaccttggcaccaccaacacgtggaacaaagaattctctgctgggtgtggggttgggaggggcccatcctgcacacagtaggacattcagcagcatccctgggctccacccacgggatgctgggagcacagaccccagcccagtcat

SEQ ID NO: 112262 - DNA, 216 bp, Homo sapiens
cagtttcagtttcgcaaaatgaaaagcattctacagactgattgcacaacaatgtaaacagttaatgctactgaactgtacacttaaaaatggtgaagacggtaaatttcattttacgtatattttactacaattaaagtttttaaagatgttttttaagaagtaatgtgggaggctgggtacagtggctcacggttgtaatcccagcactttggg

SEQ ID NO: 112263 - DNA, 380 bp, Homo sapiens
cctacgtttagaagttcaatagcacctagttttagaagtttcaatagcatttcataaggctcaaactcaagtaatcattcacattgttatctgacccagtctattcagtatctagtggtgaatgattacttgagtttgagccttatgaaatgctattgatcactgtatttagataacacccaacctttgggacttcaagaaattttaaagcatacaatgtaaattctatgtatattctaacttggagaaaacttggaacatggtaattgggggtcatgagttaggtataaagatgaacattcactttgtttattactgtttttcactgacactactctagctacatccaatttcttgctgtatttcagacataccacagc

SEQ ID NO: 112264 - DNA, 327 bp, Homo sapiens
caccgtaagtgatggcgtgtgagcagtgacgcatccacagccagctaatctgtattgtgtaaaaacacacaaaccacaaattatttttaaaagggaagaaagcagaagaacagatgcagcaaactccttgtatcacgtgaattgaggagaaaaactccaccagatgcgtttctgagcaacagcagagggaacactagcatgcccagatggggcagggagttctgtctgcctgcttctctggggaagacacctttctttgtgtccaatttccaggacagtgacactgtctatttttgtgtgcatgtatttcttctttctctttcttta

SEQ ID NO: 112265 - DNA, 755 bp, Homo sapiens
tgaagaaatctgagttctgatcttaacctagcctcttgtcagctgtgtgaccatgattcctctagatccatatttcctaattgcaaaacaagaaaattgtgttatttgactttcttccaaatagtctgaggcattaataatttcaaaagtcttttatagtattatttcttcaaaacagcatattttggtttctttcattcttctctcctattgctatgcaataaaaaaaaattcagcctgaaagaagtaccatttaattttcttttgtttaaggggctgtgggaaattgaagtagaacatttatcaggtgcccttaggctacaaactaataatggaggaaatggccctgaatcttcctagcacctgtgggccttgccttagaagatgcctgacaaggacagttgaaatatttagtggtacttgatgtgctagagtatgaaaccaagtgtaatttcagcaatttcgagcccatcgaacttgcctagctagtgcagttagtatagcccacaaatggttatgaaggaagcagttaatagtaatggtttcctgtattacttggcatattttgaaagcaaattaattttaaaattttacttttaatgctagcttatttgtgattgtctttcctcccaaacttgatacttgaatttgtattaggtttccacttttaaggcaattctatatattttgtttcatattattgccagtgaaagctatcttatagtattgttagaacagtgaaacagaggtgaaag

SEQ ID NO: 112266 - DNA, 532 bp, Homo sapiens
ataaacaacagacatttatttcttatagttctggaggccaggatgtccaagatcaaggtgccattagattccgtgtctgctgagggcccacctcctggctcatgaatgatgccttctagctgtttcctcacacagtggaagtggcaaggcagctctctgggactctttcaaaaaggcactaatcccattcaggagggctctcccctcacgacctaatcacctctcaagggccccaccttctaacaccatcacattgatgattaggtttcaaaatatgaatttgaaggaggacatacacattcataccatagcagaggagaagaaaaattaagcatgttttgccttaaactcttaagaattctacacacacacacacacacacacacacacacacactacactacactacagcttatatttaatgctgaaagtctgaatgctttccccctaagagcaggaataaggcaaaggtgtccattctcaccatttcttttgaatatctcactggaaacctgggccagtgcaacagggc

SEQ ID NO: 112267 - DNA, 284 bp, Homo sapiens
agacaccattggctggcaatctaacagtcatttctccctttcttccttgctaagagaatcccaatttgtccaacctcctttgggtgaccacatccttcagggaggctgggttattccaaaaagtcttgagtattcttatcaaggtagttttattatcctaggcaaattaactgctttaggcttagactcgtgacccaatttttgccaatatgatataaagtacagtctgtttggggacttctagaaatgtcttcccattctaaataaaggaaaaaaaaaactgg

SEQ ID NO: 112268 - DNA, 456 bp, Homo sapiens
tttgcttgttcacgcatggatgtggtcattaatcccccagatttgagcctctagaaaaatctgggcagcaagataagtgttctgagttctgccaagctcatcaacttctagaactctcttttgagaggatgtggtagtgactatggctccctttacatataactgttttcaaatctaaacatctaactagaaataatttgttccacagtgatagaaaagtgttgctgttactcactggggcagtctccagcattattccactggtgtccccatttaaaattacctttaatacacctcagttttatttacttgccagtttataacatccttaggaaaagagattctaggattaagcaaaacaagggatgtttttaaatactgtaactttttttttttttttttttttttcctttggagacagagtcttcattctgtcgcccatgcttgattggccag

SEQ ID NO: 112269 - DNA, 433 bp, Homo sapiens
gcctcagacaggccacagtctcccactggactgagcacctgggagtacaggccacgctcacggttcacagaacaggctcaggagtaacaagtgaccatgggcctgctgctggggctcatagtcccccgtggggaccctgattcctctgattgtgggtgatttcaaatctccttagagttctgcatttcatgacatttctgcatggaatatgctttatttttaaagtaaaaaaaaacctaagtgctcccctccctttcattttttgagatactctgtcaccgaggctggagtatagtgccgcagttacaggtcactgcagcctcgaactgccaggctcaaagaatcctcccacctcagactcccaagtagctgggactacaggtgcacaccacctgcctggcttacttttttttttttttttttaacttttttt

SEQ ID NO: 112270 - DNA, 1692 bp, Homo sapiens
  misc_feature (392)..(392): n is a, c, g, or t
atgaaaattgggttaccctgaggactcttgcttaactgaaatcacaaatggagcagacagaaaaatcaaaagtatatgctgagaacggactcttagaaaagataaagctttgcctttcaaagaaaccactgccatctcccactgagcgaaagaagtttgaccatgactttgccatctccacttcctttcatgggatacacaatattgttcagaaccggagcaaaattcgcagggtgctctggttggtggtggttctgggctcagtctcacttgtgacatggcagatctacattcgcttgctcaactacttcacatggccaaccacaacgtccattgaggttcaatatgtggaaaagatggagttcccagctgtgacattttgtaatttgaanaggttccaaacagatgctgtagccaaatttggtgttatttttttcttatggcacattgtatccaaagtcctccatcttcaagaaattactgccaattccactggctctagagaggctactgattttgctgcaagtcaccaaaacttcagcattgtggaatttatcaggaacaaaggtttttatctcaacaatagcactttgttggactgtgagttttttggaaagccatgtagcccaaaggattttgcacatgtcttcactgaatatggaaattgttttacttttaatcatggtgaaactctccaagcaaagagaaaagtgagtgtctctggaagaggtttgagcttactcttcaatgtgaatcaggaggcattcactgataacccagcccttggtttcgttgatgctgggatcatctttgttatccattcaccaaagaaggtgccacagtttgatgggttaggcttgttgtcacctgtgggaatgcacgcaagggtaaccatccgccaagtgaagacagttcatcaagaatacccttggggagaatgcaatcctaacatcaagctgcagaattttagcagctacagcacttctggttgcttgaaggaatgcaaagcccagcacataaaaaagcaatgtggatgtgtgccttttcttcttcctggatatgggatagaatgtgacctacaaaagtacttcagctgtgtttctcctgtacttgaccacattgaatttaaggatttatgtacagtaggaacacataactctagctgccccgtttcttgtgaagaaatagaatacccggccactatttcttattcctcttttccaagtcaaaaagctttgaaatatctttccaagaagttgaatcaaagccggaaatacatcagggagaatcttgtaaaaattgaaattaactatagtgacctaaactataagataacccagcagcaaaaggcggtgagtgtgtctgagttacttgcagatcttggtggtcagctgggtctattttgtggggccagtctgatcacgatcatagaaattattgaatatctattcaccaatttctactggatatgcattttctttttgctgaagatatctgaaatgacccagtggactcctccacctcagaatcatctgggaaataaaaataggatagaggagtgttaatggtcacttagaataaaatagtttccttttcatgataccttcagatttatcttgactaattcattgttacgtcacttttctatagttttgagagttcgataaaagccattaaagatatgtatctctt

SEQ ID NO: 112271 - DNA, 162 bp, Homo sapiens
caccatcactgcagcctcaacctcccaggctcaagtgatcctcccacctcagcctcccaagtggctgggactacaggcacacaccaccacactcagccatctaaaaaaaatattttgtagagacaggttctctctatgttgtccaggctggtctcaaactcc

SEQ ID NO: 112272 - DNA, 783 bp, Homo sapiens
caaacgtgaaaggaataaaggagaaaacaaaagcaacagtgattctgagggttgtagcatggatggctggaaggatggtggtgccattgacagagaagggacacagatgaggaggaacaaacctgcctaggagttccatcgtgaaggtgggtttagacacagtgaatgtgcctgcaggtggaatgcccagtggataggcacacttaaaagatctggtacttggaaaataaatctgggctgtacatatctatctgagagttaacagtatatatatattgatagtatcagaagctggagaagggccttgaggaagtgaggttgtccagggagaatatggagagtgaaaaggaagagagaaaagagtggagcctgtggaacatcagcatccagggtgcatatgctttggaaaaggtctggaaagctctgctgaaaagaggaaattctaaggatggctgaaaatacttggttagagagggaggaggaaaaccaggaaaaagcaatattgccaaaactaaggaaagttttaagcaaggagggaatggtcaataacggctatgaagtagagcctgaaacgctggacttgactgtcatgaggacattagttgtcttgtggaatcatttcctggggatgaggtggggcagaagataagagtgcagtgagtcaggagtgcgtgaagcaggaggaagtgaagctaagtagacaactctttcaggaactttggctacacacagaagaagagagatggggtgagagctaaaggttagaagtggttgggaagtgtg

SEQ ID NO: 112273 - DNA, 413 bp, Homo sapiens
tcactctgtagccaggctggagtgcagtggcttgatctcggctcactgcaacctccacctcctgggttcaagcaattctcctgcctcagcctcccaagtagctgggagtacaggtgtgtgccaccatgcccagctaatttttgtatttttagtagagacggggtttcaccatgttggccaggacggtctcaatctcttgaccttgtgatccacctgccttggcctcccaaagtgctgggattacaggcgtgagcaccacgcctggctagtggcatagaggaaggtctaatgaaaatgatcaaaggtctgacaagtgactctacctttaatgataaaaagatggttccttgatgggcagaacatacagtacaccagaatgaaagcaggaactgacggctccacttcctgcagtt

SEQ ID NO: 112274 - DNA, 350 bp, Homo sapiens
tcactctgtagccaggctggagtgcagtggcttgatctcggctcactgcaacctccacctcctgggttcaagcaattctcctgcctcagcctcccaagtagctgggagtacaggtgtgtgccaccatgcccagctaatttttgtatttttagtagagacggggtttcaccatgttggccaggacggtctcaatctcttgaccttgtgatccacctgccttggcctcccaaagtgctgggattacaggcgtgagcaccacgcctggctagtaagtaaatattaatttatttttaaatatttgatattataaaatacctaaaagcagtaagattgatcattaactataatag

SEQ ID NO: 112275 - DNA, 450 bp, Homo sapiens
tttatgtgtcctacaatatatttgcaatcatagtcaaccatcttaaagacgacagaggaattgaatgcatcttcttctccctcaaactattttgttactatcatctgatttctattctttcaggtgatttgccactttaaaaggcagtaagtttataaaagaaattctcaattaacaatctagttaaaggaacctagacattggcacataaagcaattttatgtcattgtttcaagatgctaaagaattcccttggctgggcatagtggctcactgaggcctataatcccagcacttctgagaggctgaggtgggcggatcacctgaggtcaggagttcgagaccagcctggccaacatggtgaaaccctgtctctactaaaaatacaaaaattagctgggtgtgttggcacacacctgtaatcccagctactcaggagcctaagacaga

SEQ ID NO: 112276 - DNA, 287 bp, Homo sapiens
tcattccagggaggtccatggggggtggccatgaataaactcccatgcccatgctaccctctgaagtggcagacaagcagctttcccaggtgggattacagccaaccacagttgagagcggcttctaaccagccctacctgaggtgggactcgaactcagattctcagcaaaatccacattctgaaacagcctgagtttccctgtccttatgatcccaactcttcttttgggtgtggggttcacatggagggcatgggagctctgaatgagtttttccaagcaggta

SEQ ID NO: 112277 - DNA, 202 bp, Homo sapiens
caccacacccacctgctttttaaaagtattgcacaaagacattatttatcatgatcactgagcttttgggagacccttaaattttgcactggaggtatgcgtcttgttgacctcaccccagtgctggcccctcatgtaaccccaggagcatcagacactgttactgccagcccccagccacggggcctggagtaaggagagt

SEQ ID NO: 112278 - DNA, 726 bp, Homo sapiens
attccaagtgatttctgtcacccgccggcggaccgagagtctagggttcggggcgcgcaggctgcctcggcgcagacctcttcccctcagggaggccgtctcctgaccagacccactcctgcctcccacccgggtgccgtgtttagggttattttaggctgctcacctgacagattgtacacaagcccttaattgcccccctctgtttgaggtcgtggtgaggtttcatatttcgcagccacgctcaaattgtgccgtcatgttacagttgtaggtgatgaaataccggctgcttagacgcgggatcggtttttataccggggcaaacgctagtggtcccagaatgcagagttgggggcctcaaggaatccgggtgtgctgagataattggttaattgcttgattaaaattggggattaattttagagttcttccactcggagctcgcttctgtgctgaagatgctttgcaacgccttgaggaaaacgcgccaaagaagtttctgttagacttgagttacaagattgcagatttttcttgatttgctagtatgtttttttttacgttcgtagagttttataggtagatagataactttggttcgggtagttttccttttaaaatttgtagagaactgaaagtggctgatatgttagcttttttagggggacggggtcggggaatggagtctcagtctgttgcccaggctggagtgcagtggcgcga

SEQ ID NO: 112279 - DNA, 308 bp, Homo sapiens
cgtatttgggtacttataggacactatttgtaaaaacatttatttcttcagacattgatggtcttgtcccagttattaacaacatttacttgtttaagaataaattttcttttctatctacttctttttccattgaaaattacctttctatcctcctactctggaagtctttatgattctgtcctaataattagtgtcccattgcttcttcaagagatgtctatcagaatttctccattaatataagttgatacttctatgaaaactttaaatctcaagtctacagtatttctagttctaaaaaatat

SEQ ID NO: 112280 - DNA, 435 bp, Homo sapiens
ggcctagagttttaatgtgtggtcagactgtttattgattaattggttttcaagagggaaacatgttctttcaggacatagggtctctaggacaaaaataactttaaaagaagaggtggagatgttagagaacactctaataactcctatcacttcacagctgggaaacctgaacccccaaaggggtaagagattttagaaagtttcaccaaattccccatttctctggacagaattggactctagatggaggactagacattttcccctagagccgtgtttccccagggcattgagaggtgttaggagatgcaagggctccatggccgtacatgtggcaactcctaaattaaacattccctaaatgcaggacttctcagagcatttactctgctaacaagtggtctgcttttctaagagctggttaaggtaggt

SEQ ID NO: 112281 - DNA, 466 bp, Homo sapiens
acacaaagaaaacttgttttactgaatataacacacatgaagaaaactgcacaaatcatcttcaccaaatatttattaagcaggccctctcacctacttaatcgtagataagatcttcactgtcttgatcctataataggagagtgagacaataaacaaattaataaattagacggctcaaatgccaaatagttatttgtattgtgtggatttaagataggattatatgatagtgactgagttgccactttaaattgagtagatctggaagacttctgaagaagaggcctttaacctgagatcttattgtcgtaagaaaagcttgtcagaggaagaacattctagtctaggtatcagttggtagaaaagccttgtggtaaaagcagctttgatactgaaaggaggccagcatggctgaagcatagggagtaagaggagagtggtttgagataaagttggagaaata

SEQ ID NO: 112282 - DNA, 403 bp, Homo sapiens
cagccacctacaaggaagggggtgttgttactgtatgcttatacacactgaggaaactgaggctcagagggttcgacccattaagctgttgggaactgaagtctggccttcctactctaccccaacacattgtgagctgagcagaaaaaaaatggctgcttcctttttcactataggaagcattctcactgtaggaggtaagatcattcacatttgaagaggcttccattccctagtctcttttccattcatctcatctgtaaaatgcagacaacacttctcactttgcagggcatgtaaggataagtgataacatgtatgagtgaccagctgcatgctggtcacggtcaaaactgagaccatggcagtcccagctgttggtggctggcaatgtgtcctcttc

SEQ ID NO: 112283 - DNA, 865 bp, Homo sapiens
  misc_feature (499)..(499): n is a, c, g, or t
cagggtggttcatttcccagccctgggtcaagggcctgccttcgcctcagggactctcttcctttggatgagggggtccttgggtttcccagctgcttcctgctcagctgggccaccccctcccaccctggggttggggaggagcagggagtgggtgcccacagttttcctttgcttctcccagagctggtttgcacagcccttgtgtgtggggctagaatgtgccttagtcctgaatcctagcccttacccccatcctctctagacggtatgtcctgacataacagcagagtctggtgtggtgctggtgagggttcgccagccctcccctccccagggtcatagagggggccatgaggctggaattggccagtgactgaatcttggagatgtcggccaggtgctcccattggggtttctagcctgccctagggggaggtggtgatgttgggagtgggatctcctgagtccttgttgggcagaattggtgaggccaggnatggcagggaaaagtggtaacaagcctctctgcccatctacttccaatccctctctcccttactgattttttgatgccctgtcttctgggcccctaggagggatgagagaggagtagccccctttttcagagagtttggggtctacctcagagctctccctgtcaaaaagcagctgcaagcctcgcaagggtggagtggggggagactgaggaccagtagtacctgcagggtgcccgtggctgtggccagtgtcccttagccaacctgctgggctcaccagttccccgtctgatctgcctgtgcgcctcccattcttctctacccagaacctgtcatgggctggggctcagattttcctggctttg

SEQ ID NO: 112284 - DNA, 415 bp, Homo sapiens
tggggttgtcaatatggctgcgttgggatctgttcaccttcaggctgagtcgagactgaggtgaaaaagcggaaaaacgcgagaaaaggtttccccgttgtacagaggctagagtgaggctcggctgaatcggttgcaggcgttggtgcctctgtcagcgtccaggtcactgccgctcccgccccgctcttccctggctgtgctggcggaggctgcgccgatgaacctgactgagggttcatagcagtggcagcaatgcttatggatgctggacaggattatatggtttttgaggacgtggccatacatttctcccaggaggagtggggaattcttaatgacgttcagagacacctgcacagcgatgtgatgctggagaactttgcacttttgtcctcagtaggtaaggccctga

SEQ ID NO: 112285 - DNA, 417 bp, Homo sapiens
cttatatttgatgcccatataagccctattagttggcaatccttttaatctctattttacacataagggcaccgagacttaaggaagttcagtcctcatcaagacactgaaccctgaggacttactgtgtaccctcagataactttgctctagttgcagggccagaggtggttgtacagtcagcctgtaggatgctgcaatgctgtcttaatcctcatggcctgcctcttcccacagggttcatagcagtggcagcaatgcttatggatgctggacaggattatatggtttttgaggacgtggccatacatttctcccaggaggagtggggaattcttaatgacgttcagagacacctgcacagcgatgtgatgctggagaactttgcacttttgtcctcagtaggtaaggccctga

SEQ ID NO: 112286 - DNA, 364 bp, Homo sapiens
aattaagagaacctattgtttttgagagcattctgaagcttgaacttctctaccctctgtttcaaaaaaaaaagtaagcttatttggggagagttttagagctctgttcttatgaactgcctctccccttgggtaaattctttaagtcactcttctggaagctggatggggaagtctttttactcggagttggagggtgtgagaaatgctctgacctatgctgtgggtaagaaactgtatcccttgactggaggctgaggggagagggagccctgaaatggtagccacatccacctagagtggagcttttgtcaagctaagttgagattaggagaaagggaaggaatgggtttacctcaaaagt

SEQ ID NO: 112287 - DNA, 448 bp, Homo sapiens
ggtttatcggccaagcaggttcgaaggaagagctaaatccttatgaaaccctccactatacctcatggaaagttcccagagacttaaaaagcagcacgtgcaaaaattaggagtggtggtttcctattgctcaattgtaaggcagaagccaatgcatgaagatggaaatgtgactaagagggctttgaagacaaggtataaatagccagtgtgctcaatcccacctcttcccttctcacctaccacttggcagataaagccagaactctggggcttcttgtggtgtattgtcacctcctcctgtggttaaccgagacaagggtgtggctaagaagtccaaattattcatcgcattaaaagatggctgcctgtttaacccctgcatgtgatagcttcacatagaagaaaacatttctgtaacctccagatgcaatccttactctgctca

SEQ ID NO: 112288 - DNA, 196 bp, Homo sapiens
tttttttttttaggaaagagcatactttcagaacaaggatctctaataatcaatttatcttttttttaacaaggatattatattatcattatttttgctacttgaatgtagaataatttttaagaattgaccgtatttgggagctgatgatctactctccggacaccatttagccccctgaaaactggctcttcct

SEQ ID NO: 112289 - DNA, 588 bp, Homo sapiens
tacgaaatgccaatggaattggttttagctctgaaaattttgagactatatatgaacggacagaaaagtagtaagtgatttccagttggccaaatctaagaggtggttggtacacactaaagattatttattgggattgttaattgccctctgctattgtattctgaaatacagtatagccaaaaatgtaaataaatacttaaaatatttacataaattagtagatagtaaggaatccaagatatatggatttggcctaacctttgaggtttatataaaggcgaacagtcggtgtttttcacagtgcgatttttattttaattttaacttttaaaatttgttttgatttgatacagtactgctctggataggttttggatcagacttgctgtgacagttcttgcactccctaaggtgctgtaccaagggcatgctattttctgtgtgaggagccctatcagatacataaaaacaaacaacatcctttgagatatatctaaaaataggatatgaattttgtaaaaagcatagcaataaattccaagtgtgtgatcatagtagagcattagtaatgagagaaaggatttg

SEQ ID NO: 112290 - DNA, 376 bp, Homo sapiens
gaaagcccagatgccccatgcagagagaaagaggagcaccatcccccactgcatgggaccaggacaattaaacgagacaatgtgtgcagcgaagaacagcgaatgacactgggcccaacatcttctgaagctttggtggccatcagtgaggaagggaggctgttttccagcaagaattgttttctctagacccgtggttctcaatggaagtgccagggtatccccactcccaatgtgaggacatgtggcaatttctgcagacattttgggttgtcacaggtggtctgggggtggtgtgctactgacattactatttggaggaaaactgttaaaaagaaagaaagggcctggtgcgctggctcacgcctgtaatccc

SEQ ID NO: 112291 - DNA, 812 bp, Homo sapiens
agttcaagcagttagtcttaatatcactatttgattaaatatatgcaagttttggaagctttctatgtttatggacaagtgatcctctcaggctttgccttatttctgtgactcagagataacaaaatataaattctaagtcctttctattttttatgaaacctatttgtagggatttgagttacagaaaaatacatactttctttacatttatgaccataactaacaacagggctactaaataggaaatttagtgaaggtcactcagccatgaaccaatgtgagtttgtttttaatattttattaaattttattcatgtgccaggttgttaggacacaaaaagggaaccagaaatcagacagttgtttaaaaacattaaacaccctgatgaggtttgcatccttgtggttttctctgctgccctgatagttctttaaggttctgtcattttcaatcaacagagagtacatgtgatcagtatatctgataaacttgtcaatgcctctttgaagcagtattccctgacctattcaagtcagacccccctgcttcatttcaagtatcatcttgataagacagagctatgtcacaggcagctgtgtatagccagctctgtgtacaactaatttgtgcaggaaaaaattaaatcaggaggtaaattatttcatgattgctcattcccaacagagttgggcatcattctgaagaaaatatcaaataattggtttcagaccgtgtcagacacatgcaattcccttctctaatggctgtgtgtggtagcaccaggcctcaggggtcagcaaggaactgg

SEQ ID NO: 112292 - DNA, 1039 bp, Homo sapiens
ctggtgtctgccacaagcctgatcactccaaaaagcacatttttaactaccacaaaacccgtatcactcttagaatccaccaaaaaaaccatccctgaacttgatcagccaccaaagctccgtggggtgctccaagggcatttggagagctccagaaatgacccttttctccaccccgacttttgctgcctcctccccctgggcttctatgtcttgggtctcttctggctgctctttgcctctgtggtcctcatcctgctgctgagctgggttgggcatgtgaaaccacaggccctggactctggccaaggtgctgctctgaccacagccacacaaaccacacacctggagctgcagaggggacggcaagtgacagtgccccgggcctggctgctcttccttcgaggttcgcttcccactttccgctccagcctcttcctgtgggtacggcctaatggccgtgtggggcctctagtggcaggaaggaggccctcagctctgagtcagggtcgtggtcaggacctgctgagcacagtgagcattaggtactctggccacagcctctgagggtgggaggtttggggaccttgagagaagagcctgtgggctctcctattggaatctagttgggggttggaggggtaaggaacacagggtgataggggaggggtcttagttcctttttctgtatcagaagccctgtcttcacaacacaggcacacaatttcagtcccagccaaagcagaaggggtaatgacatggacttggcggggggacaagacaaagctcccgatgctgcatggggcgctgccagatctcacggtgaaccattttggcagaatacagcatggttcccacatgcatctatgcacagaagaaaatctggaaagtgatttatcaggatgtgagcactcgttgtgtctggatgttacaaatatgggtggttttattttctttttccctgtttagcattttctagttttccactattattgtatattatctgtataataaaaaataattttagggttgggagtga

SEQ ID NO: 112293 - DNA, 391 bp, Homo sapiens
atcgtatgaaaactttttaatttagagacatcatactataaaataaaattttgtaagcacattcacagtaaaggtgagttagcattatctgtgtgaccttgggcaaattgcttacaggtgtcttcacctgtaaaaatgagagtttaggactaggtaaagtttcaggggacttctagctgtataatgctatgaattgataatcaagtaccttaggggtcagaagacttcggttatctttcagtttcatatttgatctattagacaatatcaacaaagcataagctactgatgctggtgttgccaggttgggttaccagcctgcttggtgccaggtggggtccccttaggttagtatacttaccctcagaatgtcctgtgatcacttcttata

SEQ ID NO: 112294 - DNA, 184 bp, Homo sapiens
taagcagaaaaattatcttaaagttcaccatgttccttctattttttaagataaagaaacgaagattcggattgggttagtgtggcatccgtgattgaataggtactcagtagtaaaaccagtatcagacattatttataaaaaattagaagctgaaacttaatcattccgctgcttctttatg

SEQ ID NO: 112295 - DNA, 724 bp, Homo sapiens
cttgataaactcacaagataggtcgtattcttgtccctatttttgagacggtgagatgcaatggagtcagccaacccagttccaccacataccagtagccttggccaaatcatgtgcttcatctttaagcctcagacaagacctaccccatcaggttgttgttgcaaggaacaagtgaagtaacctggcacccagctgttgcccagcacatgttaggggctgacttgcctaaggctgcactgagagtattttgcaagtggactaaagttgaactgctttgggaagatatttggcttcttactttgtaagttggagtaaagattgtttctaaatctagttcttttcctttttgtctctagattaaactcttactatatcattcagttaggagctctcatgtttagccaacgttctcagaaagtgatcagttcaagggctgtggcatggaggggaagtgatgcaagctttattatgatacagatgagtaaccatataaaatggaaaataatatttgttctccccacattcccatcccctcttaccaacctaatatttatctatctatctattttgaaatatttgaggcagagtctctctctgtcacccaggctagagtgcagcggtgcaatcatagctcactatagcctcaacctcctgggctcaagcagatcctcccacgttggcctcctgagtagctgggactacaggtgtgcactaccatgcc

SEQ ID NO: 112296 - DNA, 536 bp, Homo sapiens
ccctatgaacgcatctaatatgatttctgcctacagtagatgcacgctagttttctctcttccttatttcttggtcacaaattctactctctcatcacaacgttatttggtgaatgaatgaaggaaggtctttacatacccaaatcctccctgctcttgatgatcccctacttctctcaagtcgacagttcaagtgcctgcatcgaatagccactgagcatcactctgggcagagagcagagctaggcctcacagactccctgatgaccacagtccctgttgcaaaggattttctggtctaatgagggaacaggcaccgtgagagaaacaagaggatggataaaatgttgtcagctggagagatgttcagaattattttgctcacccacttacacattttccttcatttccgaagtaagcatttactgcaggaagaggacgtggccacccctcacccctggtgatgggtctggggacttctaaaggaagccctttttgtttgacatccttgtttctatttgctgtgaagtgatcta

SEQ ID NO: 112297 - DNA, 462 bp, Homo sapiens
acctcatagcagcatagtcaatagtggagcatgactgagtagtgtccacagcttccacccatgaaatagcctcttgggtgggggtggccaatgaaggcatttccatgcagtagctcatccatatcaccagtccatccccatgatggaggtccatgacaagacagttctgagccatcaggagcatttactcaaggagaacggggtgtgtatatcacagtgtttccaaagtacgttgcactgaactttaatccaatgagaataaatgattctctggagaagtacataatatactccctttagatatgtgcagtacacattagtttttaaagggctccaaggtgttctatagttaaagaaacctatttaacttttcaactcattgtttcccaaacttaccatgggatctccctacttttttgcataactcttattaatattcataagaaccatggtctgtgcctt

SEQ ID NO: 112298 - DNA, 309 bp, Homo sapiens
agttggtggtggtaagagtgaagaggaaaacttcttgcgatggtgggtcgtggagggcaggtgcagaggaagtgagagagctggagggctgggatatgtgagtgaaggatttctagtgaagtctttctgggtgatgatgaaaatcggggtgtgcgcctgagggtgggggtgaaagtctgttgagtgtagcaagcaggggaactggggtatttgtatttgatggattgtccttcttgacattgacggtacccaggttgcactgagctgagatcacgccactgcactccagcctggacgacagtatgagac

SEQ ID NO: 112299 - DNA, 873 bp, Homo sapiens
ttagagagttatgaagcagctgccaggggatgaagtggcattctgtattacatgatgaaaacatgctgatgaaccaagggaatgcagagatctcatttgaacttaatcacacatgtatacactatactgctagtatatgtgcattttaaatctattatataattttgcattcagccttcatataatcttcttcaggcaatgcagtattacctgactgaaaatatggggagaatgatatagtaaaattgagtgtttttctatccgtgtagtatcaattacctaaagcctttaagtttgaagggcaacacactatgaatgcaaccaaaaaagcacaatatatgcatgtgaagtagtccatacattgtagtgttaccttatttggatggctgtagatgttctgtttcaatgtcaccccaagaataatttcatcagcattcaatgtcatattactgatcatctgctgtccactcagcaccacactatgcattttatttttaagtgtaatcctcagaacagctctcagaatatcggtattactttcttcattaaacagatatggaaattgaagccaccatggttaagtaacttgtcccgggttcacacagttggcatgctgtagaggtaagatttaagcaaaagcctgtctgaatgaagcacctgttttttcactctaccccatggtttctcagttgctggagggatgtagaaaacaacggaggggggaagggcctcctgacatcatgcacatgtgagatccactagtcagcttgctcctgctgaatactctttctggaccgagctaaatttgcagatatttgctcagttaaagcctcttcaggatttaatctcaagcgtctaccattttgctagatc

SEQ ID NO: 112300 - DNA, 850 bp, Homo sapiens
cacgggttttttgtttgttttggggtttttaggttatttctttttagagagggagtctcgctatgttgcccaagctgatctcaaacttctggcctcaagtgatcctcctgccttgaccttccaaagtggagagattacaggcatgagcccgtgtgcccagcctagtcataggttttaatggatttaatttcccaccaaattaccaactccactcttatgaaaatctagagagtttattactaataaaaaagaattgattacatgttttatttcacacctagactgaactcctagtacagtgaattagagacaaattcataatttattgaaattccccttgctgtgggcacatatgtccatagtagatgtagcatttggtaggagtttcaagaaaagcagggtaaatatttcagtgaattctcatacagagttaagaaaaaacttacatgaaatataaaatcttagacaggatacacttatagacaactaaggataatgatgagtatcaggtagcaaggaatatattcttcagctaggttcataagatattacccattaaagctaggcgcggtgggtcatgcttgtaatcctagcactttaggaggccaaggaaggtggattgctggagctcaggaatttgagaccagcctgggcaacatggccaaaccccatctctacaaaaaattcaaaaattagctggatgtggtggcaatgcctgtagtccaagctactcaggggttggggggttaaggcaggaggatcgcttgaacccgggacatcgaggatgcagtgagccgagatcgtgccactgcattccagcctagttgacaaagtgagactttatctcaaa

SEQ ID NO: 112301 - DNA, 297 bp, Homo sapiens
ctgaaatgccactctctcaatgaggcttcctggacttccctatttaaaattgcaccccctcctgacattctccattccttttcctacttatttttttctcgcttaacacttaccaccttcagacaagctatgtaatatactcctacaataccttcattgtcttcctttgccagaatatcagccccttgagggcagagatgcttatctctttggttcatagctgtatctccagcacctagaccagtactgggtgtatagtaggtgctcaataaatatttgcatatttggccaggcacg

SEQ ID NO: 112302 - DNA, 326 bp, Homo sapiens
ctgaggctggggctgggacccaggaataggcagtccccaggaaatacaggcagagctgggctgagagagcatggctgaagccaggaccaggtgaggagagagtgaggcagaggttagaggcagtgggggttcccaaggacatcaggacattagaggacaaccgcacagctgagggagtgtcagagcatccaggagcatgcagggctcgagggcaagcctcaaggagtgggtcggcgtgttcaggggcgtttctgtgaacactggggtgctagaaatgcatcactcagagaaattgtgtcaaggggtcaaggagaatctgggggtgt

SEQ ID NO: 112303 - DNA, 388 bp, Homo sapiens
cgaatgttcttaaactgattgtggtgatggtagcacaattctgtgcatatactaaaaaccactgatttgtatgctgtaacaggtgaattgtatgctctgtggattatatctcaaaaaagctgttgcagacataaaatggctaggaatgtttggcaggggaaaaagcgatttccaagagaataggtatcaggttcttcaattataatgctctttgctttccatttgcttttatgctcatttccaacaaaaagaaggcagtcaacacattaggattacacactggaaatccacagtatcctcagaaaataataaactgctgatttgcttttacgtggctttatgaaattagaatctaaacgaagaaggcatttcattttatcatttaaag

SEQ ID NO: 112304 - DNA, 348 bp, Homo sapiens
atctgcccacctcggcctcccaaagtgctggtattacaggcgtgagccaccgctcccggccaaacatgattactatgattttaaatggaaacaaatgattcatgaaataccgtttaattactactactaataaaatagctttagcgtataaatctttgagtcaaatgtgtatgtactttttaatctccttttaatatcaaacctatttatggaacacttgtcccatttaaatgtatgttttctgttgatcagtttgacttacttacctaccgaggtcagactttggatattataggtattctcctgaaagtatccctccactattttctcagcacaccgggctgtatg

SEQ ID NO: 112305 - DNA, 463 bp, Homo sapiens
aggaattatactaggaagtagcggtaaaggaagtgagaaggcttagtaaatagaagaaatgtgaacttatcaaagtggctagagtagacccctggagattcttgattaagtgaattaactagattttagaaaggtaatgaggcagtcatatgcaaggaagatttcaaagtctggagacaagaagtcaagcaatactttgagaagtggttgagctttatgggaatggagagaattacactattgagagatgttaaaaataatgaagagggtttcaccatgtgaaattgtgtttttcatttgaatctgagaaacaaatgagcagagagagaggctggagataattatgtctaaaagacagtggggtacagggagcataaaggccagggagaaagggaactgcaggaattagtgctgagaagcaggagttagtggaggaaggaggagatccagtcccagatacagg

SEQ ID NO: 112306 - DNA, 724 bp, Homo sapiens
ccaaaagagcacatcttgcttcatcccatttatatgaaatgttcagagtaagcaaatctacagagacagaaaatagattagtgtttgctgagggctggggatgctgtgaacaggaaatggaaagtgattgctaggagtacagagtttattttggagatgataaaaattttctaagctcaggttgtggtgatggtgaattacacacttttaaagggtaaatttcattcattgacgtttgatgtgattgttggtgtgtttggattaacatctgtcatttttgctgttttctgtatgcctcacatcttttttcctccttttattctccctttattgccgtctttctgataagcagatattttctagtgtttcatttttattttgttgggttttaaaaaactttcttttttttttttttttaattgggtctctagggatcacagcatgcgtctaaatttatcacagcctacttcagattaatattaaaacttagttctagttaaatatagaaattttgctctaatatagtttcattttcttttccctcttttgtgttattattgtcacatgttacaagccccacagtatggttttataattattttatgaaatcttacatcttttaaatcagtcgagaagaaaagaaaaaatgtatttatgccatcttttatatttgcccatgtatttaccttttctcatgttttttctttcttattgtaaattggag

SEQ ID NO: 112307 - DNA, 324 bp, Homo sapiens
ggctaattttttgtgtttttagtagagacagggtttaaccatgttggccaggctggccttgaacttctgacctcaggtgatcagcccaccttggcctcccaaaatgctgggattacaggtgtgagccaccgcgcctggccatgtgttgttataaggcagtaaatttgtggtaatttttgtggagtaatggataatgaatacaattgtatattagtcatttttgtataagcctcacttctttgggtgagcagggatcatattctgtctgtgtcctcatgtctagaacagtgtctggctcatagctggtgtccagtaaaattttaa

SEQ ID NO: 112308 - DNA, 338 bp, Homo sapiens
ctggtcataccaaggtaaatacagaattggggaataagtgttaggaaacctttaaagcaatgtgacgctgcagtgtgtctaaatgtgtgagaatggactcccttggagcagggcataggccagttatgtgtgagtcatacgtggtgcttgctgagtgctgaccaggcaaactatggtcaggtccatgacagactggaaatttaggaagaaagccaacaacaggtcattcactgcaaattcacgccctggccaccacaagggttcatgtgtgggcatccattcttacattgaaactctgtgattttgatactctgatgcaaattaaaggatgttaaaat

SEQ ID NO: 112309 - DNA, 616 bp, Homo sapiens
ccattctgtagcctatgctcggagggcacatgagcaagagcttgaccatctgtaccgttggttgacttgctctattaagggctatgatttcaggtcgtcctgcgtgtttagaggaggcgagtggaatcttgagtctcggctggagaaggcagagcacgggcatgcagacctcaaagcctcaaacctgcgtgtgagaggagaagttggcgagctccagcgtatggtccacggttggtactctaggaagatacaagacaacagcttctgcgaaccagtaagagtggcctcattagacattggatttgccagtgacttgatcatggacttcccagtctccaggactgtgagttataaaggtctttcaccatatttgctgtccttgggcaagatcagagtcatctttggaaggaaaagcatctctggattttgttaaataccatcttaggaaagtactctctgctcttcaaagtcagcgacgacatgagtcactgttacagaacccacagaatgtgtcccttaaaatactgagaatgaacactattttactgcctgcataattagcactagacaggtgaatttattactacttcattaaatagatgagtttattaactca

SEQ ID NO: 112310 - DNA, 342 bp, Homo sapiens
ccattctgtagcctatgctcggagggcacatgagcaagagcttgaccatctgtaccgttggttgacttgctctattaagggctatgatttcaggtcgtcctgcgtgtttagaggaggcgagtggaatcttgagtctcggctggagaaggcagagcacgggcatgcagacctcaaagcctcaaacctgcgtgtgagaggagaagttggcgagctccagcgtatggtccacggttggtactctaggtgcgagctgaggacaggggcttttgtttttcgcgctcccaggtagcgccagcacctatagtagctccaggagcacagaaggcgttaagtgtgcattgg

SEQ ID NO: 112311 - DNA, 3036 bp, Homo sapiens
gcccagttggagccagacagcggggtggacaagtggcgtgtgtgctgcgaccccgagggaagatgaacgggacgcggaactggtgtaccctggtggacgtgcacccagaggaccaggcggcggcgggcaggaagacctatgccatggtgtccagccactcagctggtcattctctggcttcagaactggtggagtcccatgatggacatgaggagatcattaaggtgtacttgaaggggaggtctggagacaagatgattcacgagaagaatattaaccagctgaagagtgaggtccagtacatccaggaggccaggaactgcctacagaagctccgggaggatataagtagcaagcttgacaggaacctaggagattctctccatcgacaggagatacaggtggtgctagaaaagccaaatggctttagtcagagtcccacagccctgtacagcagcccacctgaggtggacacctgtataaatgaggatgttgagagcttgaggaagacggtgcaggacttgctggccaagcttcaggaggccaagcggcaacaccagtcagactgtgtggcttttgaggtcacactcagccggtaccagagggaagcagaacaaagtaatgtggcccttcagagagaggaggacagagtggagcagaaagaggcagaagtcggagagctgcagaggcgcttgctagggatggagacggagcatcaggccttactggcgaaagtgagggaaggggaggtggccctagaggaacttcggagcaacaatgctgactgccaagcagaacgagaaaaggctgctaccctggaaaaggaagtggccgggttgcgggagaagatccaccacttggatgacatgctcaagagccagcagcggaaagtccggcaaatgatagagcagctccagaattcaaaagctgtgatccagtcaaaggacgccaccatccaggagctcaaggagaaaatcgcctatctggaggcagagaatttagagatgcatgaccggatggaacacctgatagaaaaacaaatcagtcatggcaacttcagcacccaggcccgggccaagacagagaacccgggcagtattaggatatccaagccgcctagcccgaagcccatgcctgtcatccgagtggtggaaacctgagctgcctggagatggttgctgccattgctgctgcctctgcctcggagaagcccactgcccctgttggctgttaacactgcctttgacttcctgactgtcccctggctgcacccaggacttcgggctcctgtgtctcaccattcccaagcccctggccactctaagctgggcagacggagcacgagcacctattcaaggcactgcagccctttggaagacattgtcctgcaagcaggagccagggcaatatctatattcctacagtgactatttttctctgtagagagcctcccttctgttgtagactggactctggctgcgccataagccaggccttcatcagattgggagaggtgacaagatttgcctcagccctaaaagctggagacacagatgtccagagtgattggagaatgtcctgggggaatgaagttccttccacaaacacagctcagttcttagcaacaaactgtttgtttttctacttgctccatctgcagcctacgctgccctggcctcctgcagacagatagtggggttacctggcaaggcctggtgagagccagtgaacctaagctttgactgggtggccttgtctttctggggaggagggaatgtacattcagggagtagccttttgcggaaaaattctctagggctacagacagtcatgtgtgacttctctctgctgtgaaaactcccagagtctctttagggattttccctaaggtgtaccaccaggcacacctcagtcttcttgacccagagcctgaaaactgttttcactgggttccaccagtcccagcaaaatcctctttgtatttattttgctaagttattggtggttttgcttacatctcatgattgatataataccaaagttctatagccttctcttgcagtatttggatttgcttgaaaccgggaaaactgttcccattaggcttgttaatgtcagagtgacactattatgaatctttctctccctttcctctgcctgtttcttctctctttctccttcaaacttgctctgcagctaaggaaggtgagtctactttccctgaggctttggggtcagagtatatgttgtttggagaaagagggcaatcaggactcttctgggacccagatgagttcttcactagcccttctgaaccccttgctccataattggtcttttatcctggctctgaatgaccctgcaggtcatcatggttttctttttttattgtttttttttttttctgagacagagtctcactctgtcacccaggctggagtgcagtggcgcgatctcagctcactgcaacctctgcctcccggatttaagcgattcttctgcctcagcctcccgagtagctgggactacaggtgtgccaccacgcctggctgatttttgtatttttagtagagatggggtttcaccatactggctaggctggtctcgaattcctgacctcaggtgatccacccacctcggcttcccaaagtgctaggattataggcttgagctactgtgcccggcccatggtgtttttctttagggctcttcctacagccttgagaagtagataggcatcagagtatggtactataggaatcagaaaaattcaaaacaaatgtggattaagtgtttaggctctatgtggctcacgcagccagaatccttaagtctgtgtgtttctgtgtctcaagactgggctcacattctggctttgtccataacaatgctctgggatttcagggagttccctcatttgtaaaatgagggggtcagagcaggtgatatccatgtttcttccctttctgatattgttgtctgtggcatattctttgtatggcgaatttaataaattatattaatgtgtctctttga

SEQ ID NO: 112312 - DNA, 761 bp, Homo sapiens
caggagttctgggcttgccatgtggtgtctgagccatctctctctctctctctctctctcatctctcttgggccaggcgggcaggaagacctatgccatggtgtccagccactcagctggtcattctctggcttcagaactggtggagtcccatgatggacatgaggagatcattaaggtgtacttgaaggggaggtctggagacaagatgattcacgagaagaatattaaccagctgaagagtgaggtccagtacatccaggaggccaggaactgcctacagaagctccgggaggatataagtagcaagcttgacaggaacctaggagattctctccatcgacaggagatacaggtaataggaaatggtccatggttgggtccccaccgaggaggtggggttgtgccaggcagtctcatttaccaattacccagtgtgtgctaaatctagcatccctgccaggaatggagaaaatagaggtgatgctggcttctctggagcactcacaatctggttaggactctccagccgatgagcacttacatttacacatgtcagcttaaacataagtacacctgctcctgaaacactgtacagaaattgaacttatataaattaaatatcatcagttgttagcaaacctcttatctataaggattctgtgatcaagcttcttataataatagaattttgtaaagcagacaatcacctgtaaatccacacttctcataagctgatcttgcttagtttgggtgatacc

SEQ ID NO: 112313 - DNA, 297 bp, Homo sapiens
gtctggtactactcggcctcacgacctcttcaacctgcactgtggccttcagtgtttaggctctatgtggctcacgcagccagaatccttaagtctgtgtgtttctgtgtctcaagactgggctcacattctggctttgtccataacaatgctctgggatttcagggagttccctcatttgtaaaatgagggggtcagagcaggtgatatccatgtttcttccctttctgatattgttgtctgtggcatattctttgtatggcgaatttaataaattatattaatgtgtctctttga

SEQ ID NO: 112314 - DNA, 2900 bp, Homo sapiens
caggagttctgggcttgccatgtggtgtctgagccatctctctctctctctctctctctcatctctcttgggccaggcgggcaggaagacctatgccatggtgtccagccactcagctggtcattctctggcttcagaactggtggagtcccatgatggacatgaggagatcattaaggtgtacttgaaggggaggtctggagacaagatgattcacgagaagaatattaaccagctgaagagtgaggtccagtacatccaggaggtggtgctagaaaagccaaatggctttagtcagagtcccacagccctgtacagcagcccacctgaggtggacacctgtataaatgaggatgttgagagcttgaggaagacggtgcaggacttgctggccaagcttcaggaggccaagcggcaacaccagtcagactgtgtggcttttgaggtcacactcagccggtaccagagggaagcagaacaaagtaatgtggcccttcagagagaggaggacagagtggagcagaaagaggcagaagtcggagagctgcagaggcgcttgctagggatggagacggagcatcaggccttactggcgaaagtgagggaaggggaggtggccctagaggaacttcggagcaacaatgctgactgccaagcagaacgagaaaaggctgctaccctggaaaaggaagtggccgggttgcgggagaagatccaccacttggatgacatgctcaagagccagcagcggaaagtccggcaaatgatagagcagctccagaattcaaaagctgtgatccagtcaaaggacgccaccatccaggagctcaaggagaaaatcgcctatctggaggcagagaatttagagatgcatgaccggatggaacacctgatagaaaaacaaatcagtcatggcaacttcagcacccaggcccgggccaagacagagaacccgggcagtattaggatatccaagccgcctagcccgaagcccatgcctgtcatccgagtggtggaaacctgagctgcctggagatggttgctgccattgctgctgcctctgcctcggagaagcccactgcccctgttggctgttaacactgcctttgacttcctgactgtcccctggctgcacccaggacttcgggctcctgtgtctcaccattcccaagcccctggccactctaagctgggcagacggagcacgagcacctattcaaggcactgcagccctttggaagacattgtcctgcaagcaggagccagggcaatatctatattcctacagtgactatttttctctgtagagagcctcccttctgttgtagactggactctggctgcgccataagccaggccttcatcagattgggagaggtgacaagatttgcctcagccctaaaagctggagacacagatgtccagagtgattggagaatgtcctgggggaatgaagttccttccacaaacacagctcagttcttagcaacaaactgtttgtttttctacttgctccatctgcagcctacgctgccctggcctcctgcagacagatagtggggttacctggcaaggcctggtgagagccagtgaacctaagctttgactgggtggccttgtctttctggggaggagggaatgtacattcagggagtagccttttgcggaaaaattctctagggctacagacagtcatgtgtgacttctctctgctgtgaaaactcccagagtctctttagggattttccctaaggtgtaccaccaggcacacctcagtcttcttgacccagagcctgaaaactgttttcactgggttccaccagtcccagcaaaatcctctttgtatttattttgctaagttattggtggttttgcttacatctcatgattgatataataccaaagttctatagccttctcttgcagtatttggatttgcttgaaaccgggaaaactgttcccattaggcttgttaatgtcagagtgacactattatgaatctttctctccctttcctctgcctgtttcttctctctttctccttcaaacttgctctgcagctaaggaaggtgagtctactttccctgaggctttggggtcagagtatatgttgtttggagaaagagggcaatcaggactcttctgggacccagatgagttcttcactagcccttctgaaccccttgctccataattggtcttttatcctggctctgaatgaccctgcaggtcatcatggttttctttttttattgtttttttttttttctgagacagagtctcactctgtcacccaggctggagtgcagtggcgcgatctcagctcactgcaacctctgcctcccggatttaagcgattcttctgcctcagcctcccgagtagctgggactacaggtgtgccaccacgcctggctgatttttgtatttttagtagagatggggtttcaccatactggctaggctggtctcgaattcctgacctcaggtgatccacccacctcggcttcccaaagtgctaggattataggcttgagctactgtgcccggcccatggtgtttttctttagggctcttcctacagccttgagaagtagataggcatcagagtatggtactataggaatcagaaaaattcaaaacaaatgtggattaagtgtttaggctctatgtggctcacgcagccagaatccttaagtctgtgtgtttctgtgtctcaagactgggctcacattctggctttgtccataacaatgctctgggatttcagggagttccctcatttgtaaaatgagggggtcagagcaggtgatatccatgtttcttccctttctgatattgttgtctgtggcatattctttgtatggcgaatttaataaattatattaatgtgtctctttga

SEQ ID NO: 112315 - DNA, 3499 bp, Homo sapiens
gcccagttggagccagacagcggggtggacaagtggcgtgtgtgctgcgaccccgagggaagatgaacgggacgcggaactggtgtaccctggtggacgtgcacccagaggaccaggcggcggcgggcaggaagacctatgccatggtgtccagccactcagctggtcattctctggcttcagaactggtggagtcccatgatggacatgaggagatcattaaggtgtacttgaaggggaggtctggagacaagatgattcacgagaagaatattaaccagctgaagagtgaggtccagtacatccaggaggccaggaactgcctacagaagctccgggaggatataagtagcaagcttgacaggaacctaggagattctctccatcgacaggagatacaggtggtgctagaaaagccaaatggctttagtcagagtcccacagccctgtacagcagcccacctgaggtggacacctgtataaatgaggatgttgagagcttgaggaagacggtgcaggacttgctggccaagcttcaggaggccaagcggcaacaccagtcagactgtgtggcttttgaggtcacactcagccggtaccagagggaagcagaacaaagtaatgtggcccttcagagagaggaggacagagtggagcagaaagaggcagaagtcggagagctgcagaggcgcttgctagggatggagacggagcatcaggccttactggcgaaagtgagggaaggggaggtggccctagaggaacttcggagcaacaatgctgactgccaagcagaacgagaaaaggctgctaccctggaaaaggaagtggccgggttgcgggagaagatccaccacttggatgacatgctcaagagccagcagcggaaagtccggcaaatgatagagcagctccagaattcaaaagctgtgatccagtcaaaggacgccaccatccaggagctcaaggagaaaatcgcctatctggaggcagagaatttagagatgcatgaccggatggaacacctgatagaaaaacaaatcagtcatggcaacttcagcacccaggcccgggccaagacagagaacccgggcagtattaggatatccaagccgcctagcccgaagcccatgcctgtcatccgagtggtggaaacctgagctgcctggagatggttgctgccattgctgctgcctctgcctcggagaagcccactgcccctgttggctgttaacactgcctttgacttcctgactgtcccctggctgcacccaggacttcgggctcctgtgtctcaccattcccaagcccctggccactctaagctgggcagacggagcacgagcacctattcaaggcactgcagccctttggaagacattgtcctgcaagcaggagccagggcaatatctatattcctacagtgactatttttctctgtagagagcctcccttctgttgtagactggactctggctgcgccataagccaggccttcatcagattgggagaggtgacaagatttgcctcagccctaaaagctggagacacagatgtccagagtgattggagaatgtcctgggggaatgaagttccttccacaaacacagctcagttcttagcaacaaactgtttgtttttctacttgctccatctgcagcctacgctgccctggcctcctgcagacagatagtggggttacctggcaaggcctggtgagagccagtgaacctaagctttgactgggtggccttgtctttctggggaggagggaatgtacattcagggagtagccttttgcggaaaaattctctagggctacagacagtcatgtgtgacttctctctgctgtgaaaactcccagagtctctttagggattttccctaaggtgtaccaccaggcacacctcagtcttcttgacccagagcctgaaaactgttttcactgggttccaccagtcccagcaaaatcctctttgtatttattttgctaagttattggtggttttgcttacatctcatgattgatataataccaaagttctatagccttctcttgcagtatttggatttgcttgaaaccgggaaaactgttcccattaggcttgttaatgtcagagtgacactattatgaatctttctctccctttcctctgcctgtttcttctctctttctccttcaaacttgctctgcagctaaggaaggtgagtctactttccctgaggctttggggtcagagtatatgttgtttggagaaagagggcaatcaggactcttctgggacccagatgagttcttcactagcccttctgaaccccttgctccataattggtcttttatcctggctctgaatgaccctgcaggtcatcatggttttctttttttattgtttttttttttttctgagacagagtctcactctgtcacccaggctggagtgcagtggcgcgatctcagctcactgcaacctctgcctcccggatttaagcgattcttctgcctcagcctcccgagtagctgggactacaggtgtgccaccacgcctggctgatttttgtatttttagtagagatggggtttcaccatactggctaggctggtctcgaattcctgacctcaggtgatccacccacctcggcttcccaaagtgctaggattataggcttgagctactgtgcccggcccatggtgtttttctttagggctcttcctacagccttgagaagtagataggcatcagagtatggtactataggaatcagaaaaattcaaaacaaatgtggattaagtgtttaggctctatgtggctcacgcagccagaatccttaagtctgtgtgtttctgtgtctcaagactgggctcacattctggctttgtccataacaatgctctgggatttcagggagttccctcatttgtaaaatgagggggtcagagcaggtgatatccatgtttcttccctttctgatattgttgtctgtggcatattctttgtatggcgaatttaataaattatattaatgtgtctctttgaaaaaaaaaaaaaaaaaaaaaaaaaaaaaaaaaaaaaaaaaaaaaaaaaaaaaaaaaaaaaaaaaaaaaaaaaaaaaaaaaaaaaaaaaaaaacaaaagaaaacaaaaaaaaacaaaaagaaaaaaaaaaataaaaaaaagcgaagaaacaaaaacagacagagaggggggggggggacaccaacactccgagcgacgaccccaaaacagcgggaaatgagagcagggacgacccacaggggacagagggaagacaaccgacagaggggggaggagcgtaagatataaacgagaaggtgggaggagagaagaagtacggagaggagaggaagagggaagaacggagaaagacgaacaagcaggggggcgaaaatgagggaggagcggaagagggacgaaggaaggagacagagggggagggaagaaaaaaaagagacggagccagaagggagcgaaaggaggcg

SEQ ID NO: 112316 - DNA, 405 bp, Homo sapiens
ttatattaatgtgtctctttgacctcctggtctggtttcctttcacttttcagggaggatgaaagaagaacattttagtgcttcttggaagatgggcaccctgttatccacatgtgggaggtgtggtccaaacatcccaaatgccatgatatgaggactttgtggcatttatagaggtattagaagaagctcacctccgtgctctgagtcgtgattgtaggaggcagcccctaactttagctttgaccctctctggagcaatggccttgtaggatccctaagcctggccgcattgtgtctcatttggaagagatagaggtagagtcctgtgattacatagagatagaacagcagcactggaggtagatgagtaactgcatgccttctgcagaaatgaaaagcact

SEQ ID NO: 112317 - DNA, 615 bp, Homo sapiens
tgtgatgacagttcttttttgagggtggtctggacgagatggtccaaaccagtgtgtgcctgggaggggggaccttttcttactgagtcagaaacttgagggcttccccttcccttccttgttctggctgtaggtggacacctgtataaatgaggatgttgagagcttgaggaagacggtgcaggacttgctggccaagcttcaggaggccaagcggcaacaccagtcagactgtgtggcttttgaggtgagatttgggatttggggagaaggtgccctaagggatgggctactgaacacaggtgccagtgatgtctcagcttggacttcctgtctttctggctgagtgccacaaactggaaaggcaaggctgtgaagcctggaacgcttgtctgcttttccctctcctggacgtttacactgtttactgtccaaggccagcccatagttcaaaggtcagctcgggattctctgctctgatgagtttgagggtggtgcccatctggggcagccggtgattcagaagtcatttctgtctgtgtcgtggtaagaatccctgggctcttgagactccgtgcaggcaaggactgctgctgacatgtcacccccgagtct

SEQ ID NO: 112318 - DNA, 3111 bp, Homo sapiens
gcccagttggagccagacagcggggtggacaagtggcgtgtgtgctgcgaccccgagggaagatgaacgggacgcggaactggtgtaccctggtggacgtgcacccagaggaccaggcggcgggcagcgtggacattctcaggctgactctccagggtgaactgacaggagatgaacttgaacacatagcccagaaggcgggcaggaagacctatgccatggtgtccagccactcagctggtcattctctggcttcagaactggtggagtcccatgatggacatgaggagatcattaaggtgtacttgaaggggaggtctggagacaagatgattcacgagaagaatattaaccagctgaagagtgaggtccagtacatccaggaggccaggaactgcctacagaagctccgggaggatataagtagcaagcttgacaggaacctaggagattctctccatcgacaggagatacaggtggtgctagaaaagccaaatggctttagtcagagtcccacagccctgtacagcagcccacctgaggtggacacctgtataaatgaggatgttgagagcttgaggaagacggtgcaggacttgctggccaagcttcaggaggccaagcggcaacaccagtcagactgtgtggcttttgaggtcacactcagccggtaccagagggaagcagaacaaagtaatgtggcccttcagagagaggaggacagagtggagcagaaagaggcagaagtcggagagctgcagaggcgcttgctagggatggagacggagcatcaggccttactggcgaaagtgagggaaggggaggtggccctagaggaacttcggagcaacaatgctgactgccaagcagaacgagaaaaggctgctaccctggaaaaggaagtggccgggttgcgggagaagatccaccacttggatgacatgctcaagagccagcagcggaaagtccggcaaatgatagagcagctccagaattcaaaagctgtgatccagtcaaaggacgccaccatccaggagctcaaggagaaaatcgcctatctggaggcagagaatttagagatgcatgaccggatggaacacctgatagaaaaacaaatcagtcatggcaacttcagcacccaggcccgggccaagacagagaacccgggcagtattaggatatccaagccgcctagcccgaagcccatgcctgtcatccgagtggtggaaacctgagctgcctggagatggttgctgccattgctgctgcctctgcctcggagaagcccactgcccctgttggctgttaacactgcctttgacttcctgactgtcccctggctgcacccaggacttcgggctcctgtgtctcaccattcccaagcccctggccactctaagctgggcagacggagcacgagcacctattcaaggcactgcagccctttggaagacattgtcctgcaagcaggagccagggcaatatctatattcctacagtgactatttttctctgtagagagcctcccttctgttgtagactggactctggctgcgccataagccaggccttcatcagattgggagaggtgacaagatttgcctcagccctaaaagctggagacacagatgtccagagtgattggagaatgtcctgggggaatgaagttccttccacaaacacagctcagttcttagcaacaaactgtttgtttttctacttgctccatctgcagcctacgctgccctggcctcctgcagacagatagtggggttacctggcaaggcctggtgagagccagtgaacctaagctttgactgggtggccttgtctttctggggaggagggaatgtacattcagggagtagccttttgcggaaaaattctctagggctacagacagtcatgtgtgacttctctctgctgtgaaaactcccagagtctctttagggattttccctaaggtgtaccaccaggcacacctcagtcttcttgacccagagcctgaaaactgttttcactgggttccaccagtcccagcaaaatcctctttgtatttattttgctaagttattggtggttttgcttacatctcatgattgatataataccaaagttctatagccttctcttgcagtatttggatttgcttgaaaccgggaaaactgttcccattaggcttgttaatgtcagagtgacactattatgaatctttctctccctttcctctgcctgtttcttctctctttctccttcaaacttgctctgcagctaaggaaggtgagtctactttccctgaggctttggggtcagagtatatgttgtttggagaaagagggcaatcaggactcttctgggacccagatgagttcttcactagcccttctgaaccccttgctccataattggtcttttatcctggctctgaatgaccctgcaggtcatcatggttttctttttttattgtttttttttttttctgagacagagtctcactctgtcacccaggctggagtgcagtggcgcgatctcagctcactgcaacctctgcctcccggatttaagcgattcttctgcctcagcctcccgagtagctgggactacaggtgtgccaccacgcctggctgatttttgtatttttagtagagatggggtttcaccatactggctaggctggtctcgaattcctgacctcaggtgatccacccacctcggcttcccaaagtgctaggattataggcttgagctactgtgcccggcccatggtgtttttctttagggctcttcctacagccttgagaagtagataggcatcagagtatggtactataggaatcagaaaaattcaaaacaaatgtggattaagtgtttaggctctatgtggctcacgcagccagaatccttaagtctgtgtgtttctgtgtctcaagactgggctcacattctggctttgtccataacaatgctctgggatttcagggagttccctcatttgtaaaatgagggggtcagagcaggtgatatccatgtttcttccctttctgatattgttgtctgtggcatattctttgtatggcgaatttaataaattatattaatgtgtctctttga

SEQ ID NO: 112319 - DNA, 3039 bp, Homo sapiens
  misc_feature (42)..(42): n is a, c, g, or t
  misc_feature (49)..(49): n is a, c, g, or t
tctagaggatcttgaagtactggttctcgtgcaccagagganaggcggngggcagcgtggacattctcaggctgactctccagggtgaactgacaggagatgaacttgaacacatagcccagaaggcgggcaggaagacctatgccatggtgtccagccactcagctggtcattctctggcttcagaactggtggagtcccatgatggacatgaggagatcattaaggtgtacttgaaggggaggtctggagacaagatgattcacgagaagaatattaaccagctgaagagtgaggtccagtacatccaggaggccaggaactgcctacagaagctccgggaggatataagtagcaagcttgacaggaacctaggagattctctccatcgacaggagatacaggtggtgctagaaaagccaaatggctttagtcagagtcccacagccctgtacagcagcccacctgaggtggacacctgtataaatgaggatgttgagagcttgaggaagacggtgcaggacttgctggccaagcttcaggaggccaagcggcaacaccagtcagactgtgtggcttttgaggtcacactcagccggtaccagagggaagcagaacaaagtaatgtggcccttcagagagaggaggacagagtggagcagaaagaggcagaagtcggagagctgcagaggcgcttgctagggatggagacggagcatcaggccttactggcgaaagtgagggaaggggaggtggccctagaggaacttcggagcaacaatgctgactgccaagcagaacgagaaaaggctgctaccctggaaaaggaagtggccgggttgcgggagaagatccaccacttggatgacatgctcaagagccagcagcggaaagtccggcaaatgatagagcagctccagaattcaaaagctgtgatccagtcaaaggacgccaccatccaggagctcaaggagaaaatcgcctatctggaggcagagaatttagagatgcatgaccggatggaacacctgatagaaaaacaaatcagtcatggcaacttcagcacccaggcccgggccaagacagagaacccgggcagtattaggatatccaagccgcctagcccgaagcccatgcctgtcatccgagtggtggaaacctgagctgcctggagatggttgctgccattgctgctgcctctgcctcggagaagcccactgcccctgttggctgttaacactgcctttgacttcctgactgtcccctggctgcacccaggacttcgggctcctgtgtctcaccattcccaagcccctggccactctaagctgggcagacggagcacgagcacctattcaaggcactgcagccctttggaagacattgtcctgcaagcaggagccagggcaatatctatattcctacagtgactatttttctctgtagagagcctcccttctgttgtagactggactctggctgcgccataagccaggccttcatcagattgggagaggtgacaagatttgcctcagccctaaaagctggagacacagatgtccagagtgattggagaatgtcctgggggaatgaagttccttccacaaacacagctcagttcttagcaacaaactgtttgtttttctacttgctccatctgcagcctacgctgccctggcctcctgcagacagatagtggggttacctggcaaggcctggtgagagccagtgaacctaagctttgactgggtggccttgtctttctggggaggagggaatgtacattcagggagtagccttttgcggaaaaattctctagggctacagacagtcatgtgtgacttctctctgctgtgaaaactcccagagtctctttagggattttccctaaggtgtaccaccaggcacacctcagtcttcttgacccagagcctgaaaactgttttcactgggttccaccagtcccagcaaaatcctctttgtatttattttgctaagttattggtggttttgcttacatctcatgattgatataataccaaagttctatagccttctcttgcagtatttggatttgcttgaaaccgggaaaactgttcccattaggcttgttaatgtcagagtgacactattatgaatctttctctccctttcctctgcctgtttcttctctctttctccttcaaacttgctctgcagctaaggaaggtgagtctactttccctgaggctttggggtcagagtatatgttgtttggagaaagagggcaatcaggactcttctgggacccagatgagttcttcactagcccttctgaaccccttgctccataattggtcttttatcctggctctgaatgaccctgcaggtcatcatggttttctttttttattgtttttttttttttctgagacagagtctcactctgtcacccaggctggagtgcagtggcgcgatctcagctcactgcaacctctgcctcccggatttaagcgattcttctgcctcagcctcccgagtagctgggactacaggtgtgccaccacgcctggctgatttttgtatttttagtagagatggggtttcaccatactggctaggctggtctcgaattcctgacctcaggtgatccacccacctcggcttcccaaagtgctaggattataggcttgagctactgtgcccggcccatggtgtttttctttagggctcttcctacagccttgagaagtagataggcatcagagtatggtactataggaatcagaaaaattcaaaacaaatgtggattaagtgtttaggctctatgtggctcacgcagccagaatccttaagtctgtgtgtttctgtgtctcaagactgggctcacattctggctttgtccataacaatgctctgggatttcagggagttccctcatttgtaaaatgagggggtcagagcaggtgatatccatgtttcttccctttctgatattgttgtctgtggcatattctttgtatggcgaatttaataaattatattaatgtgtctctttga

SEQ ID NO: 112320 - DNA, 948 bp, Homo sapiens
ggtgacagaggacgtagggaatcggctggtgctgacactattatgaatctttctctccctttcctctgcctgtttcttctctctttctccttcaaacttgctctgcagctaaggaaggtgagtctactttccctgaggctttggggtcagagtatatgttgtttggagaaagagggcaatcaggactcttctgggacccagatgagttcttcactagcccttctgaaccccttgctccataattggtcttttatcctggctctgaatgaccctgcaggtcatcatggttttctttttttattgtttttttttttttctgagacagagtctcactctgtcacccaggctggagtgcagtggcgcgatctcagctcactgcaacctctgcctcccggatttaagcgattcttctgcctcagcctcccgagtagctgggactacaggtgtgccaccacgcctggctgatttttgtatttttagtagagatggggtttcaccatactggctaggctggtctcgaattcctgacctcaggtgatccacccacctcggcttcccaaagtgctaggattataggcttgagctactgtgcccggcccatggtgtttttctttagggctcttcctacagccttgagaagtagataggcatcagagtatggtactataggaatcagaaaaattcaaaacaaatgtggattaagtgtttaggctctatgtggctcacgcagccagaatccttaagtctgtgtgtttctgtgtctcaagactgggctcacattctggctttgtccataacaatgctctgggatttcagggagttccctcatttgtaaaatgagggggtcagagcaggtgatatccatgtttcttccctttctgatattgttgtctgtggcatattctttgtatggcgaatttaataaattatattaatgtgtctctttga

SEQ ID NO: 112321 - DNA, 5549 bp, Homo sapiens
  misc_feature (1464)..(1464): n is a, c, g, or t
  misc_feature (2013)..(2013): n is a, c, g, or t
caggtgatcctctacgatcccgccgccggtcccccaggcagcgcaggcccccggcgagccgccactgctgcagttcccaagatgtttgccttcgatgccgtcttcccccaggactccgagcaggccgaagtctgctcggggaccgtggccgacgtgctccagtcggtggtcagtggggctgatggctgcattttttcctttggccacatgagcctgggcaagtcgtacaccatgatcgggaaggacagctcaccccagagcctgggcatcgtgccctgcgccatctcctggctcttcaggctcatcgaggagcgcagggagaggacgggcacccgcttctccgtccgggtctcagccgtggaggtgtgcgggcgcgaccagagcctgcgggacctgctggccgaggtggcccctggcagcctccaggacacccagtctccgggagtgtacctgcgggaggaccccgtgtgtggggcgcagctccagaaccaaagcgagctgcgggcacccacggccgagaaggcggctttctacctggatgcggccctggcggcccgcagcaccagccgagcgggctgtggcgaggacgcccgacgcagctcccacatgttgttcacgctgcacgtctaccagtaccgcatggagaagtgcggccggggaggaatgtccggaggccgcagccgcctgcacctcatcgacctgggcagctgtgaggcggcggctggcagggccggggaggctgctgggggtcccctgtgtctgtccctgtcggccctgggcagcgtcatcttggccctggtcaacggagccaagcatgtgccgtatcgggaccacaggctcaccatgctgctgcgtgaatccctggccaccgctggctgccgcaccaccatgatcgcccacgtgtcggatgcgccagcccagcacgcagagacactcagcaccgtgcagctcgccgcccgcatccaccgcctgcgcaggaagaaggccaagtacgcctccagctcctctggcggggagagctcctgtgaggaaggccgggcccgtcggcccccgcacctgcggcccttccacccacgcactgtggccctggaccccgaccgcacgcctccctgcctgcccggtgaccccgattactcctccagcagcgagcagtcctgtgacacggtcatctacgtggggcccggtggggcggcgctgtcagaccgggagctcaccgacaacgaaggtccgcctgacttcgtgcccatcatccctgccctgagccgccaccggccctccaagggtccccgagacgcagaccacttccgctgcagcaccttcgcggagctgcaggagcggctggaatgcatggacggcaacgagggtccctcaggaggtccaggtggcaccgacggagctcaggccagccccgcccgagggggccggaagccctcgccaccagaggctgcatcccccaggaaggcngtgggcaccccgatggctgccagcacccctcgaggcagttctggtccagacacccaccagggtacccctgagccctgcaaggccattgtctggggtgaccagagagaggacagcagcgcttggcctgagctgctggtcccggaaaaggctgcagtgagtggaggcaggaggccactgcccagcccggctcccccacctcctcagttgctggaagcctgcagagccccagaagagcctgggggagggggcactgatggagtggcacggacccctcccgtgggcatgagtgggcaggtggctgggtccccgatgcttcctggggccacctgcccccgcctggctgctggcagtcgctgtccggagcggggcctgctcaccaccacagtgaccctgcagcggccagtggagctcaacggcgaggacgagctggtgttcacggtggtggaggagctgtccctgggggcgcttgccggagctgggcggcccaccagcctggctagcttcgacagtgactgctccctgcgggccctggcctcggggtcccggccngtcagcatcatcagcagcatcaatgatgagtttgacgcctacacctctcaggcccctgagggggggcccctggagggggcagcctgggccggcagcagtcacggctcctccatcagctcctggctcagcgaggtcagcgtctgcactgccgacagccgtgaccccacgccgcagccccgcttcagccccgactcgctggcagggcttgaccctgggggcccccctgccctggatggttccctgggggatggaagctctgggttcctggggccagacagacctgacagtcctgggccaacctggggtccgtgccctggggaagtggctgcagtggccccatcccgacccggcagggagccccaggccgggccctcgcggtgggcatccgcagcccagaccatccactccagcctcccccggaaaccgaggactgcctctgccaccacccgtgtgggctgtgctcgcctgggccagagcccacctggccgtggaggcctgtttgaggacccatggctgctccgggtaggggagtgtgatacccaggcagcttctgctggcagggcccccagccccacacttggctccccccggctgcctgaggcccaggtgatgctagcctgtgcccagagagtggtggacgggtgtgaggtggcagccagggcggcccgcaggccagaggctgtggctcggatcccaccgctgcggaggggtgccaccacgctgggtgtgacaacgccagctgtgtcctggggagatgctcccacggaggtggtggcctgctcggggagcctgaaggcctcccccaccagcaagaagggtctggctcccaaggcgggcttcctcccgaggcccagtggggcggcccccccggccccacccacgcggaagtccagcctggagcagaggagcagcccggcctcggcccctccgcatgctgtgaacccggcgcgggtcggggctgctgctgtccttcgaggggaggaggagcccagacccagcagccgggctgaccactctgtccccagggccacgtccagcctgaaggcccgggccagcaaggtagaagcagcacaccgtcttgccggacacgcgtctctggagcggtacgaaggcctggcgcacagcagcagcaagggccgggaagcccctgggcggcctccccgggctgtacccaagctgggtgtgccaccctccagccccacacacggtccagctcccgcctgtaggagcggcgcagccaaggctgtgggggcccccaagccccctgttggtggaggcaagggccgtggcctagtggctggtgggtcgcgggctctggggccttcggtgaagctgtctacggcctctgtgacgggcaggagccctggcggccctgtggccggtcccagagcagccccacgggccgggcccagtgtcggggcgaaggctggccggggtaccgtcatgggcacaaagcaggcgctccgggctgctcacagccgcgtccatgagctgtcagccagtggagccccgggccgaggtggctcctcgtggggctcggcggactcagacagcggccatgacagcggcgtgaacgtgggggaggagcggccacccacgggcccggccctgccctccccctacagcaaggtgaccgccccacggcggccccagcgctacagcagcggccatggcagcgacaacagcagcgtgctgagtggagagctgccgcccgccatgggccgcaccgcccttttccaccacagcggtggcagcagtggctatgagagcctgcggcgcgacagcgaggccaccggcagcgcctcttccgcccctgactccatgagcgagagtggggctgcctccccaggcgcccgcacccgcagcctcaagtcccccaagaagagggccacaggtctgcagcggcggcgcctgattcccgccccactgcccgacaccactgccctgggccgtaagcccagcctccccgggcagtgggtggacctgcccccgcccctggctggctccctgaaggagccgttcgagatcaaggtgtacgagatcgatgacgtggagcgccttcagcggccccgccccaccccgagggaggcccccacccagggtctggcgtgcgtcagtacaaggctgcggctggcggagcgcaggcagcagcggctgcgggaggtgcaggccaagcacaagcacctgtgtgaggagctggccgagacccagggccggctgatgctggagcctggccgctggctggagcagtttgaggtggacccggagctggagcccgagtcggccgagtacctggcggccctggagcgagccacggcggccctggagcagtgcgtgaacctgtgcaaggcgcacgtcatgatggtcacctgcttcgacatcagcgttgcagccagtgctgccatcccggggccgcaggaggtggacgtctgaggctgggcgccggacaagaggagggggcgtgcagcgggctggaggacgggacgtgggacggagcgaggatgtggtgggggctgcggggggaggatgcggaggggtttctgtgcaggacgggagtctcagagaggagacggagtgtgggggagggagggccggccacgcggtggacagagcgagggtgccagggtgaccagaagaccgtcaccacccgacagcaacgcaagtgcctttgaccttgatttggacttttctcccttttgcatttggtgctacagacttgagacaccagcagaagttgtgttcagcccggccccgctgcgcctgtccgggccggggctggcgccggttgtgtttgtgtccaccttgccttctttgcagccaagcagtttttgtggagtgggacttacctgcacgccccaggggtctttcaggattcaggatgacttttcttttacaatggtttcctctcggcagagcccgggttgtgggggatctgtgtggggttctcaacgcagatccatcctggggtctcccgggcagggatggctgacctcgagtcccctcccttcccgagaacctgctctgtcccgagggcagctaacaagggctgagccccaggtacaggttgcctcttccacggcaggaatttttaccaaaaccacaagcaaaaaacaaaacagaccaccacgaccaacaacaaagatggggggtagggttttgtaaaggttctgttaggttcatatttttatatcattttgcccataaatgcggaatttgccgtgggaatttgaagacaaatgatctatgtttttatggttttctagggaaggtgttctgggggccgggctctctccagctgtgggaggcctgctccctctggggggcaccctgggcagggtgggggggccttgggaggcgcttcttgccaaatgcagacgaggggtgagcctgccagcgtttgcgacgtccccgcacgacaggctcatactttctgaggatcgtgcatagcataggacgtctgaacctttgtacaaatgtgtagatgacatcttgctacagcttttatttgtgaattaaagatgcatcgatggttccca

SEQ ID NO: 112322 - DNA, 4331 bp, Homo sapiens
  misc_feature (1464)..(1464): n is a, c, g, or t
  misc_feature (2013)..(2013): n is a, c, g, or t
caggtgatcctctacgatcccgccgccggtcccccaggcagcgcaggcccccggcgagccgccactgctgcagttcccaagatgtttgccttcgatgccgtcttcccccaggactccgagcaggccgaagtctgctcggggaccgtggccgacgtgctccagtcggtggtcagtggggctgatggctgcattttttcctttggccacatgagcctgggcaagtcgtacaccatgatcgggaaggacagctcaccccagagcctgggcatcgtgccctgcgccatctcctggctcttcaggctcatcgaggagcgcagggagaggacgggcacccgcttctccgtccgggtctcagccgtggaggtgtgcgggcgcgaccagagcctgcgggacctgctggccgaggtggcccctggcagcctccaggacacccagtctccgggagtgtacctgcgggaggaccccgtgtgtggggcgcagctccagaaccaaagcgagctgcgggcacccacggccgagaaggcggctttctacctggatgcggccctggcggcccgcagcaccagccgagcgggctgtggcgaggacgcccgacgcagctcccacatgttgttcacgctgcacgtctaccagtaccgcatggagaagtgcggccggggaggaatgtccggaggccgcagccgcctgcacctcatcgacctgggcagctgtgaggcggcggctggcagggccggggaggctgctgggggtcccctgtgtctgtccctgtcggccctgggcagcgtcatcttggccctggtcaacggagccaagcatgtgccgtatcgggaccacaggctcaccatgctgctgcgtgaatccctggccaccgctggctgccgcaccaccatgatcgcccacgtgtcggatgcgccagcccagcacgcagagacactcagcaccgtgcagctcgccgcccgcatccaccgcctgcgcaggaagaaggccaagtacgcctccagctcctctggcggggagagctcctgtgaggaaggccgggcccgtcggcccccgcacctgcggcccttccacccacgcactgtggccctggaccccgaccgcacgcctccctgcctgcccggtgaccccgattactcctccagcagcgagcagtcctgtgacacggtcatctacgtggggcccggtggggcggcgctgtcagaccgggagctcaccgacaacgaaggtccgcctgacttcgtgcccatcatccctgccctgagccgccaccggccctccaagggtccccgagacgcagaccacttccgctgcagcaccttcgcggagctgcaggagcggctggaatgcatggacggcaacgagggtccctcaggaggtccaggtggcaccgacggagctcaggccagccccgcccgagggggccggaagccctcgccaccagaggctgcatcccccaggaaggcngtgggcaccccgatggctgccagcacccctcgaggcagttctggtccagacacccaccagggtacccctgagccctgcaaggccattgtctggggtgaccagagagaggacagcagcgcttggcctgagctgctggtcccggaaaaggctgcagtgagtggaggcaggaggccactgcccagcccggctcccccacctcctcagttgctggaagcctgcagagccccagaagagcctgggggagggggcactgatggagtggcacggacccctcccgtgggcatgagtgggcaggtggctgggtccccgatgcttcctggggccacctgcccccgcctggctgctggcagtcgctgtccggagcggggcctgctcaccaccacagtgaccctgcagcggccagtggagctcaacggcgaggacgagctggtgttcacggtggtggaggagctgtccctgggggcgcttgccggagctgggcggcccaccagcctggctagcttcgacagtgactgctccctgcgggccctggcctcggggtcccggccngtcagcatcatcagcagcatcaatgatgagtttgacgcctacacctctcaggcccctgagggggggcccctggagggggcagcctgggccggcagcagtcacggctcctccatcagctcctggctcagcgaggtcagcgtctgcactgccgacagccgtgaccccacgccgcagccccgcttcagccccgactcgctggcagggcttgaccctgggggcccccctgccctggatggttccctgggggatggaagctctgggttcctggggccagacagacctgacagtcctgggccaacctggggtccgtgccctggggaagtggctgcagtggccccatcccgacccggcagggagccccaggccgggccctcgcggtgggcatccgcagcccagaccatccactccagcctcccccggaaaccgaggactgcctctgccaccacccgtgtgggctgtgctcgcctgggccagagcccacctggccgtggaggcctgtttgaggacccatggctgctccgggtaggggagtgtgatacccaggcagcttctgctggcagggcccccagccccacacttggctccccccggctgcctgaggcccaggtgatgctagcctgtgcccagagagtggtggacgggtgtgaggtggcagccagggcggcccgcaggccagaggctgtggctcggatcccaccgctgcggaggggtgccaccacgctgggtgtgacaacgccagctgtgtcctggggagatgctcccacggaggtggtggcctgctcggggagcctgaaggcctcccccaccagcaagaagggtctggctcccaaggcgggcttcctcccgaggcccagtggggcggcccccccggccccacccacgcggaagtccagcctggagcagaggagcagcccggcctcggcccctccgcatgctgtgaacccggcgcgggtcggggctgctgctgtccttcgaggggaggaggagcccagacccagcagccgggctgaccactctgtccccagggccacgtccagcctgaaggcccgggccagcaaggtagaagcagcacaccgtcttgccggacacgcgtctctggagcggtacgaaggcctggcgcacagcagcagcaagggccgggaagcccctgggcggcctccccgggctgtacccaagctgggtgtgccaccctccagccccacacacggtccagctcccgcctgtaggagcggcgcagccaaggctgtgggggcccccaagccccctgttggtggaggcaagggccgtggcctagtggctggtgggtcgcgggctctggggccttcggtgaagctgtctacggcctctgtgacgggcaggagccctggcggccctgtggccggtcccagagcagccccacgggccgggcccagtgtcggggcgaaggctggccggggtaccgtcatgggcacaaagcaggcgctccgggctgctcacagccgcgtccatgagctgtcagccagtggagccccgggccgaggtggctcctcgtggggctcggcggactcagacagcggccatgacagcggcgtgaacgtgggggaggagcggccacccacgggcccggccctgccctccccctacagcaaggtgaccgccccacggcggccccagcgctacagcagcggccatggcagcgacaacagcagcgtgctgagtggagagctgccgcccgccatgggccgcaccgcccttttccaccacagcggtggcagcagtggctatgagagcctgcggcgcgacagcgaggccaccggcagcgcctcttccgcccctgactccatgagcgagagtggggctgcctccccaggcgcccgcacccgcagcctcaagtcccccaagaagagggccacaggtctgcagcggcggcgcctgattcccgccccactgcccgacaccactgccctgggccgtaagcccagcctccccgggcagtgggtggacctgcccccgcccctggctggctccctgaaggagccgttcgagatcaaggtgtacgagatcgatgacgtggagcgccttcagcggccccgccccaccccgagggaggcccccacccagggtctggcgtgcgtcagtacaaggctgcggctggcggagcgcaggcagcagcggctgcgaggggtgagcctgccagcgtttgcgacgtccccgcacgacaggctcatactttctgaggatcgtgcatagcataggacgtctgaacctttgtacaaatgtgtagatgacatcttgctacagcttttatttgtgaattaaagatgcatcgatggttccca

SEQ ID NO: 112323 - DNA, 672 bp, Homo sapiens
ctgtgcttgggctgggccccgcctctgttcaccctgtgcccggctctccgttccaggtctgcagcggcggcgcctgattcccgccccactgcccgacaccactgccctgggccgtaagcccagcctccccgggcagtgggtggacctgcccccgcccctggctggctccctgaaggagccgttcgagatcaaggtgtacgagatcgatgacgtggagcgccttcagcggccccgccccaccccgagggaggcccccacccaggtagggcctttggtgggctggggtctatgacccctggtggggagcctgccgcggatggcagagtgagccatttgatgggctcgccaggcctctgggggtgtggctgggcagcccctgacctcactttctgtccacgttcctcccaggacgcaaaggtaggagcggccctgcccagcccaagcctgttgcagctccgacactccccttgggcagtgggtgggtggctggggggtcctgaggccactgctgctgtccgctggaattctcccctgtcgtggggagggtggtcctagagccgagccaggacccagacgggcatgggtgggctgccccaggtccgccccctgcccgcccttggagccccactgtgtgcctgccaaggcctggcaggtgaagggaggcgggggcca

SEQ ID NO: 112324 - DNA, 747 bp, Homo sapiens
atggggtaggacgctaggccggcactgccaaggtgggccgggcggtgcgagggtcgcctttcagcctttacctctacccactgaaatggagtaggtcggtgagcgccgatctgctggagaatctcattatcccatcggcgctctgcctgctcctggcctccaagcctctgaagcccctcgggtttcagctgccggctaccctcgagcccgtggtgcccacgagagaggcgactttacgtcagcggccctgggctgagatttgagaacgcgaccaagtggagaatgttggagccagattttaaaatccttgtcttccttctgcttgctacttgatctaaatgagatacggcaaagtcacagaacctgtttttatgtttttgcctgattcatacgggcttctccggtgaagatgggcctgaagtaacgcttgggttgcttctgacgttataactcatcctgtagctgcagcaaccgtggtccttgcaacctcataaaaatgttgccagcattgtttcgatagtgctgcttaattcttggaaggttcttcggacttcacacattccagcagtagctctctcagctcctgtcctggacagctttgaagtgctgaaacagagaagagtatgagaagtgttacggaacatgaagatacctctggtggcttcaaacatacttatttttaaaaactctaaaggtctaaatgggtctgtatcgggtatattttcagtcaacttatgctgtgttggg

SEQ ID NO: 112325 - DNA, 1040 bp, Homo sapiens
atggggtaggacgctaggccggcactgccaaggtgggccgggcggtgcgagggtcgcctttcagcctttacctctacccactgaaatggagtaggtcggtgagcgccgatctgctggagaatctcattatcccatcggcgctctgcctgctcctggcctccaagcctctgaagcccctcgggtttcagctgccggctaccctcgagcccgtggtgcccacgagagaggcgactttacgtcagcggccctgggctgagatttgagaacgcgaccaagtggagaatgttggagccagattttaaaatccttgtcttccttctgcttgctacttgatctaaatgagatacggcaaagtcacagaacctgtttttatgtttttgcctgattcatacgggcttctccggtgaagatgggcctgaagtaacgcttgggttgcttctgacgttataactcatcctgtagctgcagcaaccgtggtccttgcaacctcataaaaatgttgccagcattgtttcgatagtgctgcttaattcttggaaggttcttcggacttcacacattccagcagtagctctctcagctcctgtcctggacagctttgaagtgctggtgatgtcattgaactcttaagtgcaagatgaaacaagtctttctggggttctaagtagattgcatggtggatagagcacatgctgcccacatcacgggtgtccttaccattttcgtacaatccggtttgacttccaattgctgatgactgtgtctctggccagtggggcctgcagcagtctgggagtactggaggaaagagtgccatcaaagagcagccctcaattacagacccagaagattaggtctgtgggtctcagtggatgaaccaacacggaggagcaccacgttgagcgtccatcttacagtttcccagggcacaaagttatagtcatctgaggggcaacttgcttgacaaagtagcttttcccgacttccttcccatctttacctcactccccgactttctaaccagtgtttcttgggatcaa

SEQ ID NO: 112326 - DNA, 1167 bp, Homo sapiens
atggggtaggacgctaggccggcactgccaaggtgggccgggcggtgcgagggtcgcctttcagcctttacctctacccactgaaatggagtaggtcggtgagcgccgatctgctggagaatctcattatcccatcggcgctctgcctgctcctggcctccaagcctctgaagcccctcgggtttcagctgccggctaccctcgagcccgtggtgcccacgagagaggcgactttacgtcagcggccctgggctgagatttgagaacgcgaccaagtggagaatgttggagccagattttaaaatccttgtcttccttctgcttgctacttgatctaaatgagatacggcaaagtcacagaacctgtttttatgtttttgcctgattcatacgggcttctccggtgaagatgggcctgaagtaacgcttgggttgcttctgacgttataactcatcctgtagctgcagcaaccgtggtccttgcaacctcataaaaatgttgccagcattgtttcgatagtgctgcttaattcttggaaggcctctttgctttcttccctgaggttcttcggacttcacacattccagcagtagctctctcagctcctgtcctggacagctttgaagtgctggtgatgtcattgaactcttaagtgcaagatgaaacaagtctttctggggttctaagtaggacacagccctggtgatggctttctgaggatgacacgatggaggcttctccaatagctctaaaactgcggtgtggaaaacattcggcagcctcaaagagcggtcttgttgaccccaactatatcatttttcatcaaaatcattcttgtaaagaatgaccaggcaacactctttgaaaattggaggccatttgcagctgctctctgttgaggaaagtgaataatagggtgccctcaaggaattgcaaaggtatcactcaacagaaactttcgtgtctgaagaaaactagatcattttatcatggtaggcatgctgatatgtttgctttaataaaatgccatatttctgcctttaatctcttgtcaacccgctattaaaaagccccaaagtgcatgtgtgcagcgcatgtaaacacttgtggttttgaggttaccacagaacatactaataaagcatgtaatttgtgttttgtgcaca

SEQ ID NO: 112327 - DNA, 366 bp, Homo sapiens
acaatgtgagattttttccagaaacaagtcatacccactcattcctaagttaaccaacaggacacagccctggtgatggctttctgaggatgacacgatggaggcttctccaatagctctaaaactgcggtgtggaaaacattcggcagcctcaaagagcggtcttgttgaccccaactatatcatttttcatcaaaatcattcttggtaagtcttatgcccaaggagttattttccttagcaacatcatggtatggagggatttgctataggataggtcctgaatattcttgctttttttctgacttaactttgaaaagaagtcctagactaaattcaaccctgctctttcaaatagcttcctca

SEQ ID NO: 112328 - DNA, 279 bp, Homo sapiens
atacgagcgcagtgctcagcctgtaagtcccagcacttagggagaaaaaagaagagaaagattacgtacaacatgcaggcacaggaaagaatgcagggcctgtaccataccacaccagctgactgcgcagaacgtcgggtggagactaggagacccgggagccttttgccctatctagcgcctgccacaacagacattttataactagaaaaccaaatatgcttttaaattatatttacaaaaaaattgccggtcacggtggctcacgcctgtaatccc

SEQ ID NO: 112329 - DNA, 645 bp, Homo sapiens
ggagtctagttctagaaaagagaacataaaggatcttgttagggaatgtagcagggatgactaactttgtccagtgggtccagataggcttctcagagattctacgatttaagttgagcctgaagagtgtatagttagtagccaagtgaaaaaagggaaaaaaaagggtaagagtgtttctggcagagttgtaggatatgtgaaagcccagaagtgggagagggaagaaatggcatagtcaaggaaatgaaaggaattgactggagcattgagtttttcttccataagctttgcaagtaactaccattagctttaattagatcataaaggagcaggttcaaagaacattgctccagtaataacgtatgctcagatacattcagctcataggaagtaagaagactggaacactcagataatctcctggatagttttaactatatttatgtattcattttgcatttggattatgttcctttgacctcttaagaaaggtgatgtgaatactattcatgcctcacatttcttaattaagcactggcttattttctgagccacgtttaaaaactgaaaatggcaaatacctaaaaatacatcttatcacagacatgtgagacttctatactaaaactgcaaaacattgct

SEQ ID NO: 112330 - DNA, 489 bp, Homo sapiens
ctggcagtccacgcatggtgctgtgtcaaggatggggagagatgaggtgtgagtcctaaacgtgatgccacgaggtgtgcatgtgttggggtgacagtcagggacacagacacttacatcatgggggatgctgcgatcgtgttaggggatcccaaacttgctcctctccccatattccccatctcagcgaagggcacccctcccctaactccatcccagccagaaacctcggagtgagagtcatccttgattcctaccgcctccaaaccaatccagtcactaggtttgctctggaatttgttctctcctctctatgcgtgctgcctctggttcggtttttatcacttcttttctgggctgtggccccaggctcctccctgcctctagctctcttgctgctccaagtgccctgcacagcagctgcagtgattgttctaaagggcagatgtataaatgcttccccctgactctcccccatgcgtggattgc

SEQ ID NO: 112331 - DNA, 604 bp, Homo sapiens
tgtctactatgtgtctgaccctggattaggtactagatacaaagctgtgaacaagaaagataactgtcctcagttatttgaggaacatgaaaaaaaggcaaaaacaaaaccctacttgcattcatacactagtcaattcttcattgcatgaatataaacttagagatacacattttaataaaactgtcattttactgcaaaaagtgttttacaatttgtaaccccctacccatttaactattttttccagagtacagctttttgatgactcattatgatggacaataggttgaaaaaactcagcaggatgctaaaaatgcagctgtgtatatacgcagaccaaggtggtgcaggacattggggtgaacagatactgatcaacagctagtctgaaacttacaagcttggaaaaagtcttgagatcaactactgtgggacatttctcctatggcaacataacctctaggccaacataatgtgactgcctttttaattttttttaggaaaaggcaaaaacagctcttttctcaagtggttttctctaattttagaattatgctatctactacagtggccaatagcacgtgaaatgtgactagtccaa

SEQ ID NO: 112332 - DNA, 434 bp, Homo sapiens
atttaaggtatcttttgtaagcctcatggtaatgacaatccaaaaacctgtaatagttaaactaaaaagcaagaaattaaaacatactaccagagaaaaatcacttaaccacaaaagaagacagtaagaaggaaccaagaagttacaaaacaactagaaaatagttacctccttacctattagtagtaacactaaatgtaagtggactaaattctccaattaaaagacatagagcagctgaatgtaggccaggtatatggctcacacttgtaatcccagcactttgggaggttgaggtgggaggggtacttgagccagaagtttaagaccagctgggcaacatagtaagaccctgtctctacaaaacaataaaaaaattagccgggtatggtggcatatccctgtagtcccagctacatgtgaaactgagttgg

SEQ ID NO: 112333 - DNA, 712 bp, Homo sapiens
gggtccccgccccgcgaggtccttcgccgggcggcgggagctagacgagcacgcagggcacccctcgggctcccgggaggcggccctgggcgtcccctttctgccgccgccgcggccccggctgctttctgcgtagctgggcagggcccgggcccccacatcgcctctcccgggaatgcgggcgctctggagccggggagccggggcgaccgcagggagggcagctctccggggtggaggtcctcgggcgccgcgccctcgcctggaaaccagccgtcgcccccgcaggagtcagccggcgtggacgccccagcacgctccttcttggtgctgccggtcgccctgcaattccgagaagaaagtcagagacgccgtggcccacagaggcgcttagttttcctcgctcacacgttgcctcctcatcgcgttcttctttttctccctgggtgctttctctcctctccaggaaagcggatttggaggaacaggtttcgtgactgtcatccaactggaaaaggccccgcgagctggaagggggggcggggggggacgggtgcaccctcagagttattgctggaggctgtggccaggccgggcaatgtggtgacttccgctggcaggctgaggcccaccccagccctcccacctgggccacggggctctcagcgggagccccagttatgaccggacaccagcgcaccgccaaggagac

SEQ ID NO: 112334 - DNA, 515 bp, Homo sapiens
gaattgcagctcccttaattcccacatgtgggagggacctggtgggagataacttgttttggctatgtccccacccaaatctcatcttgaattgcagctcccacaattcccacatattgtgggagggacccagtgggagataactgaatcttgggagtggtttccctgatactgttctcatggtagtgaataagtctcatgagatctggtgatttgacaaggggtttcctttttgcttggtgctctgattctctcttgccaccagcatgtcagaagtgcctttcacccaccatgattatgaggcctccccagccacatggaactgtgagtccattaaacctcttttactttataaattactcagtcttgggtatgtctttatcagcagcgtgaaaatggactaatacagtaagtatatgaaaaatttgatttatacaatgaatacggtgggtttaactgatataggacaccacacaaaatgggatataatctaaagtggcacttactggaaaatg

SEQ ID NO: 112335 - DNA, 260 bp, Homo sapiens
aactggcataatctttttggtaggcaatttggccatgtataacacaactgttaaagatgggcaacccaggcgtggtggctcacaaatataatccaaacactttgggaggccgatgtgggaggatagcttgagccccgacgtttgagaccagcctgggcaacatagagagacatggtctctacgacaaaaaaaaaaaaatttaattagctgggcatggtggcatgtgcctgtggtctcagctactcagaaggccgaggtgg

SEQ ID NO: 112336 - DNA, 319 bp, Homo sapiens
ccttagtaggtgctaggaaatgtaggatgaatgagtgaattcattctgctgcctgccctccgtgggattcatctttgtatcacatcagacggtgtaggtccttttattcctcttcctaaggaggccagcttgggccctctgttggcaacagaagactttgatttcttcactttcttgttttaaacacagccccattaatgtttaaaatgcttgtctgagctctccagtctgtcttaggtgtttcgagggctttcaacagggattctaaagcggcccagggatacttggttattatttcctctttatagaattgaatgag

SEQ ID NO: 112337 - DNA, 200 bp, Homo sapiens
ctagagcaagagtatacataagaggctgagagggagaataataggatgcaggggagctctctgcatcctatagggtgtttggggagcccctctcggagaaattgacatttaaacaatgaccttcacatttaagctatgaacagtttaggagtagggcagggacaatgccagtcaaagcagtggcttaccatattttaatg

SEQ ID NO: 112338 - DNA, 273 bp, Homo sapiens
ggtcaggcactgaagcctggtcaggcactgaagcctggtcaggcactgaagcctggtcaggcactgaagcctggtcaggcactgaagcctgggaggttttgtatgataaaaacgaatccaggggctgtgtggtccctgcatctgattgtgtcctgtctcggggagcttaaggaaaggttatatcgaagctggaaataccgcagtcagggtcaccagccttcattctcaaaaagcagacggaaactctgtgttaggcttcatgtggtttccccg

SEQ ID NO: 112339 - DNA, 472 bp, Homo sapiens
gccttcattggccacatagggactgcagctgtcagcacagagagagagagggaaagagagagaaatagagtttggaaattgttcagcaagagctgggaaatgcagtcacacagaagaatgactggtccatcatcaaatcctaatgaaattacctccaaatatctcggtgcctttcagcttctgttagtggagctggacaaatctgatttgagacaagtaattttaagcgtgttcttaaaggtaagactccactgtatctcttgtcctatttcctggcagtggaagaggggccagctttttcttgtccttggagaacttgagaaacagcgtatctgccatttgggcgttggctgagtacctccatccctgacattgctttccaagtgctgtggaactggggacaagctatgtggtttgaaaggagttgacaggctgggagccagtgtcctcctttcctcaagaagggaggagg

SEQ ID NO: 112340 - DNA, 415 bp, Homo sapiens
gtgattataccgcaattaaagctagagggaacgctgtcagttcctgggccttcatttgctgacacagaagtgaggtgtagctctctagaagcaactcacagtgtccatatcattaataacacaagttacagcaaggacggcactttcctgccctccacacacacagccaacagtacagtcaacacagactcgcagcatgcagggccatctctgataactcagaaaatgcacgccattaacagtgacagcaaaaaatcatccactaaaagcaattctagaccaggcacagtggctcatacctgtaaacctagcattttgaaaggccgaggtgggctgatcgcgtgagcccaggagttcgagaccagcctgggcaacatggtaaaaccccatctctacaaaaaatacaaaaattagc

SEQ ID NO: 112341 - DNA, 144 bp, Homo sapiens
cttattgtttcctaggatctcagggagatcaggccacgtggtctgtggattaattaaggcacccagataattggctattaatagatggccaattgatggctgccagctgggtgctgaattgactaatgtccttatggtgggcag

SEQ ID NO: 112342 - DNA, 659 bp, Homo sapiens
aattcaacaaaaacaaagaagacatctcagtattttatacttttaaaattaagaatgatgtcgacacattaattttcatttactatccttgactcatagataactttttaggatatttctagtctgtagtttcaatgagttgtttgcacattgttgtattctattacagataatatgcatgctcagaggcatttcctcccttctttatcttttccttgatccaaattcagtacttttcttttctattttttttttttttttggaaagagtctcgctctgttgcccaagctggagggcaatgatatgatctcggcttactgcaaccttcgcctcccgggttcaagtgattctccggtctctactaattttacaaaatttagtggggtgttatggtgcatgcctgtaatcccagttactcgggaggctgaggcaggagaatggcttgaactcgggaggtggagattgcagtaagccgagatcgtgccatggactccagccgtgggtgatagagcaagattgttctcaaaaaagaaaacaaaggaaagatttttaagttgtaatccttctgtagaacacggtttcagaaccattccattgatcttaataaagctgctctttactgtttctagtcacaaattgagacttcgatcacccataag

SEQ ID NO: 112343 - DNA, 409 bp, Homo sapiens
cagactactacttttacaggctaaatctagcctgtcacctgtttttgtaaataaatttttaccataacacagctatactcatttaatttcatgtgctctgcagctgctttcatgctacaatagcagagttgagtcaaagctacagtggagattgtatttggcctgcaaggttataatatttactatctagcttggacctctgaagaggataaagcagagttacttttcaatgcagtgaaattataaagagaaataaaggatgaaaatataagaaacttggaagattatagacacacacatgttcaaatgtccacataggcaggaactccagaaatagcaaaatgaacacatggagcaattatcaaggaactaacagaataaaacttttctaagatacagaaaacctgtg

SEQ ID NO: 112344 - DNA, 461 bp, Homo sapiens
gcatgtgatcaagcagggcccatcagaatccttccctaagatttttataaaaagctggacctattctttttccatttgagtggcaaatatttgaagatatgaggtctaaagctgtgatggcttattctccatccctgtgtaaattctggtctatagtaagcgaaaacaaggccattaggcagagggcagcagagacataaggtgagaaagagtgtggtctctggttttctagaccctgattctggtttggaggcttggctgatcacctcttcctttgattctgatagaaagctcaatgtatctttctaataaaacccccctttgctttgcttgttggagttaggttcttatcccttgcaaccaaaaatatattgtctcttcttttgttctcagttttctcatttatatatccttctagctccaaagcacagaaattctaaaacaaacaaacaaacaaacaa

SEQ ID NO: 112345 - DNA, 349 bp, Homo sapiens
aaaatctataagcctaagttatggcccataggttttgttaagggttttcagagtgattttcaggtttaatttcactgcctttcataagggtaaagtttcacagctgacattagcctgaggattagcactaaagagctgtgttttcatagcaggggctattgtacagacagtgataaccaaatagtaatatgccagttctttcttctttttttagcttcagtagtagctaagccattaatacagtttgcatcaatttccccatttatttataatcagcctttcttttagtcctagtgcctgaatcaatgagtgagaatactagtactgattctttacaataataatatct

SEQ ID NO: 112346 - DNA, 381 bp, Homo sapiens
tctcctgagttcaagcgattctcctgcctcagccttcctggtagctcagattacagatgtgtgctcccatgtccagctaattgttttgtatttttagtggagatgttggccaggctggtctcgaactcctgacctcaaatgatccgcccaccttgacttcccagagttctggaattacaggcatgagtcactatgcctggccaaaaaatatatttatagttttaaaaaattacctacgtcattacctttactggtccttcatttcttcatgtgaaaatgagttagtgactagtattccttaatttccatttaaagaactgcgcttagtatttcttgtacagcaggtctggctgatggtgttttttgttttttcttttgtgt

SEQ ID NO: 112347 - DNA, 341 bp, Homo sapiens
ctgggggtaacccccttagggagtgaggagaatcatggaagttaggagtggtcatttattacatatgtggataataataatgttttgtgtatattaggttaaatagtataaacattgtaattgctagatttacataaattgataggttaggattgtgaaagaaggattagatgttaaaattgtgattattcaatttgttgtgagcaattgccaaataggccaagatatttcacagctgtgtttggttaaggtccccttaaccaatctcccatagtgttgcaatctcccatagtatgtttaagtctgttgatgagtagacttgaaataaaatggagatcagt

SEQ ID NO: 112348 - DNA, 463 bp, Homo sapiens
ctgaaggctccatgtcatgtgaaacttttagactaaataaaattgttatgtttctctcttgttaacctgtatttgttacaggagccatgacccttatgatggggagggcacggatgaactcagaacccagggcttgcagcccagacaccgagcaactggcccggcagtcaggcacatacccataagcctggggcaggccacggtgttagaagactctaaagcggcactgccaggtcttggacccacactaatggctgtgactgtggtgacaacagaagctgcagtagccatggttgtgggtgataggggagaggagagaggagggactctggtagctccaggaaccagggtgggaggccagtttgcccatcagtcaccggagcctgtccctatagagtctgcacagatatttaactctatgacctgagcaccaggacagtaaattatcacaaagtaaaagcct

SEQ ID NO: 112349 - DNA, 197 bp, Homo sapiens
tcgatacaactttgctactattaaaaatagagaacagaagtggaaaatttctggtcaattattttaagttcagaacaacaaagctacctgaaacagaatttgggtaagaaattcctgctttttttttttttttttcaattaagacagggtctgggtctggctttatcacctatgctggagtacagtgatgcaatctc

SEQ ID NO: 112350 - DNA, 370 bp, Homo sapiens
ctcatttcagaacaaggatgacagaggtgtggggtgcaaacatacacttagggaacagggcagaccaagtgaatgacaactctctttccatcacacctatctatcctcaaatcatgagatacttatccacttttacctctgaatacaggactgtggttctcctatgcaaagacagcagggagtggacactaggagggtaaaacaacgctctgaataaagctcaagagatctcccacggaatttcattaaaccactactggagaccatatactaaactagtaatcccttaaggcatgagacacattaaaaccactttattgagccataattcatatacaattcacccatttaaagtgtacaattcaatgga

SEQ ID NO: 112351 - DNA, 340 bp, Homo sapiens
tggggagcagaagaaaattatagtagggagcaggaggcctaattcaccctaaaattatattctaaaggcttccaagagttaaactctggtccatttgactcccataaagtttcctgtagaagcagcttttaagggctgatgtggtgtggccaacaacacttattcagcccatacatgcaaggcaaaccacagagacctggagttggagaaccagagaaaatccctgcttcctcccctcactgcgtggcttcaggaaagttacttaatctaggtcctaggctgtctcacttgtgaaatggaaatacttgcaaatccaaaaaagaccctcctctgggaaaat

SEQ ID NO: 112352 - DNA, 391 bp, Homo sapiens
ctccacttgggttaggtatccacccctaattcaatcagctgtggctagatggagttcctgagccaaaaggcttctcccagtgggttctactacaatgaacaattgttgtttaagacacacatggattcttgattgtcaattcagaaagcagacagtgggttttaaaataacaaggcatagttgagttcattcagtcaccttgagagcacccattttttctaggagactggatgttctcaaggagcagcctgtccatcttgcatcccccaggttctccggattctccatttccaagcagaagaagcaggactggagcacccttccatatcatcagccttctcctcgcaccagaccttactcaccagggcctgggactgtgggttggacttct

SEQ ID NO: 112353 - DNA, 388 bp, Homo sapiens
taataattaaactccttccaggtaattcaaatgtaggggtgaacccaggttgtgaggatcctgaagctaatatggttttgctggttctcttcagaaacaaagaatataaaattatgaatacaaaattaggtatgacctttggcctttccttattcatttcacaatgctgagttagttagtgcattgcaggtacccttccttctttgggatagctagcaataacctcactatacattatatgactgtaagccccataaaaataacctgctagacctaacttcccttagccaagttccaaaatgcctgcagccagcctctctgatgccactgaacgagaaggggacagacggtggagaagtcctagtggaaacagacagcaaactgggat

SEQ ID NO: 112354 - DNA, 391 bp, Homo sapiens
agactgtagcaatgaatctaactgtattacaaacgtatgacagaagcataccaaagaggattgtaaagaaaggagctgacctatacagccttgttttaggtcaacaagccaaaaacaaataaccccattcaaaagtgggcaaaagacatgaacagacacttctcaaaagaagacagacaagtggccaaaaggcatgaaaaaaagctcaacatcactaatcgttagagagatgagatattatctcacaccagtcagaatggctactattaaaaagtcaaaaaataatagatgctggtaagactgcagagaaaagggaatgcttatacactgtgggtaggaatataaattagttcaaccactgtggaaagcagttgggaaatttcccaaagaa

SEQ ID NO: 112355 - DNA, 243 bp, Homo sapiens
tttgaggctgcagtgagccatgattgcagcactacactgcagcctggataacagagcaagaccctatctcaaaaataaaataaaataataaataaataaaagtctcatcttaaatttgatggggaaaggaattttctggatccacaactgaattgtctatgcttggcaggcagatgttttctcaaatggtgaatggattcaccttctttctcttccctagtttagctactttcactcccttct

SEQ ID NO: 112356 - DNA, 338 bp, Homo sapiens
attccttttaggaacaaaccagatatatttagttaaatggctaaagcttttggtttatttctagatgtttgctgaatttatttgaactcttagtagcttaaaccatgggaggctcacataacaaaataagcctccatttgtatcctattaactcataaaatatcatttaattactgtattgttttattaaaaatctaaaataattataataaatattaatatttgatagaatctactagtgagtattcaattgttcattacactattcttgacgtattcattggttttaatacattttataataaaataaactgacttcgatttccatctcagatgta

SEQ ID NO: 112357 - DNA, 489 bp, Homo sapiens
cgatatggtttgaacctctgttcctgccaaatctcatgctgaaatgtaattctcagcattggaggcagagcctggcaggagatgtttgcatcatgggggtgaacggctcagtgacatccccttggtgtattctgaagtgtgtggcacctgcgcctctcactctctctctgttgctcccactcctgccttgtgaaatgcctgctccaccctcaccttctaccatgattggaagcttcctgagatctcaccaggagcagatgcctgtgctatgcttcctgtacagcctgcagaactgtgagccaattaaacctcttttctttacaaattacccggcctcaggtattcctttacagcaatgtaagaacagactaatacaatgcccttaaagagacccaagacagctaccttgccccttccaccatgtgaagacacagcaagagattgccctctatgaaccaggaagcaagctctcaccagacatcaaatctg

SEQ ID NO: 112358 - DNA, 364 bp, Homo sapiens
tccatctgaataactaaaatagaactggatgtgtccaaaaagcaaagcctagaaaaagcaatcatatggcccccagtgaatgtcaaggtatctattaatgcatagatttgattactcgtcttaacgggaaaatagggtcaggagactgcattgtgtgaactggaatggctaccatgaattactatgttttaggagtccatcaactttttattttgcaaatcaaagatcttgaattgaagtcacgttgggctgcacccatgtgctgacacggcagacagtccagctggccctcttgcagccttttgggcctgtctgcccacttggctctgcccctctgccctcaatggggcttgtatcactgctt

SEQ ID NO: 112359 - DNA, 347 bp, Homo sapiens
gcactagcagtgtaagttggaggcctgttttctcatctagaagatgaggacataaggttgtataaccaaactccttttctactaatattaaaaccacatttcatctaatctaagatgccactgactatgagaggtatgttcatataacagcaaagaagatgacattttaaaatgtgccatcagttaaataatccccaaacaccaaagatatccccatgatgcatagattggtgaactagactcttgtggctttgaaatccattcagatgaatttggcagcttctcctgcccttggttgtgttgcttggcatgaaataggcaatcctttttgaatgttctcaataaca

SEQ ID NO: 112360 - DNA, 1060 bp, Homo sapiens
aatagcaagagaagttagtttaaccatctagaaacattgctaatctccttgaaagccaattctcttactcattgcaccaacaagaaacactccaaggtgggcaaggaaagacgtgaattctgatattggcgccataactcgatatgtacccagaaacagttatgttctaaattaatggctttaacctgttcattgtaaaaagtgccttggacttcaatctaaagaggtcagtataaatatgtatgtgtgtgtgtgacgtgtatgtaggcaaatatttacagatttatacatacataggtgcacacacatatacccgcacattcatatataatatatacatacatatataaatgcttcataatatatcatattgctattcacagctccatttcttttgtctggtcctatgtttatttgtttagtgagacctttacatagagaggttctattcggaacattgatgtattttttgtttgttttttactttttattaaaaaggtaaaggatattaaaaaaaaaaaaaaaagtcaagtgcctgaaggttttgaatggagttacggtaaactttctcaggtcaccaaagaggaaacatttttcctttggaaaacatttttctgtttcagtgactttgttttcccttggtggtaatgcataaataagagtggttaaagtgattttgtaagttttatttcaatccatttctgtggttcccataaggcaatagctaccggtcttcacatgctctgtgtggttttgttcgcgttgttactgtgttccttactaaggaaaggcaaatgaaattgcaggggctggagcttagaccagctccaaatatggcttccttttggtaacacacacagaaggtggactagtgggaagtctctctccctgaagcaggtgggaacctgtgtcttagaaggcagaggagtcccagtgaactctccacagctccatgggccctgcctgtctacagttatacaactgcctgtatgagtcagcctttctctaccttagccaaaggtcttctctttctgtggtgtgacagcttgtaatgaaccaa

SEQ ID NO: 112361 - DNA, 326 bp, Homo sapiens
gtcaagtgcctgaaggttttgaatggagttacggtaaactttctcaggtcaccaaagaggaaacatttttcctttggaaaacatttttctgtttcagtgactttgttttcccttggtggtaatgcataaataagagtggttaaagtgattttgtaagttttatttcaatccatttctgtggttcccataaggcaatagctaaaaatttgttcagtctagtgcccagttttctccacacatcagcatcagaagggcccggtcttcacatgctctgtgtggttttgttcgcgttgttactgtgttccttactaaggaaaggcaaatga

SEQ ID NO: 112362 - DNA, 387 bp, Homo sapiens
gcaggaacaacacaaaggaaaaattggaggcaggaaagttggatcctggatgtgaagggaggtaataaaagagaagactgaaaaagtagaatagcctctgcatagcggacttaggatgccaggcctgagagtggacttcctttggtaaagcaagaggaagccattaaaaagttatcttttttacatagctgtcaaataataataagttaacatgtattgaaaggttaccatactgagaggtgaagccagctggacttctgggtagagtggggacttggagaacttttctgtcttacaagaggattgtaaaacacaccaatcagcactctgcagctagcaaggggattgtaacatgtaccaatcagcactctgtagctagcaaaggat

SEQ ID NO: 112363 - DNA, 599 bp, Homo sapiens
tactccacaggctgacttgatcacagcatgattaaatgcacttcctctagaagttagggaaaagaggactcagtgagcataggaagaggaacaagtttctctttgcaaaaacataaaaaaataaaaaattttcaaagaaaacatccaagtctcaaacctcaaacctcaaaccacttcatccaagaagaaacccccacatttgtcatttgcagaagctacagtagagacaatgcaaacaggagctagttctgggtgtgcaaatctgtgacaggtgtgcaaggcacaaccagtccttgcgtgatttcttccaaccgcagactccacgagtgcttatgtacatgagaagacgtgtgtggcccctgggagaagggagcaaccattaggacacaatatttaatgaagtgctaaactgtgcatggctgggtttaaatggtgacctttgagtaaagccagtttgatctcaggacatttccttttcaggaattacttgtatagctacctgatgcagtcaagataaagatctaaatcactgagtaaggcctatgaggcccacgtgctttcaccctgacctctctctaccctcttcccctgtgaaagta

SEQ ID NO: 112364 - DNA, 456 bp, Homo sapiens
acctaaatttaaattgatgtgcctaccgatttaaataagcgctcaatcccagataccttattgtggctggctaaggttaggagttcatgtgaactgtacattagtatcgctgagacaagcctcgttctttctacaaagaactggcgtacgtcacgtgtaggcacccagatataattggttccacatttcgcctgcctttgttggaagggctgtgctttcatgcagtgaactgtaggtcgtcctccttactctaaaagttacacagattcagtgccttatggaaaagtcaggatttccattaaagaggtccatggacagagagtgaaacttggtgtgggggtctttcggggctgccgtgataaatcaccacagaccaggagctttcacagcaaggatctgttctcccacggctctgagaccaagctgtctgcagggccggttccttctgcggtgctg

SEQ ID NO: 112365 - DNA, 289 bp, Homo sapiens
gagtaagattttgtctcgaacaataacagcgacaacaaaacactgagatactacatgctacaccatagatgaaccttgaaaactgctaagtgaaagaaaccagacacagagggccacatactgtgtggctgccgagggacagaaggtgaagggataaggaatgattgctgaatgggtactagatgttcttctgggaagacgaaaatgttctgaaaacagagacaggtggtggttacacaacattgtgaatgcactaaatgccagtgaattctatactttaaaattattg

SEQ ID NO: 112366 - DNA, 223 bp, Homo sapiens
agagagcatgatacacccaggcacagtggtccatgccttctaatcccaacactttgggaagctgagatgggaagatcctttgaggccagcagttcaaaactaggctgggaaacatactgtctttacaaaaaaatgtttaaaaattagccaggcatagtgccacgcacttaccgtcccagccactcaggaggctgaggtgggatcgcctgagcccagtagtttg

SEQ ID NO: 112367 - DNA, 147 bp, Homo sapiens
cactgcactccagcctgggtgacagagcgagactctgtctcaaaaaagaaaagctactacataagatttcagctttaatttatcaaggaaaataaacacatctaatcttgaatatttctaataatgcagttgcaaaatatataaata

SEQ ID NO: 112368 - DNA, 862 bp, Homo sapiens
ttttttttaaaaacggagtcttgctgtgttgcccaggctggagtacagtggctcaatctcaactcattgcaacttctgcctcctgggttcaagcaatcctcgtgcctcagcctcctgagtagttgggatttcaggtgtgggcaatcacgcccagctaaatgttgtatttttagtacagacagggtttcaccatgctggccaggctgatctcaaactcctgacctcaagtgatcctcccaccttggcctcccaaagtgctgggattacaggtgtgagccactgcatttggcctgcaactcaggtttttaaacggggaataaaaacaatattttgttatctggcagtattatataagactaaaaagagaaagagaacccagtgaggtttttattgaaataggttaagtatttgatgtgtttaacataaagccatagaaatagagagaaaaaagataaactggaacaatatcttaaagctataataggtctctggtgactgacacatatagagaataaaggaaacagagaagttaaagtgtctctaaagtcaaaaggtataaaaaactgtggtgccactggtctaaccaagggaagcaatttggttgagtttgatgagataagtgaaatgtgtgagagggaaacacaactgtgagatctgggtcagtagacatgtccagggatatggatctatctatagattatatactgtacacctaaaatcacttaagtcctgagcatggccaggttttcagggggctggggaagagcagagaatgaagtaacaaccataattagaaaatatgggctgggcgtggtggctcacgcctgtaatcccagcactttgggaggctgaggcgggcgga

SEQ ID NO: 112369 - DNA, 710 bp, Homo sapiens
ggtccctagactgagaagcaggtgaggtaatcacaagagaaagtaaagcggggaggagctcgcactggcgatgaccaccagactttgcccaggttgctctgatggaggtttgctacccacatcaccagcaccagagttcctctcttcagttctgccctaacacttttcactccattttaagtggcatgctgggactgtcaaagaaaacagcttaaccaagacctggatgatatgatggcagaacagtgaggagatggcagagcaagatctctacagcaaagagtaggaaatacatctgaatagatcatgaccttctgcttcctgaaaactactactcatcattcaagactgctcccatgtcacctcttctgggaagccttccctgaccactataagctgttgacttcctttgttctgtttcattttccctgcttgaagaacctatttagttcttaaaatattaatgtgtaaataagtacttatgcctctggctgcacttagttctaagaatcttacctacactgatttcaaggctagtatacaagaagtaatcaatagttgctgttgactgagaaagacaaaaagaaaagaaggaaggaaggagggaaacagggaaaggaaggaagaaagcaaagaaggaagggaggcaggagggagggaggacagaagacggggaggagggaaggagggagggcaaaggtaggttggct

SEQ ID NO: 112370 - DNA, 642 bp, Homo sapiens
gcattgttaaagtctctcttcaccctgccgtcatgtctaagtcagagtctcctgaagagcccgaacagctgaggaagctcttcattggagggctgagctttgaaacaactgatgagagccttgaggagccattttgagcaatggggaatgctcacggactgtgtggtcatgagagatccaaacaccaagcaccccaggggctttgggtttgtcacatatgctactgtggaggaggtggatgcagccatgaatgcaaggccacacaaggtggatggaagagttgtggaaccaaagagagctgtctcgagagaagattctgaaagaccaggtgcccacttaactgtgaaaaagatatttgttggtggcattaaagaagacactgaagaacatcacctaagagatgattttgaacagtatggaaaaattgaagtgattgaaatcatgactgaccgaggcagtggcaagaaaaggggctttgcctttgtaaattttgacgaccatgactccatggataagattgtcattcagaaataccatactgtgaatggccacaactgtgaagttaggaaagccccgtcacagcaagagatggatagtgcttcatccagccaaagaggtcgaagtggttctggaaactttggt

SEQ ID NO: 112371 - DNA, 643 bp, Homo sapiens
agggtctgagtctggcgggtaccggagagccccaatttcactgagacttgtcaggcatcttcttacagcaagtgactgattcctcatgttcatcgcccccatttgggcagaggcttcaggggcatctttctgtttgtggttccctcttaagcataattcaagggagtcaccaagactttgttgaggaagttgctttgtgagtgtgtaatgacagaaaccaaggatctgtacacaaagtcaaagtactaaccgataggaaatgaaatattgcaaaactcaagatactaacatgtgtgtctctccaaaagggaggccaccctaaaaagtaatatgttcctagtcactaaaggtgtctgagaggaagcacagtaattgtttgctggacatttggggcaaggatttccttcttagggtataaggttgggccaagggcctatagatgccttctgtttccaacatttcacaagccctgatcgctatgctgggccacacgctgggtgactttcagacagtgagtttggcaggagactgatgtgcaactgagtggccttcgtgttttctcactctcaatgaactcatagccatagaaaatgcactgtgtgtctaatttaccctgatcatcagatgggcacaaatacattag

SEQ ID NO: 112372 - DNA, 519 bp, Homo sapiens
tgacactttgtatggcaagtggaaccactggcttggtggattttgctagatttttctgatttttaaactcctgaaaaatatcccagataactgtcatgaagctggtaactatcttcctgctggtgaccatcagcctttgtagttactctgctactgccttcctcatcaacaaagtgccccttcctgttgacaagttggcacctttacctctggacaacattcttccctttatggatccattaaagcttcttctgaaaactctgggcatttctgttgagcaccttgtggaggggctaaggaagtgtgtaaatgagctgggaccagaggcttctgaagctgtgaagaaactgctggaggcgctatcacacttggtgtgacatcaagataaagagcggaggtggatggggatggaagatgatgctcctatcctccctgcctgaaacctgttctaccaattatagatcaaatgccctaaaatgtagtgacccgtgaaaaggacaaataaagcaatgaatacat

SEQ ID NO: 112373 - DNA, 778 bp, Homo sapiens
tgacactttgtatggcaagtggaaccactggcttggtggattttgctagatttttctgatttttaaactcctgaaaaatatcccagataactgtcatgaagctggtaactatcttcctgctggtgaccatcagcctttgtagttactctgctactgccttcctcatcaacaaagtgccccttcctgttgacaagttggcacctttacctctggacaacattcttccctttatggatccattaaagcttcttctgaaaactctgggcatttctgttgagcaccttgtggaggggctaaggaagtgtgtaaatgagctgggaccagaggcttctgaagctgtgaagaaactgctggaggcgctatcacacttggtgtgacatcaagataaagagcggaggtggatggggatggaagatgatgctcctatcctccctgcctgaaacctgttctaccaattatagatcaaatgccctaaaatgtagtgacccgtgaaaaggacaaataaagcaatgaatacataaaaaaaaaaaaaaaaaaaaaaaaaaaaaaaaaaaaaaaaaaaaaagaaaaaaaaaaaaaaaacactaaccagaagaggacaacaacgaaaaacacgcaccaacaagaaataacggaacacaaaatgagaccacaaaacacggagaacaaggctcaagacgaggaacaaacgcaacgcaaaacaaacacaaaaaaccgagaaggaagaaaacagcaaaaggaaaaaaagagaagaaaaaaacacaaacacaaagaagaa

SEQ ID NO: 112374 - DNA, 568 bp, Homo sapiens
aatgggggaattgtaaggagattttataggttttaaaaggccatcctctagcagtgtgagagttacccgaagctccgcgtccgtgatggtctagggggcttccgaggtgatcgggcagtgtcggtcttcagccgctaagccgagaaggagtcagagagacttaggccagagttccgggggctctgcgagtggctgccagctactgccttcctcatcaacaaagtgccccttcctgttgacaagttggcacctttacctctggacaacattcttccctttatggatccattaaagcttcttctgaaaactctgggcatttctgttgagcaccttgtggaggggctaaggaagtgtgtaaatgagctgggaccagaggcttctgaagctgtgaagaaactgctggaggcgctatcacacttggtgtgacatcaagataaagagcggaggtggatggggatggaagatgatgctcctatcctccctgcctgaaacctgttctaccaattatagatcaaatgccctaaaatgtagtgacccgtgaaaaggacaaataaagcaatgaatacat

SEQ ID NO: 112375 - DNA, 361 bp, Homo sapiens
agcatccggctctgcctcctcatttggacttctgggtcccgagttcctcctgtccctctgctctctctgatgccacggttaatcaactgaactttctcactcttatctttgattcccttttactttcagtcccagactctttgaaagatgagattttaggctgggcatggtggctcacacctgtaatccgagcactttgggaggccaagatgggtggatcacctgacgtcaggagtttaagaccagcctggccaacatgatgaaacactgtctctactaaaaatgcaaaaaattagctggacgtggtggtggcagcctgtaataccagctacttgggaggctgaggcaagagaatcacttg

SEQ ID NO: 112376 - DNA, 902 bp, Homo sapiens
ggggcacatagaaacagaagagagacatagtgtttttttactagcttcaaaatggtctggcttctttctgaaacatagcagcagttgagaaaatgtttattgaatgatgtttcaattttacattttaaaataatttaagtatgcctgaagacattgtacaatctcattatttttgggtccatctgagcaaagacaatgaatatatatgttggtaaggtataaggcagagaagtactctcatgcgaataagagttgcactttagaatatataaacatctgtctgtgtacagaatggtgagagcaatagtcactagaacaggtctaactagatgattgatgtatgtgaaagtatttcatatgcatatccttatgatggaatcccagattagcttatctgatggcagtatgaaatgtataaggtctgtgaatgtccttactaaattacgtaaatatggagcattgtcacgggagtggcttatggtactgagtaaccatgtatgttgcttgtctgatacgtttcacttagatctatggggacttattcatgtgattagtcatctttgtgtgcataatcactgtctcccaacactcactcatttgtttgcacatatagagacatcgtcttcttgtagacaagtcatgcttatcataattcattcaccgtcaccagctctggtattactgaaattgaaaacagtcttactggtgtatctgctgcagtatctacaagatatctcatttcaaaatctacaaaatttttcttggcccttctgcttacttgcttaatcttcctgataatttattttatcaaccatgttctgccagtgctagattttgtttgatttgatattggtggctttgtaagaaatcctagtaccaatgtttctcattatttttcctgg

SEQ ID NO: 112377 - DNA, 239 bp, Homo sapiens
aagtgacttcatcttacctccaatgtccttcctccatctatatctgttatctctagctattttcatcttttctctctgccaggcagttagtagaatagttgaagaatgattttatcagctctcattggactacaggataaaagacctaaaaatatgggataatttaatccaatggctagcaaatacattttgtgttatgtttatggttttcaaaggcattgataaaatcaaactatcat

SEQ ID NO: 112378 - DNA, 265 bp, Homo sapiens
tagtttttaaattcttcctcttctttttattattattctaattattattattttattatttacaagactttttttttcttctaacccacaagatatttggggaataaaaataacagcttggtgtgtagcatctgcagccacttggcaaatgagtttacagtattgtctcctttaagtgaatatattttgtctacaaagtgtatttggatttaaaaaaattaattaggtctttcagttggtaaggagagtttttgaataattctaa

SEQ ID NO: 112379 - DNA, 389 bp, Homo sapiens
actccctgcagtgcaaacaagcatggggcagggatgcagtgatgcagagaaaggctggcttccctggatccatccagtatttaaactccatccagtctttaaacccccaatcatcagtactctggtccctttcatctgagggctaacccaagtcagctgctcatcctcagccctcctccaaagggacggaggaggccagcagcaagccaatggcatatctaagaagcagcccaattttacaggctgaaaaactgaggcaccggtttaggtgtggagaaacaaaaaaaaaaaaaaatgaagccaggcttctacaaatctcaaacctgcatgacgttcttgtcacaaagtggcctagtgtgaggcacttgtgcccacactaggggtgcagg

SEQ ID NO: 112380 - DNA, 552 bp, Homo sapiens
gtagcggttctcatacagtgcgctggactggatggccggccagatgaactcctccacaaactccctgctggcatcctcaatgaacacctttttggtcccaagcttcagtgccttcttccaggcttcctcgaagtcttccttctggccagtgttggccaggtaggcaatgatgtcatagccttgttccttcagccacacgaggatgcaagaggtgtccgggctgccactgtaggccagaaccactgagcctttgctggacatagcatctgggattggaggctcgagttcctggcatctgccatctgtcttcatggtgcggtgaaccactcgggctcagggagcggtggcaggcgacagagcagggagtataatttcaaaataccaaaccatccacaaaaacccagagaatagtacccataaccagcttcaacaatcgtcaatattctgcccttctcgtttcatcctgcctctccaccttacctactgtagtactactttaaagcaaatttcagaaatcaaaatagtttcaccttgacagtaaaattaataaga

SEQ ID NO: 112381 - DNA, 358 bp, Homo sapiens
tttcctggcttaacacatgaggttttctattcagtaatctcatctgttaaggaaaaatttaaatttaaaagcctggctggtatggtggctcatgcctataatcccagcactttgggaggccagggcaggcagattgctagcactcagaagtttgaaacacttgggcaatgtgagaaaaccccatctgtacaaagaatacaaaagaaaaaaaattagttggttgcagtggtgtgcacctgtagtcccagctacttgagaggctgaggtaggaggatcacttgagcgtgggaggcggaggttgtagtaagtggagattgtgccactgccctccagcttgggtgacagagccagaccctgt

SEQ ID NO: 112382 - DNA, 555 bp, Homo sapiens
tgtcttgttcactggttgctccctggcacctggcacctggcactaggtggccttagtcaatactgagtgaataaatgaatgagtgaaaggggtttaggggaaaggccctgactctgtacgtgatctgcagatgttcaggctctttgttttaacacctgaagatttgagggttggactaggtgagctctgatgtttgtcatctttgtaggcttcaccctctgcctgtcccttttgctcctggatgatggtgggttgtatggtggggcttgagattaacgggagaggctgtggatgaagggagttaaaggtcactgctacttagttagcagcaggacggagtatacctaaagcaatctagccaattctttcagttccaaaatccagattccaacagccatcagaacaacacagccctgtacttggccgtgcaagatctcccagctattatgtcatgacagccagcccagcccagagctgtctctgaaagtctaggatatagccttgctcggccaatgagttctgcctgggaagttaactaatgatagtagttctcat

SEQ ID NO: 112383 - DNA, 295 bp, Homo sapiens
cactcacccacacacatgctcacgtgcacacacacatacacatacagaaacacacaggtatctgctcatttctcctttttaatggaaggataatccaccaaaataacttgttttaatttagcattgcctcaagggggagaatacaagaagaggaagtagaagagagagagtagcaggttcaattttggaattgagtaaatatttcacgtaattgtaaaacagtcaaaatttcaaaaatctcaaaatccaaaacaaaataatagaaatgaacataactgctaattaaattaatggc

SEQ ID NO: 112384 - DNA, 274 bp, Homo sapiens
cagagtccaaacagtgctcagagtccaaacagtgcccagagtccaaacagtgcccagagtccaaacagtgcctaaaatcactggagaccaggttagcactccaactctaccacttagttgtgggaccagagaccaggtactttctaaattttggtttccttatccgtaaaatgggaatagaaatgtctacacttcacagggtttcagtgtttcactggaagagataacctatgcagtgtttagcatagtgcctgacacattgtttaacaaatgt

SEQ ID NO: 112385 - DNA, 719 bp, Homo sapiens
agagtaaggaaagcaaatctattattgaagactatatgaagaaaaccacagtctggtttgaactttgttaatttgggttacaatatttcatataataattttgaagcaaagcaatttaaatatgtgaataatattccagtgcacattagactatcatacacttcaaatggcattttcctgtgccttttttcaaagtccattcagtgttcttaatttctaaaggtaattcattagcatttaaagatattagtagaaaaaattgaccaatttcaggagaacctttatttgaattgtattcagttttaattaattctttgctatgttcgtgatataattggaggcttttatgggataactttatccctgttactgttcattagcacttataattgatgttgagaaaacacagaaaattaagcccagataagtttattttgctgtttattatggtcaatggtaaaatacccagtttaaaaaaatatgatggatagcaggtgtaatagaaaagaaatccacaaagaaggaggtggtcagtaattcacaagagaaaacattaagggttcagcagaatacttacaaatattaggtatgaagtaacaaagtaaactagaagctttaacatgaagagttatagaaacttgatgcaggattagtgtttaatatatagtaagagtggctattcttggtcttaaacaaatagatttaattggaaggtgagg

SEQ ID NO: 112386 - DNA, 3499 bp, Homo sapiens
  misc_feature (1653)..(1653): n is a, c, g, or t
cgcggtcccgcctcccgcccgctccgcagcgccagctcggcaggcgcggggcgtgagtgtggagtgagacccgccgggctccaactccgcagcgtcggagcgcggcgggcagcaactttctccccggagcggccgtggcggcggctgctgccgtggcagccggagcggaagccgggaggaagaaagcggcggcagcggcggttgctcccgccggctcgggctgtctagctcgccgagactgccggcccgcggagccgcgtccccccgggcagccccgggcccctgccctatgtcccgcaaggcaagcgagaatgtggagtacacgctgcggagcctgagcagcctgatgggcgagcggcgcaggaagcagccggagccggacgcggcgagcgcggccggggagtgcagcctcctggctgccgccgaatcgagcaccagcctgcagagcgcgggcgcgggcggcggcggcgtcggggacctggagcgcgcggcgcggcggcagttccagcaggacgagacccccgccttcgtgtacgtggtggccgtcttctccgcgctgggcggcttcctgtttggctatgacaccggggtggtgtcaggggccatgctgctgctcaagcggcagctcagtctggacgcgctgtggcaggagctgctggtgtccagcacggtgggggcggctgccgtctcggcgctggccggaggcgccctcaacggcgtcttcggccgccgcgctgccatcctcctggccagtgccctcttcaccgccggctccgcggtgctggctgcggccaacaacaaggagacactgctcgccggccgcctggtcgtgggactcggcatcggcattgcttctatgacagtgccagtgtacattgcggaggtctcaccacccaatttaagaggccgattagtcaccattaataccctcttcatcacaggagggcagttctttgcaagtgttgttgatggagccttcagttatctccagaaggatggatggaggtacatgttgggacttgcagcagttccggcggttatacagttttttggctttctctttttgcctgaaagccctcgatggcttattcagaaaggacagactcagaaggcccgtagaattttatctcagatgcgtggtaaccagaccattgatgaggaatatgatagcatcaaaaacaacattgaagaggaggaaaaagaggttggctcagctggacctgtgatctgcagaatgctgagttatcccccaactcgccgagctttaattgtgggttgtggcctacaaatgttccagcagctctcaggcattaacaccatcatgtactacagtgcaaccattctgcagatgtctggtgttgaagatgatagacttgcaatatggctggcttcagttacagccttcacaaatttcattttcacacttgtgggagtctggcttgttgagaaggtgggccgcagaaagcttacctttggtagtttagcaggtaccaccgtagcactcattattcttgccttgggatttgtgctatcagcccaagtttccccacgcatcacttttaagccaatagctccgtcaggtcagaacgccacttgcacaagatacagttactgtaatgaatgtatgttggatccagactgcggtttctgctncaagatgaacaaatcaactgtcattgactcctcctgtgttccagttaataaagcatctacaaatgaggcagcctggggcaggtgtgaaaatgaaaccaagttcaaaacagaagatatattttgggcttacaatttctgccctactccatactcctggactgcacttctgggccttattttatatcttgtcttctttgcacctggaatgggaccaatgccttggactgtgaattctgaaatatatcccctttgggcaagaagtacaggaaatgcatgttcatctggaataaactggattttcaatgtcctggtttcactaacatttttacacacagcagagtatcttacatactatggagctttcttcctctatgctggatttgctgctgtgggactccttttcatctatggctgtcttcctgagaccaaaggcaaaaaattagaggaaattgaatcactctttgacaacaggctatgtacatgtggcacttcagattctgatgaagggagatatattgaatatattcgggtaaagggaagtaactatcatctttctgacaatgatgcttctgatgtggaataattttcagctgctcatatatttagttatttaaacaaactggggggagaagaacagcaattggtgacttcactgccctgcttctaatctggttctttccacagcctagttttgattgacttcatattctagaatacttgattaggaggaagatacaaccatgatgactttttttttccacaaggaacaatattttaaaaaatatttacagagattttaatctaataattcttaagcaaatgtgtgtaatgccttcctgaaatagtctaaaatgaatattgtacccagtgacttcagtggtatccttttttcctaagaccatttataattattagtggcaacagagtcagtgctaatctagccaaattacatatgtataatatatttataaaggattctgggagatggtccaagggtgttctgtgtcaaaagatggcctattggccctcagttttcctacagagtagtggcttatctctgatcagctgttacaaactaaattccatgtaagctttcatcaacaaattccaaagtgcctcctacaagggcacagctgtccgtatctcctttggattccatatttttgtttctctccaattcagatattgggagttcttcagatactgactctgcacactatcttttgaacattatgaaaatataatctgtcgggttgttttcatacttcctttttttgcatcagtgataaggcatacatttgcgcagatgagctaggaagttttgagaagtaccttttatgttcagaaagtaacagattaaaggtttttatgggttccaaattggttagtcacttaggtatgcaattataaatgcaaaatagtgccagatctttaactgtatatcagggtcagtttttgttcatgcccaaatcactacaccttcctcattggccttggagtcctactattttgtgccttcatttgtgttacatacatagctgcaagcaaaccatttttcccctttcttttattcaaacaataatttttgaaacaaaaaagaggaaggaaatcagtggcagaaataatcctgctgttattggtgtttgtttaataaaaataatgggacttttttcttaactttttattagctcttcctaagggaaatgtcacatattattatttaattgtacttgtctttttttactttaagagcataaactcgtttttattttgcacacttttctcattttcctgagaatttaccagaaaaaaaaagatacatagatttgtctctgtgtttttctta

SEQ ID NO: 112387 - DNA, 1643 bp, Homo sapiens
cgcggtcccgcctcccgcccgctccgcagcgccagctcggcaggcgcggggcgtgagtgtggagtgagacccgccgggctccaactccgcagcgtcggagcgcggcgggcagcaactttctccccggagcggccgtggcggcggctgctgccgtggcagccggagcggaagccgggaggaagaaagcggcggcagcggcggttgctcccgccggctcgggctgtctagctcgccgagactgccggcccgcggagccgcgtccccccgggcagccccgggcccctgccctatgtcccgcaaggcaagcgagaatgtggagtacacgctgcggagcctgagcagcctgatgggcgagcggcgcaggaagcagccggagccggacgcggcgagcgcggccggggagtgcagcctcctggctgccgccgaatcgagcaccagcctgcagagcgcgggcgcgggcggcggcggcgtcggggacctggagcgcgcggcgcggcggcagttccagcaggacgagacccccgccttcgtgtacgtggtggccgtcttctccgcgctgggcggcttcctgtttggctatgacaccggggtggtgtcaggggccatgctgctgctcaagcggcagctcagtctggacgcgctgtggcaggagctgctggtgtccagcacggtgggggcggctgccgtctcggcgctggccggaggcgccctcaacggcgtcttcggccgccgcgctgccatcctcctggccagtgccctcttcaccgccggctccgcggtgctggctgcggccaacaacaaggagacactgctcgccggccgcctggtcgtgggactcggcatcggcattgcttctatgacagtgccagtgtacattgcggaggtctcaccacccaatttaagaggccgattagtcaccattaataccctcttcatcacaggagggcagttctttgcaagtgttgttgatggagccttcagttatctccagaaggatggatggaggtacatgttgggacttgcagcagttccggcggttatacagttttttggctttctctttttgcctgaaagccctcgatggcttattcagaaaggacagactcagaaggcccgtagaattttatctcagatgcgtggtaaccagaccattgatgaggaatatgatagcatcaaaaacaacattgaagaggaggaaaaagaggttggctcagctggacctgtgatctgcagaatgctgagttatcccccaactcgccgagctttaattgtgggttgtggcctacaaatgttccagcagctctcaggcattaacaccatcatgtatgtatttctttctggctttttactgaaaagattgtgaaaggattattttatgtgaaatagtgaaaagtatttcatgtaaatactagactcagtgatttgttctgattaaatgtatgaattctccttttgggagatactgactttacaattttttaattccagtaatttgttactagataaaggtgatttattttgtttgttatatgattggctttatttgattccataaaatttctcttttacgccatccaatacctccttgtattctgagcttaaatgtgtcattttttctaagccatttcttgatgctggttgga

SEQ ID NO: 112388 - DNA, 781 bp, Homo sapiens
gggaaaagttctcaacccagaatcggggcttaggttctagttcctggtttgctataaatggcactttgactttggaatgtctctggcttccgtttatccattagtcagagaatgatgggacagattacttctgaagaccccttatgtcctataaatctcatagttctcaacaagagggaaacgggaacaacaggggcagaaaccaacgagaggctgaggaaaccaaaccaatgagttttggattgtagctaaccgaggagaaccaggtgtgtcaaaggtgatgaaagtcagatgtgtaaaaagcaagaaggaaacaaaatgaagaacatgagccctaagaattcagtgtctttccctggtaaaactaagaacatcaggaaagccacactcgatgaggcacacatttttccaagccagttttcactctgacagggttacctcaagtgattgtttgagagagggtagaggggttgactacactcattcaatctgccaaattagaaaagtcacccagaataccctgtgctttttgagtgattttcatgtttatctcccgtagcttgctattttgttattcaaaaggagtgtaaacttagggcattcatgtataatacctttcataactcatgttaaaatgctgatgttattggatttctcaggaacactactgttctatttctccattcaaaaaggtaaaaaaaaaattaattactctattttcatcattaatcccatttcccccattgtctttgtattctacataggaagcatgccatagatc

SEQ ID NO: 112389 - DNA, 454 bp, Homo sapiens
aagagggaggaagaaactataaaccgaaaaagaaactgacaaacttctctaattgggaatttacatgcagagagtgagagaagatacatctccccataaaaggattgagaggctgtcagattctctggctgtgctgtttggtgaaggtcttcccctatagaaagccagtatgtaaagattgggagaggtggctgtttttcaaatgcaaaaatcacaacaaaaaataacaaggcacacaaagaaacagggaaatcagtcaaagaaacaaaataaatctccattaactgactccgaagaaacagagatctattagttacctgaaaaagaatttatgataatcttaaagaagctcaatgtgttacaagagaatacagatagacagctaaatgaaatcaggcaaacaaagcatgaacagaatgaggatatgaacaaagatatagaaactataaaaaag

SEQ ID NO: 112390 - DNA, 353 bp, Homo sapiens
taagacaagttgctggtttctatttgcacgcttctctcatctcctttccatcccaccctaactccaatgtcaagaggccttggttcagccaggcgaggtggctcacctgtaatcccagcactttgcgaggccaaggcaggaggctcttttgagtccaggagttcaagaacagtctgggcaacaaagttgagaccccgcttctacaaatgcctctacccccaccaaagactagcatggaggcaggcctgtgttcccagccatactggaggctgaggaaggaggaccgcttgaccccaggaggttgaggctacagtgagccgtgtttgcatcactgcactccagcctgggcaaca

SEQ ID NO: 112391 - DNA, 292 bp, Homo sapiens
caaggatttccttaaggactaattgggtaagatttctgaacagataagcacttttccaaagttaaatacaaatactagaaaaagaatatcattttcacagtattttatgatagggataattcaggtcctaattttggtgttatttaaagggaccttattttctgccccttttcaatccccttagtaaattatttttattgtaattttaacttatgctgaatacattttattttttgaggcagagtctctgtcacccagggtggagtgcagtggcacgatctcagttcactgc

SEQ ID NO: 112392 - DNA, 335 bp, Homo sapiens
tggaaacaatctggtcactgcaacttctgcctcccgggttcaagtgattctcctgcctcagcctctcgagtagctgggattataggcatgcaccaccacgcttggtaatttgtatttttaatacagatagtcagatatcttatatttttacaagatagtcaggtattttgtatttttagtagagatagtcagatatttgtagtagagacagtcaggctggtctcgaactcctgacggctgagatgagatgggggttaagcctgggagggttgcaaggttgcagtaaactatgatctatacttccagcctaggcaaacagtggcctaggctggagg

SEQ ID NO: 112393 - DNA, 385 bp, Homo sapiens
tgagacagagtttcactctgttgctcagtgcagtggtgcaatctcagctcactgcaacctctgccttctgggtttaagcaattcgcatgcctcagcctcctaggttagctgggattacaagtacccaccaccatgcccggctaacttttggattttcagtagagacagggtttcatcatgttggtcaggctggtctcaaacacctgaccaagtgatctgcccacttcggcctgccgaagtgctgggtttacaggcatgagccaccacacctggcccacacacagctttaaattggttactttagtgtctcattcttaagaaagccatggatggccacacatttgcccaaatatacaatatgataagcagacatcttaaaagagac

SEQ ID NO: 112394 - DNA, 604 bp, Homo sapiens
ggacacagcttgcacaggtttattatgcaggtgatgggaaggtttctgatatgacacgtgctctggaccaagggccttgcattttaataagtggagtgaataaaaatttatagccaaatgtcatgttggcagcaatggaagtgtgctccggaggtgacaaatgctttgaggaatatagagtgtctgacagcacaatgtgaagaaatgacagctgccatctttgcctgtctttttctctgtgctgcatttgctttgctcttgtcacctttcttaggctggttactgggcagttggaagagactgtggagaattcaattcagttgtttggcttagggacataaaattgaactgcataattcatggataggtatctgcagcatcgtcttcgtgccctgtagaatgggttgactgccaaaggattttacgattctaaaatcctaacagattttaacagttgcttaaatattatttcttggcatatatagctttttaagtctgtgggtcaaagatagatgtactcatttgagacttagtgatttgttttataagtatgttgaataagttgagccagtttgaaatgtgtccttctcttttaaagaaaaga

SEQ ID NO: 112395 - DNA, 446 bp, Homo sapiens
atatctaaccgtgactgtcaactccacaacatgggccctttgcaaacaattgcatatcggcagccttacacactgaaactaaaactaaatcacctcactccttccagtgctctgggctgcatatccagaacaaattattaaatgccttgacttcttttatagcttaagcaatctgcaagttaaggggttatcctacttctagagaatgctggaaagcttaatgatttctcctaaaaagagatgatccatctcgaaggaagtggatgagaaagggaacaggtgtttaaaaagtatttttatattaaaactgggagctgtggctgggtgtggtggctcacgcctgtaatctcagcactttgggaggccaaggcaggtggtctcaaactcctggccttgagcgatcctcctgcctcggccttccaaagttctgggattatagatgtcgg

SEQ ID NO: 112396 - DNA, 358 bp, Homo sapiens
agctgggactaggcgtgcacaaccatacccagctaatttttttaatttatgttagagatggagtcttgctatgttgcccaagctggtttcacactgctggcctcaagtcattctcctaccttggcctcctgaagtgctgagattataggcatgagccatcgctcctgaccaaaatttactttttaaagcaatttatacaccaaataacgttaattggattacagccaggtgaaaagttccctgagaaccgacaccctacagatatgttaccagaaaccactgttaaaactaaagaaataaaagtaatcctgtacactagcaatgctgtacttggctcattgtcaaagattcctactga

SEQ ID NO: 112397 - DNA, 171 bp, Homo sapiens
ccagatgattgaccagttaatctacaaaataaaccctataggtgaagaaagttaaagacaaatgactggcccagtgcggtggctcacgcctgtaatcccagcactttggggggccgaggcaggtggatcatgaggtcaggagttcaagaccagcctggccaagatggtgaa

SEQ ID NO: 112398 - DNA, 339 bp, Homo sapiens
gctggtctcgaacttctgacctcagctaatccacctgccttggcctcccaaattcctgggattacaggtgtgagccaccgcacttggcccccataaaatggtttttaataataaaagatttcatagaaattaaaaacttatgctcatcaaaaaaaggaaatagacatgttaaaacttgaaataaaatacttgcaaaacgagacaaaagactggaatcaggatatataaagaattaaaaaaaatagattaggaaatgggtgagacatttgaataggcacttcacagttgaccattaagcacatgaaaaagtgttcaacctctagcaattcgattatgatg

SEQ ID NO: 112399 - DNA, 505 bp, Homo sapiens
gtgagccactgcacctggctgattttttatatttttagtagagacgggtttcaccatgttagccaggatggtcgcaatctcctgacctcgtgatccacccaccttggcctcccaaagtgctgggattacaggtgtgagccactgcgcccagccaggaatttatttttaaattaaatttgatttatttagtttcctaacccttttattgtttttaggcaattttttgaagtataatatgaataagaaaattatggtgaattgttacagcatcgagacctccaagaccaggacatagaacaatcccagcccccagaaacctccaccccataaggctccacaacccctcttctaacacacagattaccttcagctcttcttgaacttcatataagtgtgaaactcacccatgctgttgaacacagcactgtttcattcatgtaagcggccttatagtattccattatgtgaacgcagtttattatccgttctgttaatcacagtagtt

SEQ ID NO: 112400 - DNA, 261 bp, Homo sapiens
aattctcagaagacaaggatcttaccttttcaacttgttctgctggaggtacagcacacctgggagtggggagggggcagtgtatgtgtgtgtgtgtgttgcttagtgacactaacaatttgagtcacatttattcacgtgacccttttgagtctacatagctgtctcatctgggattacctgtatcatggatttttaccccctctctccactggttcgttttctaaccactcccaccctccaaagtagtatgagccatag

SEQ ID NO: 112401 - DNA, 381 bp, Homo sapiens
atgcctgggtcccagtctgcaggactctctgctgatctagacacaaagttagcactcttcaaaatcatctggtttatctcataatgataacagtgagaatgatgaattaaaggcagttgactcttccaagaaccacttaccccccactgcctgtagataaaggggataccagggctccatagatgggatgtgctttcaatatcaacttctaagtcagctttctgagtgtgataatcatcccacccttccaagctaagatttcataacaattgtatttattctttggatttgctagctataagataaaaatatggcttaaaatgtgctccaaaagaaggctgccacaaaccatgaggcccacccttgtgagaagaacctagg

SEQ ID NO: 112402 - DNA, 496 bp, Homo sapiens
tctcaagagtgtgactgtaatggctctatgttctgcctgtttccctttaacttacttgaccttcagaggtccacaggttggttctgtgctgcatttcttacatcccttttcgtatttccccaactctgaaattcttgtgaggagagcgctcatctaaaacctcttccatcattgtcttccctttatcttttaacaacttaatcagttctaccgtataccatctttattcacatatttttactcatcccctttgatatattttattattcctgctagcctctaagttttgccctttatcagaggaaaattactctcagttttcatcagatgcagtaaatatagagaaagagactttgaactttgacctgagattgaaactcagttctactgcttaactaggagaccttgggtgcaatttttttacttgtaaagcagggctagtaataacctttctcacaaggtaataagattagctaagattatgcgccaaagccac

SEQ ID NO: 112403 - DNA, 483 bp, Homo sapiens
tacttttccacaggagggaaaacatggttcggaaatttaagacctggtcgtattaaaaaagatcaaataaggatcctgaggcttgtgcctgggacatgtgcctttagtgtgaagaaagaccccaactctccaacggacgcctgattacttttatagaaagagatagtctgcaaagccgacagcaaaaatggctcagacaaaagctgaaaacactggaaactgcagagatttgtgcacaaaagctggtttcattaatttgcatcttcagcacgtttatctacatctcttttcttatttttaaaagtgttttgcaacatgaatgtaaaacactttgaaaaagaatctctaaagctgtagtcatgttctgtatccggattgtggtggtggttacataaacctatacaacgtgttataactcatagaactttgtaaaccaaaagagtcaattttactgtatgataagtttaaaaataaaattaatta

SEQ ID NO: 112404 - DNA, 671 bp, Homo sapiens
gtgtgtatatatgtgtgcatgtatgtgtgtatatgcatgtgctgtgtataaaatgggtcatgatgtttttcttactgagtttctaaaatgtttgaaagccactgatttaggcctctgcttctcaagaaggcatgcatctattacaggccttattgggtaaattttcttcaactattaattttacttcaacattttagcagaaacaaaccagaaaaacaaacatataaacatacaaaccacacattagttttataacaaatacaatcacaaaggtagcatatagaagataaataaaattcacaaattttaaggaaaaaaattagctgggcatgctggtgggtgcctgtaatcccagctactcaggaggctgaggcaggagaattgcttgaacccaggaggcggaagttgcagtgagccaagatcacaccattggactccagcctgggggacagagtgagactctgactcaaaaaaaaaaaaaaaaaaaacgcggggtaactcatttaaggggtaacccccaaatttttaaggcaaaactttgccctcttgtggaaagccctgaggaaaacccccaaggatttaaacttctcctcggcggttccccttcggtgaaaatttcgggaagtccggcccttaggtggaatttccaaaatttccccaatgggtgtttc

SEQ ID NO: 112405 - DNA, 120 bp, Homo sapiens
gtctttgagaggctctggagtcagacagacttgcatgtgaatgcattctgacttcactacatcctacttgtatgatactgggtaaattaccataaaatggagataagaatagttggttaa

SEQ ID NO: 112406 - DNA, 450 bp, Homo sapiens
ccaaagtgctgggattacaggtgtgagccacagtgcctggctggttctctaatttttgaaggaatgctttggtgcaggaacaaagccttgtctcccctgcagctcttggtaggagtgaggaagtgtccaacctgaaatggggtggtattttgtagctcaacaggaaatgtccagatgtaaggccagttttggtttgacacattgaccatactgataggcctcctgacaggtcattctaccttcgggacctggagttccccggtacacgaggtgtaggtgtaatttacttaccagctcacatgtgcccctcatgaaaacccatggcccattcttgtccatgtagtgttgtagttatcaaaattatttctgttcttatatgtttctaatttttgcttgttcctctttcttttctttttctttttctttttttctgtcatactgccctgtgag

SEQ ID NO: 112407 - DNA, 685 bp, Homo sapiens
ttttttctgccattaactttttcttatattttactaaaactgaccttatcatttcaaacctgtgaacctagttctatcctgttttttttttccctacgtatttcgcttgtatacacactcacattatatatatgtaattttttttttttttggttgggaagaaaagatgcctcattttgaaacctaaaggggggaataagaaaagccctttgtaatatattgccatattatcactaaatcccctgacagttgtgacacagaagcaagtcacctgtcacttaagcttgaggtctctttaattttctcctggaattcgcaccaggctgtctttaatttgaggcctttattggaattctgaaacctctctgcctccctggctctcagatctattctgagagctgttacagaatgtatacaataaccaacagagggattcggagagggctggagctctgtttatttaacactctagagggatttttgtgcttattcggtcctggctgcccggctttcaatattgctttgacaaccattctgcccttctcattaattttaaacagttaaaacacaagaaaaagaggaaaaagttttcattattaaagtgctttactttttaataacagaggattctgtccgccaggggaaagggcatcctcgctaatttcacattcatattaaaaaaaaa

SEQ ID NO: 112408 - DNA, 271 bp, Homo sapiens
taagccaagattcaagccgaaagtagtgttttatcacagcagttttctttccacaatatataagagtgtgggcaatactctctcaatttaccttgtcccttttgcctgctacttaaaaataacacaattcataacccttgaaatataaaaatgttgctcttctttccaattctaactggcaatagcaatcatagactgtggtgggcagaatctgaaatgacccccagtgatctctgtctgctgtataatctcctcgccttgagtgtggttg

SEQ ID NO: 112409 - DNA, 709 bp, Homo sapiens
ctttcagggcctgctatctgtcatgtgatgctacactagagtcacattggaatttggtctcttatgctacaaagagcctgttttgtcagtcttaagatctctgttttaacgtcagctggtcggttgtgctgaattccaaagggaaggagggtatcatgaggcatgtctgaccctctcttcttatcatggcctgaactagtttttcaggtttactttggaatgccattggctgaaaaagggggattcgttcagtcagatgggggacttagaattttatatttggttgacatgtttttatgatttttctccattcaccctttcattattcctctgagagtggttggagtctattagggctggccttggaataagtgggctagttatctactggcatttgatagtttcaggtctgctaggaggtcaatcccctctgaccgcaaaggggatttccatcttaaacacatctaccacatgtcaaacattccagtattagaaattcattctgctggatcttggagatgtctttggtacctcactgaaatgtatgtacctttggtcagggcaggttgtcgcccaaactaaatttagcacagcagaagacaattcattaatgggatgcttctggtgaagtggcaagaaacaaggctagcagaaagttgagcaggtattgagaaccattttaccatatgactacattaataaatgtatg

SEQ ID NO: 112410 - DNA, 1543 bp, Homo sapiens
  misc_feature (153)..(153): n is a, c, g, or t
gtggtgaaggtactgccgctggtgttcctgtctgcagtccagctgctgggtgctagtgcactaagccctgttgccattgagacgtgggcggggcagtgcctccttccctccggtgtcccgctgctgcactgcgcccacggccacggatgtccngccgcgagagggggcggagcgagcgtgcgcggcgggcgcgcgcaggctccgtaaccgaaccctgagccgcctgcgcggatcggcgtccgcagcgggcggctgctgagctgccttgaggtgcagtgttggggatccagagccatgtcggacctgctactactgggcctgattgggggcctgactctcttactgctgctgacgctgctggcctttgccgggtactcagggctactggctggggtggaagtgagtgctgggtcaccccccatccgcaacgtcactgtggcctacaagttccacatggggctctatggtgagactgggcggcttttcactgagagctgcagcatctctcccaagctccgctccatcgctgtctactatgacaacccccacatggtgccccctgataagtgccgatgtgccgtgggcagcatcctgagtgaaggtgaggaatcgccctcccctgagctcatcgacctctaccagaaatttggcttcaaggtgttctccttcccggcacccagccatgtggtgacagccaccttcccctacaccaccattctgtccatctggctggctacccgccgtgtccatcctgccttggacacctacatcaaggagcggaagctgtgtgcctatcctcggctggagatctaccaggaagaccagatccatttcatgtgcccactggcacggcagggagacttctatgtgcctgagatgaaggagacagagtggaaatggcgggggcttgtggaggccattgacacccaggtggatggcacaggagctgacacaatgagtgacacgagttctgtaagcttggaagtgagccctggcagccgggagacttcagctgccacactgtcacctggggcgagcagccgtggctgggatgacggtgacacccgcagcgagcacagctacagcgagtcaggtgccagcggctcctcttttgaggagctggacttggagggcgaggggcccttaggggagtcacggctggaccctgggactgagcccctggggactaccaagtggctctgggagcccactgcccctgagaagggcaaggagtaacccatggcctgcaccctcctgcagtgcagttgctgaggaactgagcagactctccagcagactctccagccctcttcctccttcctctgggggaggaggggttcctgagggacctgacttcccctgctccaggcctcttgctaagccttctcctcactgccctttaggctcccagggccagaggagccagggactattttctgcaccagcccccagggctgccgcccctgttgtgtctttttttcagactcacagtggagcttccaggacccagaataaagccaatgatttacttgtttcacctgga

SEQ ID NO: 112411 - DNA, 1576 bp, Homo sapiens
cgcggatcggcgtccgcagcgggcggctgctgaggtgagggccgggccagaggagaggcatacccactggggcgtaggtctgggactccccctgtccgccctggcgcgacctcaggactctccgtgtcccctccgtgacccccgcggcccgggccgctctttgcatcttgtcttgcccacagctggcctcggccaggtccgagggcctggatgcgaccttggggcagcccctactcttccgggcagcccacttccgcggccaccggtgcagggcatgccccggggccgtggagctgccttgaggtgcagtgttggggatccagagccatgtcggacctgctactactgggcctgattgggggcctgactctcttactgctgctgacgctgctggcctttgccgggtactcagggctactggctggggtggaagtgagtgctgggtcaccccccatccgcaacgtcactgtggcctacaagttccacatggggctctatggtgagactgggcggcttttcactgagagctgcagcatctctcccaagctccgctccatcgctgtctactatgacaacccccacatggtgccccctgataagtgccgatgtgccgtgggcagcatcctgagtgaaggtgaggaatcgccctcccctgagctcatcgacctctaccagaaatttggcttcaaggtgttctccttcccggcacccagccatgtggtgacagccaccttcccctacaccaccattctgtccatctggctggctacccgccgtgtccatcctgccttggacacctacatcaaggagcggaagctgtgtgcctatcctcggctggagatctaccaggaagaccagatccatttcatgtgcccactggcacggcagggagacttctatgtgcctgagatgaaggagacagagtggaaatggcgggggcttgtggaggccattgacacccaggtggatggcacaggagctgacacaatgagtgacacgagttctgtaagcttggaagtgagccctggcagccgggagacttcagctgccacactgtcacctggggcgagcagccgtggctgggatgacggtgacacccgcagcgagcacagctacagcgagtcaggtgccagcggctcctcttttgaggagctggacttggagggcgaggggcccttaggggagtcacggctggaccctgggactgagcccctggggactaccaagtggctctgggagcccactgcccctgagaagggcaaggagtaacccatggcctgcaccctcctgcagtgcagttgctgaggaactgagcagactctccagcagactctccagccctcttcctccttcctctgggggaggaggggttcctgagggacctgacttcccctgctccaggcctcttgctaagccttctcctcactgccctttaggctcccagggccagaggagccagggactattttctgcaccagcccccagggctgccgcccctgttgtgtctttttttcagactcacagtggagcttccaggacccagaataaagccaatgatttacttgtttcacctgga

SEQ ID NO: 112412 - DNA, 2909 bp, Homo sapiens
  misc_feature (911)..(911): n is a, c, g, or t
  misc_feature (1968)..(1968): n is a, c, g, or t
aggcttaagctgtcctcccacctcggcctcctgagtagctgtgacaagaggcgtgtaccaccatgcttggctagtttttgtattttttatagagatggtgtttcgccatattgcccaggctggccttgaacttgttagctcaagtgatcctgcctcagcctcccaaagtgttgggattctagggatgagccaccatgcccagctggattcctttttttagtttgtttgtttttaaagacagttttccttttttgcccaggctggagtgaaatggcatgatcttggctcactgcaacctccacctcgtgggttcaagcgattctcctgcctcagcttcctgagtagctgggattacaggtgcctgccaccatgcccggctaatttttgtatttttagtagagatggggttttgccatgttggccaggctggtctggaactcctgacctcatgtgatccacctgcctcagcttcccaaagtgctgggattacaggcgtgagccaccgtgcctggcctccagctgaattcctttgctttaagtgtatatatgtctccaggggctgtcttcatttcagcaggctgtcctggcctgaaggaggcacccctaggctccttcctctgaacattcctagcctaggagctgggtggtaggaggtagcatgctgggaagcaggcacattcctatacctggggtcccaagagagccattgggtgggtgggcagacagaacatacagtttaatagggccagggagaaactgtctccctcctttgctcttttcaggcctgcggtccctggggcactgatcattatttaaggagcagtgagggcctggcatcctgtcccctggtcagaagaaactacccaaaacttaaagctcccccagctccctgaccacctcattcacaggcntctgtcctgggagccacacctggggcctcagcaagaggagggccctgggccagcagcctgggcttctagggctcacctcacctctgccagtagcgcccagagggcatattctgggggctgagtgggtggtgggggtagggagagaccccaaattcccccctctcctaattctcccacccccaacctaggccccatttgaggctcaaggaaagccccaggctgagtccaggcgccaagcagaccccagctgcacctggcttggctccaacaccatggagacagtggctggggaagctggctaacccctcaccttctgtgatgtttgacagctgaccctctccccatcatacaggaagggtagcagatccactttctcccagtctggattcctgcacacagcgagcctgagccatgtgttcctccttgccaccccagcctgcattcagtgcctctgatccagggagatgaacccaggggttgctcctggacagggcagatgaaggggctgcttgcttggaggatgtattgggggtggaaggagcaggttagaaggagtttgggccatcaacctggctcagcactggtttggggcaccccaaccaccagcagagtgctctcatcatccccttttgctatcttgtggctcaggaagcaccagtcattgggggtggggtgggtaagggtttctcagggtcgacccaggcatagggagagaaaacccttaacatgtttcatcccagcaccctcctccttgcagctggttgagtatttctcaggccttctccatcctcctcgtacttcagctccctcctcaactgggacttggtgtgtaccagaggcaggggcctgctgactccctggatgctgctcctgggagccctgcacgggggagggctgcagaggggcctcctgctgcattctgcagtcctcgtgccctgtgggtgatgttctgtagctggccctggacacatctctttccaagcttgaagtgggggtgggggaaggtggagaggacactacttgtgtctctttgttctacctcagctcctcacctcanggctgagtggcccttaataaatgtggggggagggcagcaggctttgtggaagtgcagggagctgaggctaatttagagtggggagaagagtgcacagctgcctcctcccaccctctctccctccctccctccttccctccctcccttcctcccagctctttccctctgccctgtctgtgcagccccagtcagggtagagggcagagggcagctggagcaagccccctgagcccgggaggctgcattattcatgagtgcactgcgtgctgagttgcctctccctggaggagggggtggggtggtcctagctaacctgtgctcccttttcctggtcataggaggagctgacacaatgagtgacacgagttctgtaagcttggaagtgagccctggcagccgggagacttcagctgccacactgtcacctggggcgagcagccgtggctgggatgacggtgacacccgcagcgagcacagctacagcgagtcaggtgccagcggctcctcttttgaggagctggacttggagggcgaggggcccttaggggagtcacggctggaccctgggactgagcccctggggactaccaagtggctctgggagcccactgcccctgagaagggcaaggagtaacccatggcctgcaccctcctgcagtgcagttgctgaggaactgagcagactctccagcagactctccagccctcttcctccttcctctgggggaggaggggttcctgagggacctgacttcccctgctccaggcctcttgctaagccttctcctcactgccctttaggctcccagggccagaggagccagggactattttctgcaccagcccccagggctgccgcccctgttgtgtctttttttcagactcacagtggagcttccaggacccagaataaagccaatgatttacttgtttcacctgga

SEQ ID NO: 112413 - DNA, 485 bp, Homo sapiens
gggcgctctagaggatctcaatcgcacgaacaaggagcctttcgagcatgagtcattgctcttgaaccgaaaggatcacaagctaaccaaggctgagaaaaaagcagcaaagaaaagctatgaggaagacaaacgcacatcagtcccctatacccgcccatcgtatgcgcagtattaccctgccagcgatcagagcctgaccagcatccccgccttcagccagagaaactggcagccaactttgaagggtgatgaaaagcctgtggccagtgttcgtcctgtgcagtccacccccatccccatgatgccccggcatgtcccattgggaggaagtgtaagctctgcctccagcacaaatccatccatgaactttcccatcaactacttgcagcgtgcaggagtccttgtgcagaaggtggtcaccacgacagatattgttattcctggactcaacagctccttgtcgtggcgattgaatcctctag

SEQ ID NO: 112414 - DNA, 4477 bp, Homo sapiens
gcagctataggcgccaccaatggcaagaacctagcctccgggaccccaaaaagaagagagctcagaagccctcccacatgagaagaaacatacgaaagctactccgggaggatcaattggagcctgttaccaaagcagcacagcaagaagagttggaaagaaggaagcgcctggagcagcagaggaaagattatgcagcccctattcctactgttccgctggagttcctccctgaggaaattgctttaagggcaagtgacggtccccaactgcctcctcgggtcttggcccaggaagtcatttgtttggacagtagcagtggcagtgaggatgaaaaaagcagtcgagatgaggtgattgaactgagctctggagaggaggacactctgcacattgtggacagcagtgaatctgtcagtgaagatgatgaggaagaagagaagggtggcacccatgtcaatgatgtcttaaaccagcgtgacgcccttgggcgggtccttgtcaacctaaaccaccctccagaggaggaaaatgtcttccttgccccacagttggcacgggctgtgaaacctcatcagattggcgggatccggttcctttacgataacctagtggagtctctggagaggtttaagaccagcagtggctttggctgtattctggcccacagcatgggtctggggaaaactttgcaagtgatctctttcatcgacgtcctcttccgccacacgccagccaaaacagtccttgccattgtgccggttaatactcttcagaattggctggcagagttcaacatgtggcttccacctcctgaagccctcccggctgacaacaagcctgaagaagtccagcctcggttctttaaagttcacatcttgaatgatgagcacaagacgatggcatctcgtgctaaagtgatggctgattgggtgtcagagggtggcgtgctgctgatggggtacgagatgtacagactcctcactctgaagaaatcatttgccacaggtagaccgaagaaaaccaagaagcgttctcacccagtcatcattgatctagatgaggaagatcggcagcaggagtttcggagagagtttgagaaggctttatgccgccctggccctgatgtagtaatctgtgatgagggacaccgcatcaaaaactgccaggccagcacctcacaggctctgaagaatatccgctctcgccgccgggtggtgctgactgggtaccctctgcaaaacaacctcattgagtactggtgcatggtggactttgtgcgcccagacttccttggcacccggcaggagttcagcaacatgtttgaacgccctatcctgaatgggcaatgtattgacagcacacctcaggacgtccgcctcatgcggtaccggagccatgtcctgcacagtcttctggagggctttgtgcagaggagaggccacactgtgctgaagattcatctccctgccaaggaagaaaatgtgatccttgtgcggctctccaagatccagcgagatttgtatacacagttcatggatcgcttccgggactgtggtagcagcggttggctggggctgaacccccttaaggcattctgtgtgtgttgcaagatctggaatcaccctgatgtgctgtatgaagcccttcagaaggagagcttggccaatgagcaggacctagacgtggaagaacttggctctgcagggaccagtgcccgctgtccaccacagggaacaaaaggcaagggagaggatagcaccttggcttcctcgatgggagaggcaaccaatagcaagttcctacagggcgttggcttcaaccctttccaggagcgaggcaacaacattgtcacatatgaatgggccaaggaccttctgactaattaccagactggagtcctagaaaactctcccaagatggtactgcttttccacctgattgaggaaagtgtgaagcttggggacaagatccttgtgtttagccagagtctttccaccttggctctcatcgaggaattccttggaaaacgagaagtaccctgtccacctggtaccgaggggcaaggagcacagaagtgggttcgaaacatcagctacttccggctagatggtagcacccctgcctttgagagggagcggcttattaatcagttcaatgatcccagcaacctcaccacctggctgttccttctctctacaagggccggatgcttgggtgtgaatctgattggtgccaaccgagtggtggtgtttgatgcttcctggaacccttgccatgatgcccaggcagtatgtcgggtataccgttatggccagaaaaagccctgttacatctatcgccttgtggctgattacactctagaaaagaagatctatgaccgtcagatttccaagcagggcatgtcagatcgggtggtggatgatctaaatccaatgctgaacttcacacggaaagaggtggaaaacctactgcactttgttgagaaggagccagctccccaagtttccttgaacgtaaaggggatcaaggagtcagtcctgcaactggcctgtctgaagtaccctcacctcatcaccaaggagcctttcgagcatgagtcattgctcttgaaccgaaaggatcacaagctaaccaaggctgagaaaaaagcagcaaagaaaagctatgaggaagacaaacgcacatcagtcccctatacccgcccatcgtatgcgcagtattaccctgccagcgatcagagcctgaccagcatccccgccttcagccagagaaactggcagccaactttgaagggtgatgaaaagcctgtggccagtgttcgtcctgtgcagtccacccccatccccatgatgccccggcatgtcccattgggaggaagtgtaagctctgcctccagcacaaatccatccatgaactttcccatcaactacttgcagcgtgcaggagtccttgtgcagaaggtggtcaccacgacagatattgttattcctggactcaacagctccacagatgtacaggcaagaattaatgctggtgagagcatccacatcatccgtgggacaaaagggacgtacatccgtaccagtgatggacggatctttgctgtccgggcaactggcaaaccaaaggttcctgaagatggtcggatggctgcctcaggttcccagggaccttcttgcgagtccacaagcaacggcagacacagtgcctcatcacccaaagcccccgaccctgaggggctggccaggcccgtctctcctgacagcccagagatcatcagtgagcttcagcagtatgcagatgtggctgctgcccgggaatcccgtcagagctccccaagcaccaatgccgccctgcctggccccccggcccaacttatggacagcagtgctgttcccgggacagctctcggaactgagcctcgactagggggtcattgcctcaatagttccctcttggtgactggccagccctgtggtgacaggcacccagtgctggacttaaggggccacaagcgaaagttggccacaccacctgctgcccaggagtcatcccgccggcggtccaggaagggtcatctgccagcccccgtgcagccgtatgaacacgggtatccagtctctggcgggtttgccatgccacccgtctccttaaaccataacctcaccacccccttcacctcccaggctggggagaactccctgtttatgggcagtaccccctcctactaccagctgtccaatttgctggcagatgcccgcctggtgtttccagtgactactgaccctctggtgccagcaggccccgtcagttcctcttccacggctacctcagtcactgccagcaacccctccttcatgctcaacccttctgtgccagggatactacccagctattcactcccattctcacagccactcctgtccgagccgaggatgtttgcgccttttccttcccctgtcttgcccagcaacctttcgcggggcatgtctatctatccaggctacatgtccccacatgcaggctacccagctggtggcctcctacggtcccaggtgcctccatttgactctcatgaggttgccgaggttgggttcagctccaatgatgatgaggataaagacgatgatgtgatagaggtcactgggaaatagctagggagcccctccccacctcacttggggcccccagcaggttgcccaccaagctggaaggcagtgatttagaccttttgagaataggacacttggcaggagggaaaaggaagaggacaaaggagggtggttggccaaagtggcagagctctgttgctgtttaacaaaagaggcaaaaaaaaaaaaaaaaaaaaaaaaagtccaacacagcagcaatagcgggaaatcagggacccaaaacagggatggaggggcagtgcagcctcttttccttcctgccttgcttatgctgtctgcttgcttgctcgcccatctgagtg

SEQ ID NO: 112415 - DNA, 5573 bp, Homo sapiens
  misc_feature (1720)..(1720): n is a, c, g, or t
  misc_feature (1791)..(1791): n is a, c, g, or t
  misc_feature (2090)..(2090): n is a, c, g, or t
gcagctataggcgccaccaatggcaagaacctagcctccgggaccccaaaaagaagagagctcagaagccctcccacatgagaagaaacatacgaaagctactccgggaggatcaattggagcctgttaccaaagcagcacagcaagaagagttggaaagaaggaagcgcctggagcagcagaggaaagattatgcagcccctattcctactgttccgctggagttcctccctgaggaaattgctttaagggcaagtgacggtccccaactgcctcctcgggtcttggcccaggaagtcatttgtttggacagtagcagtggcagtgaggatgaaaaaagcagtcgagatgaggtgattgaactgagctctggagaggaggacactctgcacattgtggacagcagtgaatctgtcagtgaagatgatgaggaagaagagaagggtggcacccatgtcaatgatgtcttaaaccagcgtgacgcccttgggcgggtccttgtcaacctaaaccaccctccagaggaggaaaatgtcttccttgccccacagttggcacgggctgtgaaacctcatcagattggcgggatccggttcctttacgataacctagtggagtctctggagaggtttaagaccagcagtggctttggctgtattctggcccacagcatgggtctggggaaaactttgcaagtgatctctttcatcgacgtcctcttccgccacacgccagccaaaacagtccttgccattgtgccggttaatactcttcagaattggctggcagagttcaacatgtggcttccacctcctgaagccctcccggctgacaacaagcctgaagaagtccagcctcggttctttaaagttcacatcttgaatgatgagcacaagacgatggcatctcgtgctaaagtgatggctgattgggtgtcagagggtggcgtgctgctgatggggtacgagatgtacagactcctcactctgaagaaatcatttgccacaggtagaccgaagaaaaccaagaagcgttctcacccagtcatcattgatctagatgaggaagatcggcagcaggagtttcggagagagtttgagaaggctttatgccgccctggccctgatgtagtaatctgtgatgagggacaccgcatcaaaaactgccaggccagcacctcacaggctctgaagaatatccgctctcgccgccgggtggtgctgactgggtaccctctgcaaaacaacctcattgagtactggtgcatggtggactttgtgcgcccagacttccttggcacccggcaggagttcagcaacatgtttgaacgccctatcctgaatgggcaatgtattgacagcacacctcaggacgtccgcctcatgcggtaccggagccatgtcctgcacagtcttctggagggctttgtgcagaggagaggccacactgtgctgaagattcatctccctgccaaggaagaaaatgtgatccttgtgcggctctccaagatccagcgagatttgtatacacagttcatggatcgcttccgggactgtggtagcagcggttggctggggctgaacccccttaaggcattctgtgtgtgttgcaaggtgcattggggcctcagggaagattgagatggggactaaggatacacatggtcccaagggagttactcctactgagagtcttcaataaagggagaataaagtgaganggggccacctcagttcactgcactggaggtttgggggctccaaggagagaggtgatggtttgtaccacatnactcctgggggtgccattcacacagtgtaatataactgatgccccctgcagtgtgcaactcagctgcacaacttgttattccaaggggattaatggaaaaatactgtggggcagcgtttttgactgctagcataatcagaattcaagagatatatagcttagacaagttattaggggtaccttccattggattccatacttaatcagattgagacctctctcattcttttcttgagggacctgtttcattgacttcatacctctacccctggctactcttcagcagacctgttaggtantattcttaattgaccactgctttaataagtcagcagaaggtatgtgtctggggacaagaggggtttccaaatatttcttttatagccacagtcctgggtcaaggccaggaaactaaggcaagcgtggtctgtgatgatgctttggtatcactgcatccttccttcttcctttcctctcttctcctgggagttctcaactcttgctaggaatactctgtgaaatgatatgtgattggtctactataagtcagatacattttgtctatagttttatacagtagcagactgtagccacactgtgaaactggaacattcttactcttatttgaataagaatgtcaaaaaggcttgtgacagcttttttgattatgtatcaaacatacttactggcatggctcctggtatgcatgctgccattcatgtgtcatggtgaccagaactgataatcaaaacaaatatgcaggccctttggctgtgaagggctctgactttaatttttggtgtgacagtgtttattgtgggacgtgtgtgtttgagcaagtatgtgtttccagactccctgggacacccttggaatgttttttgtcctgtgtctcctctccctttccttgaacctcagatctggaatcaccctgatgtgctgtatgaagcccttcagaaggagagcttggccaatgagcaggacctagacgtggaagaacttggctctgcagggaccagtgcccgctgtccaccacagggaacaaaaggcaagggagaggatagcaccttggcttcctcgatgggagaggcaaccaatagcaagttcctacagggcgttggcttcaaccctttccaggagcgaggcaacaacattgtcacatatgaatgggccaaggaccttctgactaattaccagactggagtcctagaaaactctcccaagatggtactgcttttccacctgattgaggaaagtgtgaagcttggggacaagatccttgtgtttagccagagtctttccaccttggctctcatcgaggaattccttggaaaacgagaagtaccctgtccacctggtaccgaggggcaaggagcacagaagtgggttcgaaacatcagctacttccggctagatggtagcacccctgcctttgagagggagcggcttattaatcagttcaatgatcccagcaacctcaccacctggctgttccttctctctacaagggccggatgcttgggtgtgaatctgattggtgccaaccgagtggtggtgtttgatgcttcctggaacccttgccatgatgcccaggcagtatgtcgggtataccgttatggccagaaaaagccctgttacatctatcgccttgtggctgattacactctagaaaagaagatctatgaccgtcagatttccaagcagggcatgtcagatcgggtggtggatgatctaaatccaatgctgaacttcacacggaaagaggtggaaaacctactgcactttgttgagaaggagccagctccccaagtttccttgaacgtaaaggggatcaaggagtcagtcctgcaactggcctgtctgaagtaccctcacctcatcaccaaggagcctttcgagcatgagtcattgctcttgaaccgaaaggatcacaagctaaccaaggctgagaaaaaagcagcaaagaaaagctatgaggaagacaaacgcacatcagtcccctatacccgcccatcgtatgcgcagtattaccctgccagcgatcagagcctgaccagcatccccgccttcagccagagaaactggcagccaactttgaagggtgatgaaaagcctgtggccagtgttcgtcctgtgcagtccacccccatccccatgatgccccggcatgtcccattgggaggaagtgtaagctctgcctccagcacaaatccatccatgaactttcccatcaactacttgcagcgtgcaggagtccttgtgcagaaggtggtcaccacgacagatattgttattcctggactcaacagctccacagatgtacaggcaagaattaatgctggtgagagcatccacatcatccgtgggacaaaagggacgtacatccgtaccagtgatggacggatctttgctgtccgggcaactggcaaaccaaaggttcctgaagatggtcggatggctgcctcaggttcccagggaccttcttgcgagtccacaagcaacggcagacacagtgcctcatcacccaaagcccccgaccctgaggggctggccaggcccgtctctcctgacagcccagagatcatcagtgagcttcagcagtatgcagatgtggctgctgcccgggaatcccgtcagagctccccaagcaccaatgccgccctgcctggccccccggcccaacttatggacagcagtgctgttcccgggacagctctcggaactgagcctcgactagggggtcattgcctcaatagttccctcttggtgactggccagccctgtggtgacaggcacccagtgctggacttaaggggccacaagcgaaagttggccacaccacctgctgcccaggagtcatcccgccggcggtccaggaagggtcatctgccagcccccgtgcagccgtatgaacacgggtatccagtctctggcgggtttgccatgccacccgtctccttaaaccataacctcaccacccccttcacctcccaggctggggagaactccctgtttatgggcagtaccccctcctactaccagctgtccaatttgctggcagatgcccgcctggtgtttccagtgactactgaccctctggtgccagcaggccccgtcagttcctcttccacggctacctcagtcactgccagcaacccctccttcatgctcaacccttctgtgccagggatactacccagctattcactcccattctcacagccactcctgtccgagccgaggatgtttgcgccttttccttcccctgtcttgcccagcaacctttcgcggggcatgtctatctatccaggctacatgtccccacatgcaggctacccagctggtggcctcctacggtcccaggtgcctccatttgactctcatgaggttgccgaggttgggttcagctccaatgatgatgaggataaagacgatgatgtgatagaggtcactgggaaatagctagggagcccctccccacctcacttggggcccccagcaggttgcccaccaagctggaaggcagtgatttagaccttttgagaataggacacttggcaggagggaaaaggaagaggacaaaggagggtggttggccaaagtggcagagctctgttgctgtttaacaaaagaggcaaaaaaaaaaaaaaaaaaaaaaaaagtccaacacagcagcaatagcgggaaatcagggacccaaaacagggatggaggggcagtgcagcctcttttccttcctgccttgcttatgctgtctgcttgcttgctcgcccatctgagtg

SEQ ID NO: 112416 - DNA, 4896 bp, Homo sapiens
gcagctataggcgccaccaatggcaagaacctagcctccgggaccccaaaaagaagagagctcagaagccctcccacatgagaagaaacatacgaaagctactccgggaggatcaattggagcctgttaccaaagcagcacagcaagaagagttggaaagaaggaagcgcctggagcagcagaggaaagattatgcagcccctattcctactgttccgctggagttcctccctgaggaaattgctttaagggcaagtgacggtccccaactgcctcctcgggtcttggcccaggaagtcatttgtttggacagtagcagtggcagtgaggatgaaaaaagcagtcgagatgaggtgattgaactgagctctggagaggaggacactctgcacattgtggacagcagtgaatctgtcagtgaagatgatgaggaagaagagaagggtggcacccatgtcaatgatgtcttaaaccagcgtgacgcccttgggcgggtccttgtcaacctaaaccaccctccagaggaggaaaatgtcttccttgccccacagttggcacgggctgtgaaacctcatcagattggcgggatccggttcctttacgataacctagtggagtctctggagaggtttaagaccagcagtggctttggctgtattctggcccacagcatgggtctggggaaaactttgcaagtgatctctttcatcgacgtcctcttccgccacacgccagccaaaacagtccttgccattgtgccggttaatactcttcagaattggctggcagagttcaacatgtggcttccacctcctgaagccctcccggctgacaacaagcctgaagaagtccagcctcggttctttaaagttcacatcttgaatgatgagcacaagacgatggcatctcgtgctaaagtgatggctgattgggtgtcagagggtggcgtgctgctgatggggtacgagatgtacagactcctcactctgaagaaatcatttgccacaggtagaccgaagaaaaccaagaagcgttctcacccagtcatcattgatctagatgaggaagatcggcagcaggagtttcggagagagtttgagaaggctttatgccgccctggccctgatgtagtaatctgtgatgagggacaccgcatcaaaaactgccaggccagcacctcacaggctctgaagaatatccgctctcgccgccgggtggtgctgactgggtaccctctgcaaaacaacctcattgagtactggtgcatggtggactttgtgcgcccagacttccttggcacccggcaggagttcagcaacatgtttgaacgccctatcctgaatgggcaatgtattgacagcacacctcaggacgtccgcctcatgcggtaccggagccatgtcctgcacagtcttctggagggctttgtgcagaggagaggccacactgtgctgaagattcatctccctgccaaggaagaaaatgtgatccttgtgcggctctccaagatccagcgagatttgtatacacagttcatggatcgcttccgggactgtggtagcagcggttggctggggctgaacccccttaaggcattctgtgtgtgttgcaagatctggaatcaccctgatgtgctgtatgaagcccttcagaaggagagcttggccaatgagcaggacctagacgtggaagaacttggctctgcagggaccagtgcccgctgtccaccacagggaacaaaaggcaagggagaggatagcaccttggcttcctcgatgggagaggcaaccaatagcaagttcctacagggcgttggcttcaaccctttccaggagcgaggcaacaacattgtcacatatgaatgggccaaggaccttctgactaattaccagactggagtcctagaaaactctcccaagatggtactgcttttccacctgattgaggaaagtgtgaagcttggggacaagatccttgtgtttagccagagtctttccaccttggctctcatcgaggaattccttggaaaacgagaagtaccctgtccacctggtaccgaggggcaaggagcacagaagtgggttcgaaacatcagctacttccggctagatggtagcacccctgcctttgagagggagcggcttattaatcagttcaatgatcccagcaacctcaccacctggctgttccttctctctacaagggccggatgcttgggtgtgaatctgattggtgccaaccgagtggtggtgtttgatgcttcctggaacccttgccatgatgcccaggcagtatgtcgggtataccgttatggccagaaaaagccctgttacatctatcgccttgtggctgattacactctagaaaagaagatctatgaccgtcagatttccaagcagggcatgtcagatcgggtggtggatgatctaaatccaatgctgaacttcacacggaaagaggtggaaaacctactgcactttgttgagaaggagccagctccccaagtttccttgaacgtaaaggggatcaaggagtcagtcctgcaactggcctgtctgaagtaccctcacctcatcaccaaggagcctttcgagcatgagtcattgctcttgaaccgaaaggatcacaagctaaccaaggctgagaaaaaagcagcaaagaaaagctatgaggaagacaaacgcacatcagtcccctatacccgcccatcgtatgcgcagtattaccctgccagcgatcagagcctgaccagcatccccgccttcagccagagaaactggcagccaactttgaagggtgatgaaaagcctgtggccagtgttcgtcctgtgcagtccacccccatccccatgatgccccggcatgtcccattgggaggaagtgtaagctctgcctccagcacaaatccatccatgaactttcccatcaactacttgcagcgtgcaggagtccttgtgcagaaggtggtcaccacgacagatattgttattcctggactcaacagctccacagatgtacaggcaagaattaatgctggtgagagcatccacatcatccgtgggacaaaagggacgtacatccgtaccagtgatggacggatctttgctgtccgggcaactggcaaaccaaaggttcctgaagatggtcggatggctgcctcaggttcccagggaccttcttgcgagtccacaagcaacggcagacacagtgcctcatcacccaaagcccccgaccctgaggggctggccaggcccgtctctcctgacagcccagagatcatcagtgagcttcagcagtatgcagatgtggctgctgcccgggaatcccgtcagagctccccaagcaccaatgccgccctgcctggccccccggcccaacttatggacagcagtgctgttcccgggacagctctcggaactgagcctcgactagggggtcattgcctcaatagttccctcttggtgactggccagccctgtggtgacaggcacccagtgctggacttaaggggccacaagcgaaagttggccacaccacctgctgcccaggagtcatcccgccggcggtccaggaagggtcatctgccagcccccgtgcagccgtatgaacacggctgccttgaggtgcagtgttggggatccagagccatgtcggacctgctactactgggcctgattgggggcctgactctcttactgctgctgacgctgctggcctttgccgggtactcagggctactggctggggtggaagtgagtgctgggtcaccccccatccgcaacgtcactgtggcctacaagttccacatggggctctatggtgagactgggcggcttttcactgagagctgcagcatctctcccaagctccgctccatcgctgtctactatgacaacccccacatggtgccccctgataagtgccgatgtgccgtgggcagcatcctgagtgaaggtgaggaatcgccctcccctgagctcatcgacctctaccagaaatttggcttcaaggtgttctccttcccggcacccagccatgtggtgacagccaccttcccctacaccaccattctgtccatctggctggctacccgccgtgtccatcctgccttggacacctacatcaaggagcggaagctgtgtgcctatcctcggctggagatctaccaggaagaccagatccatttcatgtgcccactggcacggcagggagacttctatgtgcctgagatgaaggagacagagtggaaatggcgggggcttgtggaggccattgacacccaggtggatggcacaggagctgacacaatgagtgacacgagttctgtaagcttggaagtgagccctggcagccgggagacttcagctgccacactgtcacctggggcgagcagccgtggctgggatgacggtgacacccgcagcgagcacagctacagcgagtcaggtgccagcggctcctcttttgaggagctggacttggagggcgaggggcccttaggggagtcacggctggaccctgggactgagcccctggggactaccaagtggctctgggagcccactgcccctgagaagggcaaggagtaacccatggcctgcaccctcctgcagtgcagttgctgaggaactgagcagactctccagcagactctccagccctcttcctccttcctctgggggaggaggggttcctgagggacctgacttcccctgctccaggcctcttgctaagccttctcctcactgccctttaggctcccagggccagaggagccagggactattttctgcaccagcccccagggctgccgcccctgttgtgtctttttttcagactcacagtggagcttccaggacccagaataaagccaatgatttacttgtttcacctgga

SEQ ID NO: 112417 - DNA, 1360 bp, Homo sapiens
cgcggatcggcgtccgcagcgggcggctgctgaggtgagggccgggccagaggagaggcatacccactggggcgtagctgccttgaggtgcagtgttggggatccagagccatgtcggacctgctactactgggcctgattgggggcctgactctcttactgctgctgacgctgctggcctttgccgggtactcagggctactggctggggtggaagtgagtgctgggtcaccccccatccgcaacgtcactgtggcctacaagttccacatggggctctatggtgagactgggcggcttttcactgagagctgcagcatctctcccaagctccgctccatcgctgtctactatgacaacccccacatggtgccccctgataagtgccgatgtgccgtgggcagcatcctgagtgaaggtgaggaatcgccctcccctgagctcatcgacctctaccagaaatttggcttcaaggtgttctccttcccggcacccagccatgtggtgacagccaccttcccctacaccaccattctgtccatctggctggctacccgccgtgtccatcctgccttggacacctacatcaaggagcggaagctgtgtgcctatcctcggctggagatctaccaggaagaccagatccatttcatgtgcccactggcacggcagggagacttctatgtgcctgagatgaaggagacagagtggaaatggcgggggcttgtggaggccattgacacccaggtggatggcacaggagctgacacaatgagtgacacgagttctgtaagcttggaagtgagccctggcagccgggagacttcagctgccacactgtcacctggggcgagcagccgtggctgggatgacggtgacacccgcagcgagcacagctacagcgagtcaggtgccagcggctcctcttttgaggagctggacttggagggcgaggggcccttaggggagtcacggctggaccctgggactgagcccctggggactaccaagtggctctgggagcccactgcccctgagaagggcaaggagtaacccatggcctgcaccctcctgcagtgcagttgctgaggaactgagcagactctccagcagactctccagccctcttcctccttcctctgggggaggaggggttcctgagggacctgacttcccctgctccaggcctcttgctaagccttctcctcactgccctttaggctcccagggccagaggagccagggactattttctgcaccagcccccagggctgccgcccctgttgtgtctttttttcagactcacagtggagcttccaggacccagaataaagccaatgatttacttgtttcacctgga

SEQ ID NO: 112418 - DNA, 1346 bp, Homo sapiens
gggcaagtgggcacattgtcagagtaggctaccagcctcctctcccttctttctcctttgcagctgccttgaggtgcagtgttggggatccagagccatgtcggacctgctactactgggcctgattgggggcctgactctcttactgctgctgacgctgctggcctttgccgggtactcagggctactggctggggtggaagtgagtgctgggtcaccccccatccgcaacgtcactgtggcctacaagttccacatggggctctatggtgagactgggcggcttttcactgagagctgcagcatctctcccaagctccgctccatcgctgtctactatgacaacccccacatggtgccccctgataagtgccgatgtgccgtgggcagcatcctgagtgaaggtgaggaatcgccctcccctgagctcatcgacctctaccagaaatttggcttcaaggtgttctccttcccggcacccagccatgtggtgacagccaccttcccctacaccaccattctgtccatctggctggctacccgccgtgtccatcctgccttggacacctacatcaaggagcggaagctgtgtgcctatcctcggctggagatctaccaggaagaccagatccatttcatgtgcccactggcacggcagggagacttctatgtgcctgagatgaaggagacagagtggaaatggcgggggcttgtggaggccattgacacccaggtggatggcacaggagctgacacaatgagtgacacgagttctgtaagcttggaagtgagccctggcagccgggagacttcagctgccacactgtcacctggggcgagcagccgtggctgggatgacggtgacacccgcagcgagcacagctacagcgagtcaggtgccagcggctcctcttttgaggagctggacttggagggcgaggggcccttaggggagtcacggctggaccctgggactgagcccctggggactaccaagtggctctgggagcccactgcccctgagaagggcaaggagtaacccatggcctgcaccctcctgcagtgcagttgctgaggaactgagcagactctccagcagactctccagccctcttcctccttcctctgggggaggaggggttcctgagggacctgacttcccctgctccaggcctcttgctaagccttctcctcactgccctttaggctcccagggccagaggagccagggactattttctgcaccagcccccagggctgccgcccctgttgtgtctttttttcagactcacagtggagcttccaggacccagaataaagccaatgatttacttgtttcacctgga

SEQ ID NO: 112419 - DNA, 1635 bp, Homo sapiens
  misc_feature (153)..(153): n is a, c, g, or t
gtggtgaaggtactgccgctggtgttcctgtctgcagtccagctgctgggtgctagtgcactaagccctgttgccattgagacgtgggcggggcagtgcctccttccctccggtgtcccgctgctgcactgcgcccacggccacggatgtccngccgcgagagggggcggagcgagcgtgcgcggcgggcgcgcgcaggctccgtaaccgaaccctgagccgcctgcgcggatcggcgtccgcagcgggcggctgctgaggggtgactgttctttcagctcccagcactggagcgctcggcccctgccgcactggatgccagcagttactaaaagtgagcctggcatttcagctgccttgaggtgcagtgttggggatccagagccatgtcggacctgctactactgggcctgattgggggcctgactctcttactgctgctgacgctgctggcctttgccgggtactcagggctactggctggggtggaagtgagtgctgggtcaccccccatccgcaacgtcactgtggcctacaagttccacatggggctctatggtgagactgggcggcttttcactgagagctgcagcatctctcccaagctccgctccatcgctgtctactatgacaacccccacatggtgccccctgataagtgccgatgtgccgtgggcagcatcctgagtgaaggtgaggaatcgccctcccctgagctcatcgacctctaccagaaatttggcttcaaggtgttctccttcccggcacccagccatgtggtgacagccaccttcccctacaccaccattctgtccatctggctggctacccgccgtgtccatcctgccttggacacctacatcaaggagcggaagctgtgtgcctatcctcggctggagatctaccaggaagaccagatccatttcatgtgcccactggcacggcagggagacttctatgtgcctgagatgaaggagacagagtggaaatggcgggggcttgtggaggccattgacacccaggtggatggcacaggagctgacacaatgagtgacacgagttctgtaagcttggaagtgagccctggcagccgggagacttcagctgccacactgtcacctggggcgagcagccgtggctgggatgacggtgacacccgcagcgagcacagctacagcgagtcaggtgccagcggctcctcttttgaggagctggacttggagggcgaggggcccttaggggagtcacggctggaccctgggactgagcccctggggactaccaagtggctctgggagcccactgcccctgagaagggcaaggagtaacccatggcctgcaccctcctgcagtgcagttgctgaggaactgagcagactctccagcagactctccagccctcttcctccttcctctgggggaggaggggttcctgagggacctgacttcccctgctccaggcctcttgctaagccttctcctcactgccctttaggctcccagggccagaggagccagggactattttctgcaccagcccccagggctgccgcccctgttgtgtctttttttcagactcacagtggagcttccaggacccagaataaagccaatgatttacttgtttcacctgga

SEQ ID NO: 112420 - DNA, 4925 bp, Homo sapiens
gcagctataggcgccaccaatggcaagaacctagcctccgggaccccaaaaagaagagagctcagaagccctcccacatgagaagaaacatacgaaagctactccgggaggatcaattggagcctgttaccaaagcagcacagcaagaagagttggaaagaaggaagcgcctggagcagcagaggaaagattatgcagcccctattcctactgttccgctggagttcctccctgaggaaattgctttaagggcaagtgacggtccccaactgcctcctcgggtcttggcccaggaagtcatttgtttggacagtagcagtggcagtgaggatgaaaaaagcagtcgagatgaggtgattgaactgagctctggagaggaggacactctgcacattgtggacagcagtgaatctgtcagtgaagatgatgaggaagaagagaagggtggcacccatgtcaatgatgtcttaaaccagcgtgacgcccttgggcgggtccttgtcaacctaaaccaccctccagaggaggaaaatgtcttccttgccccacagttggcacgggctgtgaaacctcatcagattggcgggatccggttcctttacgataacctagtggagtctctggagaggtttaagaccagcagtggctttggctgtattctggcccacagcatgggtctggggaaaactttgcaagtgatctctttcatcgacgtcctcttccgccacacgccagccaaaacagtccttgccattgtgccggttaatactcttcagaattggctggcagagttcaacatgtggcttccacctcctgaagccctcccggctgacaacaagcctgaagaagtccagcctcggttctttaaagttcacatcttgaatgatgagcacaagacgatggcatctcgtgctaaagtgatggctgattgggtgtcagagggtggcgtgctgctgatggggtacgagatgtacagactcctcactctgaagaaatcatttgccacaggtagaccgaagaaaaccaagaagcgttctcacccagtcatcattgatctagatgaggaagatcggcagcaggagtttcggagagagtttgagaaggctttatgccgccctggccctgatgtagtaatctgtgatgagggacaccgcatcaaaaactgccaggccagcacctcacaggctctgaagaatatccgctctcgccgccgggtggtgctgactgggtaccctctgcaaaacaacctcattgagtactggtgcatggtggactttgtgcgcccagacttccttggcacccggcaggagttcagcaacatgtttgaacgccctatcctgaatgggcaatgtattgacagcacacctcaggacgtccgcctcatgcggtaccggagccatgtcctgcacagtcttctggagggctttgtgcagaggagaggccacactgtgctgaagattcatctccctgccaaggaagaaaatgtgatccttgtgcggctctccaagatccagcgagatttgtatacacagttcatggatcgcttccgggactgtggtagcagcggttggctggggctgaacccccttaaggcattctgtgtgtgttgcaagatctggaatcaccctgatgtgctgtatgaagcccttcagaaggagagcttggccaatgagcaggacctagacgtggaagaacttggctctgcagggaccagtgcccgctgtccaccacagggaacaaaaggcaagggagaggatagcaccttggcttcctcgatgggagaggcaaccaatagcaagttcctacagggcgttggcttcaaccctttccaggagcgaggcaacaacattgtcacatatgaatgggccaaggaccttctgactaattaccagactggagtcctagaaaactctcccaagatggtactgcttttccacctgattgaggaaagtgtgaagcttggggacaagatccttgtgtttagccagagtctttccaccttggctctcatcgaggaattccttggaaaacgagaagtaccctgtccacctggtaccgaggggcaaggagcacagaagtgggttcgaaacatcagctacttccggctagatggtagcacccctgcctttgagagggagcggcttattaatcagttcaatgatcccagcaacctcaccacctggctgttccttctctctacaagggccggatgcttgggtgtgaatctgattggtgccaaccgagtggtggtgtttgatgcttcctggaacccttgccatgatgcccaggcagtatgtcgggtataccgttatggccagaaaaagccctgttacatctatcgccttgtggctgattacactctagaaaagaagatctatgaccgtcagatttccaagcagggcatgtcagatcgggtggtggatgatctaaatccaatgctgaacttcacacggaaagaggtggaaaacctactgcactttgttgagaaggagccagctccccaagtttccttgaacgtaaaggggatcaaggagtcagtcctgcaactggcctgtctgaagtaccctcacctcatcaccaaggagcctttcgagcatgagtcattgctcttgaaccgaaaggatcacaagctaaccaaggctgagaaaaaagcagcaaagaaaagctatgaggaagacaaacgcacatcagtcccctatacccgcccatcgtatgcgcagtattaccctgccagcgatcagagcctgaccagcatccccgccttcagccagagaaactggcagccaactttgaagggtgatgaaaagcctgtggccagtgttcgtcctgtgcagtccacccccatccccatgatgccccggcatgtcccattgggaggaagtgtaagctctgcctccagcacaaatccatccatgaactttcccatcaactacttgcagcgtgcaggagtccttgtgcagaaggtggtcaccacgacagatattgttattcctggactcaacagctccacagatgtacaggcaagaattaatgctggtgagagcatccacatcatccgtgggacaaaagggacgtacatccgtaccagtgatggacggatctttgctgtccgggcaactggcaaaccaaaggttcctgaagatggtcggatggctgcctcaggttcccagggaccttcttgcgagtccacaagcaacggcagacacagtgcctcatcacccaaagcccccgaccctgaggggctggccaggcccgtctctcctgacagcccagagatcatcagtgagcttcagcagtatgcagatgtggctgctgcccgggaatcccgtcagagctccccaagcaccaatgccgccctgcctggccccccggcccaacttatggacagcagtgctgttcccgggacagctctcggaactgagcctcgactagggggtcattgcctcaatagttccctcttggtgactggccagccctgtggtgacaggcacccagtgctggacttaaggggccacaagcgaaagttggccacaccacctgctgcccaggagtcatcccgccggcggtccaggaagggtcatctgccagcccccgtgcagccgtatgaacacggctgccttgaggtgcagtgttggggatccagagccatgtcggacctgctactactgggcctgattgggggcctgactctcttactgctgctgacgctgctggcctttgccgggtactcagggctactggctggggtggaagtgagtgctgggtcaccccccatccgcaacgtcactgtggcctacaagttccacatggggctctatggtgagactgggcggcttttcactgagagctgcagcatctctcccaagctccgctccatcgctgtctactatgacaacccccacatggtgccccctgataagtgccgatgtgccgtgggcagcatcctgagtgaaggtgaggaatcgccctcccctgagctcatcgacctctaccagaaatttggcttcaaggtgttctccttcccggcacccagccatgtggtgacagccaccttcccctacaccaccattctgtccatctggctggctacccgccgtgtccatcctgccttggacacctacatcaaggagcggaagctgtgtgcctatcctcggctggagatctaccaggaagaccagatccatttcatgtgcccactggcacggcagggagacttctatgtgcctgagatgaaggagacagagtggaaatggcgggggcttgtggaggccattgacacccaggtggatggcacaggagctgacacaatgagtgacacgagttctgtaagcttggaagtgagccctggcagccgggagacttcagctgccacactgtcacctggggcgagcagccgtggctgggatgacggtgacacccgcagcgagcacagctacagcgagtcaggtgccagcggctcctcttttgaggagctggacttggagggcgaggggcccttaggggagtcacggctggaccctgggactgagcccctggggactaccaagtggctctgggagcccactgcccctgagaagggcaaggagtaacccatggcctgcaccctcctgcagtgcagttgctgaggaactgagcagactctccagcagactctccagccctcttcctccttcctctgggggaggaggggttcctgagggacctgacttcccctgctccaggcctcttgctaagccttctcctcactgccctttaggctcccagggccagaggagccagggactattttctgcaccagcccccagggctgccgcccctgttgtgtctttttttcagactcacagtggagcttccaggacccagaataaagccaatgatttacttgtttcacctggaaaaaaaaaaaatcggcctccgtgggctca

SEQ ID NO: 112421 - DNA, 5574 bp, Homo sapiens
gcagctataggcgccaccaatggcaagaacctagcctccgggaccccaaaaagaagagagctcagaagccctcccacatgagaagaaacatacgaaagctactccgggaggatcaattggagcctgttaccaaagcagcacagcaagaagagttggaaagaaggaagcgcctggagcagcagaggaaagattatgcagcccctattcctactgttccgctggagttcctccctgaggaaattgctttaagggcaagtgacggtccccaactgcctcctcgggtcttggcccaggaagtcatttgtttggacagtagcagtggcagtgaggatgaaaaaagcagtcgagatgaggtgattgaactgagctctggagaggaggacactctgcacattgtggacagcagtgaatctgtcagtgaagatgatgaggaagaagagaagggtggcacccatgtcaatgatgtcttaaaccagcgtgacgcccttgggcgggtccttgtcaacctaaaccaccctccagaggaggaaaatgtcttccttgccccacagttggcacgggctgtgaaacctcatcagattggcgggatccggttcctttacgataacctagtggagtctctggagaggtttaagaccagcagtggctttggctgtattctggcccacagcatgggtctggggaaaactttgcaagtgatctctttcatcgacgtcctcttccgccacacgccagccaaaacagtccttgccattgtgccggttaatactcttcagaattggctggcagagttcaacatgtggcttccacctcctgaagccctcccggctgacaacaagcctgaagaagtccagcctcggttctttaaagttcacatcttgaatgatgagcacaagacgatggcatctcgtgctaaagtgatggctgattgggtgtcagagggtggcgtgctgctgatggggtacgagatgtacagactcctcactctgaagaaatcatttgccacaggtagaccgaagaaaaccaagaagcgttctcacccagtcatcattgatctagatgaggaagatcggcagcaggagtttcggagagagtttgagaaggctttatgccgccctggccctgatgtagtaatctgtgatgagggacaccgcatcaaaaactgccaggccagcacctcacaggctctgaagaatatccgctctcgccgccgggtggtgctgactgggtaccctctgcaaaacaacctcattgagtactggtgcatggtggactttgtgcgcccagacttccttggcacccggcaggagttcagcaacatgtttgaacgccctatcctgaatgggcaatgtattgacagcacacctcaggacgtccgcctcatgcggtaccggagccatgtcctgcacagtcttctggagggctttgtgcagaggagaggccacactgtgctgaagattcatctccctgccaaggaagaaaatgtgatccttgtgcggctctccaagatccagcgagatttgtatacacagttcatggatcgcttccgggactgtggtagcagcggttggctggggctgaacccccttaaggcattctgtgtgtgttgcaagatctggaatcaccctgatgtgctgtatgaagcccttcagaaggagagcttggccaatgagcaggacctagacgtggaagaacttggctctgcagggaccagtgcccgctgtccaccacagggaacaaaaggcaagggagaggatagcaccttggcttcctcgatgggagaggcaaccaatagcaagttcctacagggcgttggcttcaaccctttccaggagcgaggcaacaacattgtcacatatgaatgggccaaggaccttctgactaattaccagactggagtcctagaaaactctcccaagatggtactgcttttccacctgattgaggaaagtgtgaagcttggggacaagatccttgtgtttagccagagtctttccaccttggctctcatcgaggaattccttggaaaacgagaagtaccctgtccacctggtaccgaggggcaaggagcacagaagtgggttcgaaacatcagctacttccggctagatggtagcacccctgcctttgagagggagcggcttattaatcagttcaatgatcccagcaacctcaccacctggctgttccttctctctacaagggccggatgcttgggtgtgaatctgattggtgccaaccgagtggtggtgtttgatgcttcctggaacccttgccatgatgcccaggcagtatgtcgggtataccgttatggccagaaaaagccctgttacatctatcgccttgtggctgattacactctagaaaagaagatctatgaccgtcagatttccaagcagggcatgtcagatcgggtggtggatgatctaaatccaatgctgaacttcacacggaaagaggtggaaaacctactgcactttgttgagaaggagccagctccccaagtttccttgaacgtaaaggggatcaaggagtcagtcctgcaactggcctgtctgaagtaccctcacctcatcaccaaggagcctttcgagcatgagtcattgctcttgaaccgaaaggatcacaagctaaccaaggctgagaaaaaagcagcaaagaaaagctatgaggaagacaaacgcacatcagtcccctatacccgcccatcgtatgcgcagtattaccctgccagcgatcagagcctgaccagcatccccgccttcagccagagaaactggcagccaactttgaagggtgatgaaaagcctgtggccagtgttcgtcctgtgcagtccacccccatccccatgatgccccggcatgtcccattgggaggaagtgtaagctctgcctccagcacaaatccatccatgaactttcccatcaactacttgcagcgtgcaggagtccttgtgcagaaggtggtcaccacgacagatattgttattcctggactcaacagctccacagatgtacaggcaagaattaatgctggtgagagcatccacatcatccgtgggacaaaagggacgtacatccgtaccagtgatggacggatctttgctgtccgggcaactggcaaaccaaaggttcctgaagatggtcggatggctgcctcaggttcccagggaccttcttgcgagtccacaagcaacggcagacacagtgcctcatcacccaaagcccccgaccctgaggggctggccaggcccgtctctcctgacagcccagagatcatcagtgagcttcagcagtatgcagatgtggctgctgcccgggaatcccgtcagagctccccaagcaccaatgccgccctgcctggccccccggcccaacttatggacagcagtgctgttcccgggacagctctcggaactgagcctcgactagggggtcattgcctcaatagttccctcttggtgactggccagccctgtggtgacaggcacccagtgctggacttaaggggccacaagcgaaagttggccacaccacctgctgcccaggagtcatcccgccggcggtccaggaagggtcatctgccagcccccgtgcagccgtatgaacacggctgccttgaggtgcagtgttggggatccagagccatgtcggacctgctactactgggcctgattgggggcctgactctcttactgctgctgacgctgctggcctttgccgggtactcagggctactggctggggtggaagtgagtgctgggtcaccccccatccgcaacgtcactgtggcctacaagttccacatggggctctatggtgagactgggcggcttttcactgagagctgcagcatctctcccaagctccgctccatcgctgtctactatgacaacccccacatggtgccccctgataagtgccgatgtgccgtgggcagcatcctgagtgaaggtgaggaatcgccctcccctgagctcatcgacctctaccagaaatttggcttcaaggtgttctccttcccggcacccagccatgtggtgacagccaccttcccctacaccaccattctgtccatctggctggctacccgccgtgtccatcctgccttggacacctacatcaaggagcggaagctgtgtgcctatcctcggctggagatctaccaggaagaccagatccatttcatgtgcccactggcacggcagggagacttctatgtgcctgagatgaaggagacagagtggaaatggcgggggcttgtggaggccattgacacccaggtggatggcacaggagctgacacaatgagtgacacgagttctgtaagcttggaagtgagccctggcagccgggagacttcagctgccacactgtcacctggggcgagcagccgtggctgggatgacggtgacacccgcagcgagcacagctacagcgagtcaggtgccagcggctcctcttttgaggagctggacttggagggcgaggggcccttaggggagtcacggctggaccctgggactgagcccctggggactaccaagtggctctgggagcccactgcccctgagaagggcaaggagtaacccatggcctgcaccctcctgcagtgcagttgctgaggaactgagcagactctccagcagactctccagccctcttcctccttcctctgggggaggaggggttcctgagggacctgacttcccctgctccaggcctcttgctaagccttctcctcactgccctttaggctcccagggccagaggagccagggactattttctgcaccagcccccagggctgccgcccctgttgtgtctttttttcagactcacagtggagcttccaggacccagaataaagccaatgatttacttgtttcacctggaaaaaaaaaaaaaaaaaaaaaaaaaaaaaaaaaaaaaaaaaaaaaaaaaaaaaaaaaaaaaggggggggccaaaaaaaatccccggggggccccagaaaatacgacccaccccccccatatgttggttgaaacagagggggcccccctaatagggcggcgcacataactaaaaacagcaagagccacagcgcagcgaccgcgattaaacacagcacggcgaatgacggggaaaaaagcctggccactgagagaatcaattggggagaaggaaccccacccactctcgcgggcggggggacaaacataatgggccaacaccacaatccctcaaggagaattgtacacaggccacgaggggaaattaaaccaacctcggggaggcgaccgaaagggcggcctccccccccacgagcacaattaagccgcggcaggcgcaagaaaaaaacgtctgagccaacaccgagcacgaagcatcaggaacacaacatattctacgcgccagcccccgtacaaacaacaaacagagagacagacagcaaacagcacaacaacaacgcgagacgaagacacaagcagaagagccgacacggactcagcagagacaacaaaacgaaggcaggaaacgagagcagcgacgagcacgcaccataatgacaaaacaacaaacctgacagacac

SEQ ID NO: 112422 - DNA, 1092 bp, Homo sapiens
tctggaggagcagctttttaaaaggtcattgtaattttaacacattcttactaaagaaatacatactatcagtgaccgatctgaaactctgtaacaggtgaagggagacttacgatgaatatctgagcataggttcgctagcatcttcacactcatacataaacattcttaaagggaataagaatgatttcaaattcaaaacaacaacaacaacaaaaaaacaaatttggtcaaactttcttcatcataccattcattgctatcacaatcctagtttgctggtaggtttaagaaaggaatagaaagtttttgaaatccttttaatttctaccagtcttagggcctcttgagtaggccactttggaagcaaactgattaaacagcaccatcaagtccgtatctcaacaaaccattgcataatttctgtcaatgttctcaaaggttaaaacaagttgtatagaagaatatctttcctccaggtggatggcacaggagctgacacaatgagtgacacgagttctgtaagcttggaagtgagccctggcagccgggagacttcagctgccacactgtcacctggggcgagcagccgtggctgggatgacggtgacacccgcagcgagcacagctacagcgagtcaggtgccagcggctcctcttttgaggagctggacttggagggcgaggggcccttaggggagtcacggctggaccctgggactgagcccctggggactaccaagtggctctgggagcccactgcccctgagaagggcaaggagtaacccatggcctgcaccctcctgcagtgcagttgctgaggaactgagcagactctccagcagactctccagccctcttcctccttcctctgggggaggaggggttcctgagggacctgacttcccctgctccaggcctcttgctaagccttctcctcactgccctttaggctcccagggccagaggagccagggactattttctgcaccagcccccagggctgccgcccctgttgtgtctttttttcagactcacagtggagcttccaggacccagaataaagccaatgatttacttgtttcacctgga

SEQ ID NO: 112423 - DNA, 1097 bp, Homo sapiens
cgcggatcggcgtccgcagcgggcggctgctgagctgccttgaggtgcagtgttggggatccagagccatgtcggacctgctactactgggcctgattgggggcctgactctcttactgctgctgacgctgctggcctttgccgggtactcagggctactggctggggtggaagtgagtgctgggtcaccccccatccgcaacgtcactgtggcctacaagttccacatggggctctatggtgagactgggcggcttttcactgagagctgcagcatctctcccaagctccgctccatcgctgtctactatgacaacccccacatggtgagcggaagctgtgtgcctatcctcggctggagatctaccaggaagaccagatccatttcatgtgcccactggcacggcagggagacttctatgtgcctgagatgaaggagacagagtggaaatggcgggggcttgtggaggccattgacacccaggtggatggcacaggagctgacacaatgagtgacacgagttctgtaagcttggaagtgagccctggcagccgggagacttcagctgccacactgtcacctggggcgagcagccgtggctgggatgacggtgacacccgcagcgagcacagctacagcgagtcaggtgccagcggctcctcttttgaggagctggacttggagggcgaggggcccttaggggagtcacggctggaccctgggactgagcccctggggactaccaagtggctctgggagcccactgcccctgagaagggcaaggagtaacccatggcctgcaccctcctgcagtgcagttgctgaggaactgagcagactctccagcagactctccagccctcttcctccttcctctgggggaggaggggttcctgagggacctgacttcccctgctccaggcctcttgctaagccttctcctcactgccctttaggctcccagggccagaggagccagggactattttctgcaccagcccccagggctgccgcccctgttgtgtctttttttcagactcacagtggagcttccaggacccagaataaagccaatgatttacttgtttcacctgga

SEQ ID NO: 112424 - DNA, 2600 bp, Homo sapiens
  misc_feature (911)..(911): n is a, c, g, or t
aggcttaagctgtcctcccacctcggcctcctgagtagctgtgacaagaggcgtgtaccaccatgcttggctagtttttgtattttttatagagatggtgtttcgccatattgcccaggctggccttgaacttgttagctcaagtgatcctgcctcagcctcccaaagtgttgggattctagggatgagccaccatgcccagctggattcctttttttagtttgtttgtttttaaagacagttttccttttttgcccaggctggagtgaaatggcatgatcttggctcactgcaacctccacctcgtgggttcaagcgattctcctgcctcagcttcctgagtagctgggattacaggtgcctgccaccatgcccggctaatttttgtatttttagtagagatggggttttgccatgttggccaggctggtctggaactcctgacctcatgtgatccacctgcctcagcttcccaaagtgctgggattacaggcgtgagccaccgtgcctggcctccagctgaattcctttgctttaagtgtatatatgtctccaggggctgtcttcatttcagcaggctgtcctggcctgaaggaggcacccctaggctccttcctctgaacattcctagcctaggagctgggtggtaggaggtagcatgctgggaagcaggcacattcctatacctggggtcccaagagagccattgggtgggtgggcagacagaacatacagtttaatagggccagggagaaactgtctccctcctttgctcttttcaggcctgcggtccctggggcactgatcattatttaaggagcagtgagggcctggcatcctgtcccctggtcagaagaaactacccaaaacttaaagctcccccagctccctgaccacctcattcacaggcntctgtcctgggagccacacctggggcctcagcaagaggagggccctgggccagcagcctgggcttctagggctcacctcacctctgccagtagcgcccagagggcatattctgggggctgagtgggtggtgggggtagggagagaccccaaattcccccctctcctaattctcccacccccaacctaggccccatttgaggctcaaggaaagccccaggctgagtccaggcgccaagcagaccccagctgcacctggcttggctccaacaccatggagacagtggctggggaagctggctaacccctcaccttctgtgatgtttgacagctgaccctctccccatcatacaggaagggtagcagatccactttctcccagtctggattcctgcacacagcgagcctgagccatgtgttcctccttgccaccccagcctgcattcagtgcctctgatccagggagatgaacccaggggttgctcctggacagggcagatgaaggggctgcttgcttggaggatgtattgggggtggaaggagcaggttagaaggagtttgggccatcaacctggctcagcactggtttggggcaccccaaccaccagcagagtgctctcatcatccccttttgctatcttgtggctcaggaagcaccagtcattgggggtggggtgggtaagggtttctcagggtcgacccaggcatagggagagaaaacccttaacatgtttcatcccagcaccctcctccttgcagctggttgagtatttctcaggccttctccatcctcctcgtacttcagctccctcctcaactgggacttggtgtgtaccagaggcaggggcctgctgactccctggatgctgctcctgggagccctgcacgggggagggctgcagaggggcctcctgctgcattctgcagtcctcgtgccctgtgggtgatgttctgtagctggccctggacacatctccctcccttcctcccagctctttccctctgccctgtctgtgcagccccagtcagggtagagggcagagggcagctggagcaagccccctgagcccgggaggctgcattattcatgagagctgacacaatgagtgacacgagttctgtaagcttggaagtgagccctggcagccgggagacttcagctgccacactgtcacctggggcgagcagccgtggctgggatgacggtgacacccgcagcgagcacagctacagcgagtcaggtgccagcggctcctcttttgaggagctggacttggagggcgaggggcccttaggggagtcacggctggaccctgggactgagcccctggggactaccaagtggctctgggagcccactgcccctgagaagggcaaggagtaacccatggcctgcaccctcctgcagtgcagttgctgaggaactgagcagactctccagcagactctccagccctcttcctccttcctctgggggaggaggggttcctgagggacctgacttcccctgctccaggcctcttgctaagccttctcctcactgccctttaggctcccagggccagaggagccagggactattttctgcaccagcccccagggctgccgcccctgttgtgtctttttttcagactcacagtggagcttccaggacccagaataaagccaatgatttacttgtttcacctgga

SEQ ID NO: 112425 - DNA, 4462 bp, Homo sapiens
gcagctataggcgccaccaatggcaagaacctagcctccgggaccccaaaaagaagagagctcagaagccctcccacatgagaagaaacatacgaaagctactccgggaggatcaattggagcctgttaccaaagcagcacagcaagaagagttggaaagaaggaagcgcctggagcagcagaggaaagattatgcagcccctattcctactgttccgctggagttcctccctgaggaaattgctttaagggcaagtgacggtccccaactgcctcctcgggtcttggcccaggaagtcatttgtttggacagtagcagtggcagtgaggatgaaaaaagcagtcgagatgaggtgattgaactgagctctggagaggaggacactctgcacattgtggacagcagtgaatctgtcagtgaagatgatgaggaagaagagaagggtggcacccatgtcaatgatgtcttaaaccagcgtgacgcccttgggcgggtccttgtcaacctaaaccaccctccagaggaggaaaatgtcttccttgccccacagttggcacgggctgtgaaacctcatcagattggcgggatccggttcctttacgataacctagtggagtctctggagaggtttaagaccagcagtggctttggctgtattctggcccacagcatgggtctggggaaaactttgcaagtgatctctttcatcgacgtcctcttccgccacacgccagccaaaacagtccttgccattgtgccggttaatactcttcagaattggctggcagagttcaacatgtggcttccacctcctgaagccctcccggctgacaacaagcctgaagaagtccagcctcggttctttaaagttcacatcttgaatgatgagcacaagacgatggcatctcgtgctaaagtgatggctgattgggtgtcagagggtggcgtgctgctgatggggtacgagatgtacagactcctcactctgaagaaatcatttgccacaggtagaccgaagaaaaccaagaagcgttctcacccagtcatcattgatctagatgaggaagatcggcagcaggagtttcggagagagtttgagaaggctttatgccgccctggccctgatgtagtaatctgtgatgagggacaccgcatcaaaaactgccaggccagcacctcacaggctctgaagaatatccgctctcgccgccgggtggtgctgactgggtaccctctgcaaaacaacctcattgagtactggtgcatggtggactttgtgcgcccagacttccttggcacccggcaggagttcagcaacatgtttgaacgccctatcctgaatgggcaatgtattgacagcacacctcaggacgtccgcctcatgcggtaccggagccatgtcctgcacagtcttctggagggctttgtgcagaggagaggccacactgtgctgaagattcatctccctgccaaggaagaaaatgtgatccttgtgcggctctccaagatccagcgagatttgtatacacagttcatggatcgcttccgggactgtggtagcagcggttggctggggctgaacccccttaaggcattctgtgtgtgttgcaagatctggaatcaccctgatgtgctgtatgaagcccttcagaaggagagcttggccaatgagcaggacctagacgtggaagaacttggctctgcagggaccagtgcccgctgtccaccacagggaacaaaaggcaagggagaggatagcaccttggcttcctcgatgggagaggcaaccaatagcaagttcctacagggcgttggcttcaaccctttccaggagcgaggcaacaacattgtcacatatgaatgggccaaggaccttctgactaattaccagactggagtcctagaaaactctcccaagatggtactgcttttccacctgattgaggaaagtgtgaagcttggggacaagatccttgtgtttagccagagtctttccaccttggctctcatcgaggaattccttggaaaacgagaagtaccctgtccacctggtaccgaggggcaaggagcacagaagtgggttcgaaacatcagctacttccggctagatggtagcacccctgcctttgagagggagcggcttattaatcagttcaatgatcccagcaacctcaccacctggctgttccttctctctacaagggccggatgcttgggtgtgaatctgattggtgccaaccgagtggtggtgtttgatgcttcctggaacccttgccatgatgcccaggcagtatgtcgggtataccgttatggccagaaaaagccctgttacatctatcgccttgtggctgattacactctagaaaagaagatctatgaccgtcagatttccaagcagggcatgtcagatcgggtggtggatgatctaaatccaatgctgaacttcacacggaaagaggtggaaaacctactgcactttgttgagaaggagccagctccccaagtttccttgaacgtaaaggggatcaaggagtcagtcctgcaactggcctgtctgaagtaccctcacctcatcaccaaggagcctttcgagcatgagtcattgctcttgaaccgaaaggatcacaagctaaccaaggctgagaaaaaagcagcaaagaaaagctatgaggaagacaaacgcacatcagtcccctatacccgcccatcgtatgcgcagtattaccctgccagcgatcagagcctgaccagcatccccgccttcagccagagaaactggcagccaactttgaagggtgatgaaaagcctgtggccagtgttcgtcctgtgcagtccacccccatccccatgatgccccggcatgtcccattgggaggaagtgtaagctctgcctccagcacaaatccatccatgaactttcccatcaactacttgcagcgtgcaggagtccttgtgcagaaggtggtcaccacgacagatattgttattcctggactcaacagctccacagatgtacaggcaagaattaatgctggtgagagcatccacatcatccgtgggacaaaagggacgtacatccgtaccagtgatggacggatctttgctgtccgggcaactggcaaaccaaaggttcctgaagatggtcggatggctgcctcaggttcccagggaccttcttgcgagtccacaagcaacggcagacacagtgcctcatcacccaaagcccccgaccctgaggggctggccaggcccgtctctcctgacagcccagagatcatcagtgagcttcagcagtatgcagatgtggctgctgcccgggaatcccgtcagagctccccaagcaccaatgccgccctgcctggccccccggcccaacttatggacagcagtgctgttcccgggacagctctcggaactgagcctcgactagggggtcattgcctcaatagttccctcttggtgactggccagccctgtggtgacaggcacccagtgctggacttaaggggccacaagcgaaagttggccacaccacctgctgcccaggagtcatcccgccggcggtccaggaagggtcatctgccagcccccgtgcagccgtatgaacacggctgccttgaggtgcagtgttggggatccagagccatgtcggacctgctactactgggcctgattgggggcctgactctcttactgctgctgacgctgctggcctttgccgggtactcagggctactggctggggtggaagtgagtgctgggtcaccccccatccgcaacgtcactgtggcctacaagttccacatggggctctatggtgagactgggcggcttttcactgagagctgcagcatctctcccaagctccgctccatcgctgtctactatgacaacccccacatggtgccccctgataagtgccgatgtgccgtgggcagcatcctgagtgaaggtgaggaatcgccctcccctgagctcatcgacctctaccagaaatttggcttcaaggtgttctccttcccggcacccagccatgtggtgacagccaccttcccctacaccaccattctgtccatctggctggctacccgccgtgtccatcctgccttggacacctacatcaaggagcggaagctgtgtgcctatcctcggctggagatctaccaggaagaccagatccatttcatgtgcccactggcacggcagggagacttctatgtgcctgagatgaaggagacagagtggaaatggcgggggcttgtggaggccattgacacccaggtggatggcacaggagctgacacaatgagtgacacgagttctgtaagcttggaagtgagccctggcagccgggagacttcagctgccacactgtcacccctgttgtgtctttttttcagactcacagtggagcttccaggacccagaataaagccaatgatttacttgtttcacctgga

SEQ ID NO: 112426 - DNA, 687 bp, Homo sapiens
tcgcccacctccgcgccccgtccccccacccgctcgtcgttcgcgtttctctcctctcttttcctataaaacaccccactgtagtgtgagctgacacaatgagtgacacgagttctgtaagcttggaagtgagccctggcagccgggagacttcagctgccacactgtcacctggggcgagcagccgtggctgggatgacggtgacacccgcagcgagcacagctacagcgagtcaggtgccagcggctcctcttttgaggagctggacttggagggcgaggggcccttaggggagtcacggctggaccctgggactgagcccctggggactaccaagtggctctgggagcccactgcccctgagaagggcaaggagtaacccatggcctgcaccctcctgcagtgcagttgctgaggaactgagcagactctccagcagactctccagccctcttcctccttcctctgggggaggaggggttcctgagggacctgacttcccctgctccaggcctcttgctaagccttctcctcactgccctttaggctcccagggccagaggagccagggactattttctgcaccagcccccagggctgccgcccctgttgtgtctttttttcagactcacagtggagcttccaggacccagaataaagccaatgatttacttgtttcacctgga

SEQ ID NO: 112427 - DNA, 4348 bp, Homo sapiens
gcagctataggcgccaccaatggcaagaacctagcctccgggaccccaaaaagaagagagctcagaagccctcccacatgagaagaaacatacgaaagctactccgggaggatcaattggagcctgttaccaaagcagcacagcaagaagagttggaaagaaggaagcgcctggagcagcagaggaaagattatgcagcccctattcctactgttccgctggagttcctccctgaggaaattgctttaagggcaagtgacggtccccaactgcctcctcgggtcttggcccaggaagtcatttgtttggacagtagcagtggcagtgaggatgaaaaaagcagtcgagatgaggtgattgaactgagctctggagaggaggacactctgcacattgtggacagcagtgaatctgtcagtgaagatgatgaggaagaagagaagggtggcacccatgtcaatgatgtcttaaaccagcgtgacgcccttgggcgggtccttgtcaacctaaaccaccctccagaggaggaaaatgtcttccttgccccacagttggcacgggctgtgaaacctcatcagattggcgggatccggttcctttacgataacctagtggagtctctggagaggtttaagaccagcagtggctttggctgtattctggcccacagcatgggtctggggaaaactttgcaagtgatctctttcatcgacgtcctcttccgccacacgccagccaaaacagtccttgccattgtgccggttaatactcttcagaattggctggcagagttcaacatgtggcttccacctcctgaagccctcccggctgacaacaagcctgaagaagtccagcctcggttctttaaagttcacatcttgaatgatgagcacaagacgatggcatctcgtgctaaagtgatggctgattgggtgtcagagggtggcgtgctgctgatggggtacgagatgtacagactcctcactctgaagaaatcatttgccacaggtagaccgaagaaaaccaagaagcgttctcacccagtcatcattgatctagatgaggaagatcggcagcaggagtttcggagagagtttgagaaggctttatgccgccctggccctgatgtagtaatctgtgatgagggacaccgcatcaaaaactgccaggccagcacctcacaggctctgaagaatatccgctctcgccgccgggtggtgctgactgggtaccctctgcaaaacaacctcattgagtactggtgcatggtggactttgtgcgcccagacttccttggcacccggcaggagttcagcaacatgtttgaacgccctatcctgaatgggcaatgtattgacagcacacctcaggacgtccgcctcatgcggtaccggagccatgtcctgcacagtcttctggagggctttgtgcagaggagaggccacactgtgctgaagattcatctccctgccaaggaagaaaatgtgatccttgtgcggctctccaagatccagcgagatttgtatacacagttcatggatcgcttccgggactgtggtagcagcggttggctggggctgaacccccttaaggcattctgtgtgtgttgcaagatctggaatcaccctgatgtgctgtatgaagcccttcagaaggagagcttggccaatgagcaggacctagacgtggaagaacttggctctgcagggaccagtgcccgctgtccaccacagggaacaaaaggcaagggagaggatagcaccttggcttcctcgatgggagaggcaaccaatagcaagttcctacagggcgttggcttcaaccctttccaggagcgaggcaacaacattgtcacatatgaatgggccaaggaccttctgactaattaccagactggagtcctagaaaactctcccaagatggtactgcttttccacctgattgaggaaagtgtgaagcttggggacaagatccttgtgtttagccagagtctttccaccttggctctcatcgaggaattccttggaaaacgagaagtaccctgtccacctggtaccgaggggcaaggagcacagaagtgggttcgaaacatcagctacttccggctagatggtagcacccctgcctttgagagggagcggcttattaatcagttcaatgatcccagcaacctcaccacctggctgttccttctctctacaagggccggatgcttgggtgtgaatctgattggtgccaaccgagtggtggtgtttgatgcttcctggaacccttgccatgatgcccaggcagtatgtcgggtataccgttatggccagaaaaagccctgttacatctatcgccttgtggctgattacactctagaaaagaagatctatgaccgtcagatttccaagcagggcatgtcagatcgggtggtggatgatctaaatccaatgctgaacttcacacggaaagaggtggaaaacctactgcactttgttgagaaggagccagctccccaagtttccttgaacgtaaaggggatcaaggagtcagtcctgcaactggcctgtctgaagtaccctcacctcatcaccaaggagcctttcgagcatgagtcattgctcttgaaccgaaaggatcacaagctaaccaaggctgagaaaaaagcagcaaagaaaagctatgaggaagacaaacgcacatcagtcccctatacccgcccatcgtatgcgcagtattaccctgccagcgatcagagcctgaccagcatccccgccttcagccagagaaactggcagccaactttgaagggtgatgaaaagcctgtggccagtgttcgtcctgtgcagtccacccccatccccatgatgccccggcatgtcccattgggaggaagtgtaagctctgcctccagcacaaatccatccatgaactttcccatcaactacttgcagcgtgcaggagtccttgtgcagaaggtggtcaccacgacagatattgttattcctggactcaacagctccacagatgtacaggcaagaattaatgctggtgagagcatccacatcatccgtgggacaaaagggacgtacatccgtaccagtgatggacggatctttgctgtccgggcaactggcaaaccaaaggttcctgaagatggtcggatggctgcctcaggttcccagggaccttcttgcgagtccacaagcaacggcagacacagtgcctcatcacccaaagcccccgaccctgaggggctggccaggcccgtctctcctgacagcccagagatcatcagtgagcttcagcagtatgcagatgtggctgctgcccgggaatcccgtcagagctccccaagcaccaatgccgccctgcctggccccccggcccaacttatggacagcagtgctgttcccgggacagctctcggaactgagcctcgactagggggtcattgcctcaatagttccctcttggtgactggccagccctgtggtgacaggcacccagtgctggacttaaggggccacaagcgaaagttggccacaccacctgctgcccaggagtcatcccgccggcggtccaggaagggtcatctgccagcccccgtgcagccgtatgaacacgggtatccagtctctggcgggtttgccatgccacccgtctccttaaaccataacctcaccacccccttcacctcccaggctggggagaactccctgtttatgggcagtaccccctcctactaccagctgtccaatttgctggcagatgcccgcctggtgtttccagtgactactgaccctctggtgccagcaggccccgtcagttcctcttccacggctacctcagtcactgccagcaacccctccttcatgctcaacccttctgtgccagggatactacccagctattcactcccattctcacagccactcctgtccgagccgaggatgtttgcgccttttccttcccctgtcttgcccagcaacctttcgcggggcatgtctatctatccaggctacatgtccccacatgcaggctacccagctggtggcctcctacggtcccaggtgcctccatttgactctcatgaggttgccgaggttgggttcagctccaatgatgatgaggataaagacgatgatgtgatagaggtcactgggaaatagctagggagcccctccccacctcacttggggcccccagcaggttgcccaccaagctggaaggcagtgatttagaccttttgagaataggacacttggcaggagggaaaaggaagaggacaaaggagggaggagaggaagaggtgggaggagaggaagaggtgggaggagaggaagaggtgcgaggagaggaa

SEQ ID NO: 112428 - DNA, 2938 bp, Homo sapiens
  misc_feature (911)..(911): n is a, c, g, or t
  misc_feature (1968)..(1968): n is a, c, g, or t
aggcttaagctgtcctcccacctcggcctcctgagtagctgtgacaagaggcgtgtaccaccatgcttggctagtttttgtattttttatagagatggtgtttcgccatattgcccaggctggccttgaacttgttagctcaagtgatcctgcctcagcctcccaaagtgttgggattctagggatgagccaccatgcccagctggattcctttttttagtttgtttgtttttaaagacagttttccttttttgcccaggctggagtgaaatggcatgatcttggctcactgcaacctccacctcgtgggttcaagcgattctcctgcctcagcttcctgagtagctgggattacaggtgcctgccaccatgcccggctaatttttgtatttttagtagagatggggttttgccatgttggccaggctggtctggaactcctgacctcatgtgatccacctgcctcagcttcccaaagtgctgggattacaggcgtgagccaccgtgcctggcctccagctgaattcctttgctttaagtgtatatatgtctccaggggctgtcttcatttcagcaggctgtcctggcctgaaggaggcacccctaggctccttcctctgaacattcctagcctaggagctgggtggtaggaggtagcatgctgggaagcaggcacattcctatacctggggtcccaagagagccattgggtgggtgggcagacagaacatacagtttaatagggccagggagaaactgtctccctcctttgctcttttcaggcctgcggtccctggggcactgatcattatttaaggagcagtgagggcctggcatcctgtcccctggtcagaagaaactacccaaaacttaaagctcccccagctccctgaccacctcattcacaggcntctgtcctgggagccacacctggggcctcagcaagaggagggccctgggccagcagcctgggcttctagggctcacctcacctctgccagtagcgcccagagggcatattctgggggctgagtgggtggtgggggtagggagagaccccaaattcccccctctcctaattctcccacccccaacctaggccccatttgaggctcaaggaaagccccaggctgagtccaggcgccaagcagaccccagctgcacctggcttggctccaacaccatggagacagtggctggggaagctggctaacccctcaccttctgtgatgtttgacagctgaccctctccccatcatacaggaagggtagcagatccactttctcccagtctggattcctgcacacagcgagcctgagccatgtgttcctccttgccaccccagcctgcattcagtgcctctgatccagggagatgaacccaggggttgctcctggacagggcagatgaaggggctgcttgcttggaggatgtattgggggtggaaggagcaggttagaaggagtttgggccatcaacctggctcagcactggtttggggcaccccaaccaccagcagagtgctctcatcatccccttttgctatcttgtggctcaggaagcaccagtcattgggggtggggtgggtaagggtttctcagggtcgacccaggcatagggagagaaaacccttaacatgtttcatcccagcaccctcctccttgcagctggttgagtatttctcaggccttctccatcctcctcgtacttcagctccctcctcaactgggacttggtgtgtaccagaggcaggggcctgctgactccctggatgctgctcctgggagccctgcacgggggagggctgcagaggggcctcctgctgcattctgcagtcctcgtgccctgtgggtgatgttctgtagctggccctggacacatctctttccaagcttgaagtgggggtgggggaaggtggagaggacactacttgtgtctctttgttctacctcagctcctcacctcanggctgagtggcccttaataaatgtggggggagggcagcaggctttgtggaagtgcagggagctgaggctaatttagagtggggagaagagtgcacagctgcctcctcccaccctctctccctccctccctccttccctccctcccttcctcccagctctttccctctgccctgtctgtgcagccccagtcagggtagagggcagagggcagctggagcaagccccctgagcccgggaggctgcattattcatgagtgcactgcgtgctgagttgcctctccctggaggagggggtggggtggtcctagctaacctgtgctcccttttcctggtcataggaggagctgacacaatgagtgacacgagttctgtaagcttggaagtgagccctggcagccgggagacttcagctgccacactgtcacctggggcgagcagccgtggctgggatgacggtgacacccgcagcgagcacagctacagcgagtcaggtgccagcggctcctcttttgaggagctggacttggagggcgaggggcccttaggggagtcacggctggaccctgggactgagcccctggggactaccaagtggctctgggagcccactgcccctgagaagggcaaggagtaacccatggcctgcaccctcctgcagtgcagttgctgaggaactgagcagactctccagcagactctccagccctcttcctccttcctctgggggaggaggggttcctgagggacctgacttcccctgctccaggcctcttgctaagccttctcctcactgccctttaggctcccagggccagaggagccagggactattttctgcaccagcccccagggctgccgcccctgttgtgtctttttttcagactcacagtggagcttccaggacccagaataaagccaatgatttacttgtttcacctggaaaaaaaaaaaatcggcctccgtgggctca

SEQ ID NO: 112429 - DNA, 1595 bp, Homo sapiens
  misc_feature (153)..(153): n is a, c, g, or t
gtggtgaaggtactgccgctggtgttcctgtctgcagtccagctgctgggtgctagtgcactaagccctgttgccattgagacgtgggcggggcagtgcctccttccctccggtgtcccgctgctgcactgcgcccacggccacggatgtccngccgcgagagggggcggagcgagcgtgcgcggcgggcgcgcgcaggctccgtaaccgaaccctgagccgcctgcgcggatcggcgtccgcagcgggcggctgctgaggggaaattcacgttacctctccacgtgccgaccaaggctctgagacccccagctgccttgaggtgcagtgttggggatccagagccatgtcggacctgctactactgggcctgattgggggcctgactctcttactgctgctgacgctgctggcctttgccgggtactcagggctactggctggggtggaagtgagtgctgggtcaccccccatccgcaacgtcactgtggcctacaagttccacatggggctctatggtgagactgggcggcttttcactgagagctgcagcatctctcccaagctccgctccatcgctgtctactatgacaacccccacatggtgccccctgataagtgccgatgtgccgtgggcagcatcctgagtgaaggtgaggaatcgccctcccctgagctcatcgacctctaccagaaatttggcttcaaggtgttctccttcccggcacccagccatgtggtgacagccaccttcccctacaccaccattctgtccatctggctggctacccgccgtgtccatcctgccttggacacctacatcaaggagcggaagctgtgtgcctatcctcggctggagatctaccaggaagaccagatccatttcatgtgcccactggcacggcagggagacttctatgtgcctgagatgaaggagacagagtggaaatggcgggggcttgtggaggccattgacacccaggtggatggcacaggagctgacacaatgagtgacacgagttctgtaagcttggaagtgagccctggcagccgggagacttcagctgccacactgtcacctggggcgagcagccgtggctgggatgacggtgacacccgcagcgagcacagctacagcgagtcaggtgccagcggctcctcttttgaggagctggacttggagggcgaggggcccttaggggagtcacggctggaccctgggactgagcccctggggactaccaagtggctctgggagcccactgcccctgagaagggcaaggagtaacccatggcctgcaccctcctgcagtgcagttgctgaggaactgagcagactctccagcagactctccagccctcttcctccttcctctgggggaggaggggttcctgagggacctgacttcccctgctccaggcctcttgctaagccttctcctcactgccctttaggctcccagggccagaggagccagggactattttctgcaccagcccccagggctgccgcccctgttgtgtctttttttcagactcacagtggagcttccaggacccagaataaagccaatgatttacttgtttcacctgga

SEQ ID NO: 112430 - DNA, 1732 bp, Homo sapiens
cgcggatcggcgtccgcagcgggcggctgctgaggtgagggccgggccagaggagaggcatacccactggggcgtaggtctgggactccccctgtccgccctggcgcgacctcaggactctccgtgtcccctccgtgacccccgcggcccgggccgctctttgcatcttgtcttgcccacagctggcctcggccaggtccgagggcctggatgcgaccttggggcagcccctactcttccgggcagcccacttccgcggccaccggtgcagggcatgccccggggccgtggaggtgagggaaagaggcgcgagtcgcgttttaactccgcccccgtcccccaaggccgcgcctcgcagcctgggctgcaaactttagcgtcctttaagttacagacgtgcgtggggctccgtgaggaggtgggcgaagagaaaggctctgagtaaatagctgccttgaggtgcagtgttggggatccagagccatgtcggacctgctactactgggcctgattgggggcctgactctcttactgctgctgacgctgctggcctttgccgggtactcagggctactggctggggtggaagtgagtgctgggtcaccccccatccgcaacgtcactgtggcctacaagttccacatggggctctatggtgagactgggcggcttttcactgagagctgcagcatctctcccaagctccgctccatcgctgtctactatgacaacccccacatggtgccccctgataagtgccgatgtgccgtgggcagcatcctgagtgaaggtgaggaatcgccctcccctgagctcatcgacctctaccagaaatttggcttcaaggtgttctccttcccggcacccagccatgtggtgacagccaccttcccctacaccaccattctgtccatctggctggctacccgccgtgtccatcctgccttggacacctacatcaaggagcggaagctgtgtgcctatcctcggctggagatctaccaggaagaccagatccatttcatgtgcccactggcacggcagggagacttctatgtgcctgagatgaaggagacagagtggaaatggcgggggcttgtggaggccattgacacccaggtggatggcacaggagctgacacaatgagtgacacgagttctgtaagcttggaagtgagccctggcagccgggagacttcagctgccacactgtcacctggggcgagcagccgtggctgggatgacggtgacacccgcagcgagcacagctacagcgagtcaggtgccagcggctcctcttttgaggagctggacttggagggcgaggggcccttaggggagtcacggctggaccctgggactgagcccctggggactaccaagtggctctgggagcccactgcccctgagaagggcaaggagtaacccatggcctgcaccctcctgcagtgcagttgctgaggaactgagcagactctccagcagactctccagccctcttcctccttcctctgggggaggaggggttcctgagggacctgacttcccctgctccaggcctcttgctaagccttctcctcactgccctttaggctcccagggccagaggagccagggactattttctgcaccagcccccagggctgccgcccctgttgtgtctttttttcagactcacagtggagcttccaggacccagaataaagccaatgatttacttgtttcacctgga

SEQ ID NO: 112431 - DNA, 1248 bp, Homo sapiens
  misc_feature (153)..(153): n is a, c, g, or t
gtggtgaaggtactgccgctggtgttcctgtctgcagtccagctgctgggtgctagtgcactaagccctgttgccattgagacgtgggcggggcagtgcctccttccctccggtgtcccgctgctgcactgcgcccacggccacggatgtccngccgcgagagggggcggagcgagcgtgcgcggcgggcgcgcgcaggctccgtaaccgaaccctgagccgcctgcgcggatcggcgtccgcagcgggcggctgctgagccccctgataagtgccgatgtgccgtgggcagcatcctgagtgaaggtgaggaatcgccctcccctgagctcatcgacctctaccagaaatttggcttcaaggtgttctccttcccggcacccagccatgtggtgacagccaccttcccctacaccaccattctgtccatctggctggctacccgccgtgtccatcctgccttggacacctacatcaaggagcggaagctgtgtgcctatcctcggctggagatctaccaggaagaccagatccatttcatgtgcccactggcacggcagggagacttctatgtgcctgagatgaaggagacagagtggaaatggcgggggcttgtggaggccattgacacccaggtggatggcacaggagctgacacaatgagtgacacgagttctgtaagcttggaagtgagccctggcagccgggagacttcagctgccacactgtcacctggggcgagcagccgtggctgggatgacggtgacacccgcagcgagcacagctacagcgagtcaggtgccagcggctcctcttttgaggagctggacttggagggcgaggggcccttaggggagtcacggctggaccctgggactgagcccctggggactaccaagtggctctgggagcccactgcccctgagaagggcaaggagtaacccatggcctgcaccctcctgcagtgcagttgctgaggaactgagcagactctccagcagactctccagccctcttcctccttcctctgggggaggaggggttcctgagggacctgacttcccctgctccaggcctcttgctaagccttctcctcactgccctttaggctcccagggccagaggagccagggactattttctgcaccagcccccagggctgccgcccctgttgtgtctttttttcagactcacagtggagcttccaggacccagaataaagccaatgatttacttgtttcacctgga

SEQ ID NO: 112432 - DNA, 1771 bp, Homo sapiens
  misc_feature (153)..(153): n is a, c, g, or t
gtggtgaaggtactgccgctggtgttcctgtctgcagtccagctgctgggtgctagtgcactaagccctgttgccattgagacgtgggcggggcagtgcctccttccctccggtgtcccgctgctgcactgcgcccacggccacggatgtccngccgcgagagggggcggagcgagcgtgcgcggcgggcgcgcgcaggctccgtaaccgaaccctgagccgcctgcgcggatcggcgtccgcagcgggcggctgctgagctgccttgaggtgcagtgttggggatccagagccatgtcggacctgctactactgggcctgattgggggcctgactctcttactgctgctgacgctgctggcctttgccgggtactcagggctactggctggggtggaagtgagtgctgggtcaccccccatccgcaacgtcactgtggcctacaagttccacatggggctctatggtgagactgggcggcttttcactgagagctgcagcatctctcccaagctccgctccatcgctgtctactatgacaacccccacatggttctactctacatcctacagctctggagatgaagtcagacctggctctgccctcagtgaagctctgtgtggctgacatgtcagccccacataagtgattctccaacaaggacacgtgtgcttgagtgtccacatgaactttgagctgtaggttcatggtaggctgccatagagtctgctgcgggaggctcgagagaaggggtagatttcatgctggtgccttctcatgtgccccctgataagtgccgatgtgccgtgggcagcatcctgagtgaaggtgaggaatcgccctcccctgagctcatcgacctctaccagaaatttggcttcaaggtgttctccttcccggcacccagccatgtggtgacagccaccttcccctacaccaccattctgtccatctggctggctacccgccgtgtccatcctgccttggacacctacatcaaggagcggaagctgtgtgcctatcctcggctggagatctaccaggaagaccagatccatttcatgtgcccactggcacggcagggagacttctatgtgcctgagatgaaggagacagagtggaaatggcgggggcttgtggaggccattgacacccaggtggatggcacaggagctgacacaatgagtgacacgagttctgtaagcttggaagtgagccctggcagccgggagacttcagctgccacactgtcacctggggcgagcagccgtggctgggatgacggtgacacccgcagcgagcacagctacagcgagtcaggtgccagcggctcctcttttgaggagctggacttggagggcgaggggcccttaggggagtcacggctggaccctgggactgagcccctggggactaccaagtggctctgggagcccactgcccctgagaagggcaaggagtaacccatggcctgcaccctcctgcagtgcagttgctgaggaactgagcagactctccagcagactctccagccctcttcctccttcctctgggggaggaggggttcctgagggacctgacttcccctgctccaggcctcttgctaagccttctcctcactgccctttaggctcccagggccagaggagccagggactattttctgcaccagcccccagggctgccgcccctgttgtgtctttttttcagactcacagtggagcttccaggacccagaataaagccaatgatttacttgtttcacctgga

SEQ ID NO: 112433 - DNA, 4672 bp, Homo sapiens
gcagctataggcgccaccaatggcaagaacctagcctccgggaccccaaaaagaagagagctcagaagccctcccacatgagaagaaacatacgaaagctactccgggaggatcaattggagcctgttaccaaagcagcacagcaagaagagttggaaagaaggaagcgcctggagcagcagaggaaagattatgcagcccctattcctactgttccgctggagttcctccctgaggaaattgctttaagggcaagtgacggtccccaactgcctcctcgggtcttggcccaggaagtcatttgtttggacagtagcagtggcagtgaggatgaaaaaagcagtcgagatgaggtgattgaactgagctctggagaggaggacactctgcacattgtggacagcagtgaatctgtcagtgaagatgatgaggaagaagagaagggtggcacccatgtcaatgatgtcttaaaccagcgtgacgcccttgggcgggtccttgtcaacctaaaccaccctccagaggaggaaaatgtcttccttgccccacagttggcacgggctgtgaaacctcatcagattggcgggatccggttcctttacgataacctagtggagtctctggagaggtttaagaccagcagtggctttggctgtattctggcccacagcatgggtctggggaaaactttgcaagtgatctctttcatcgacgtcctcttccgccacacgccagccaaaacagtccttgccattgtgccggttaatactcttcagaattggctggcagagttcaacatgtggcttccacctcctgaagccctcccggctgacaacaagcctgaagaagtccagcctcggttctttaaagttcacatcttgaatgatgagcacaagacgatggcatctcgtgctaaagtgatggctgattgggtgtcagagggtggcgtgctgctgatggggtacgagatgtacagactcctcactctgaagaaatcatttgccacaggtagaccgaagaaaaccaagaagcgttctcacccagtcatcattgatctagatgaggaagatcggcagcaggagtttcggagagagtttgagaaggctttatgccgccctggccctgatgtagtaatctgtgatgagggacaccgcatcaaaaactgccaggccagcacctcacaggctctgaagaatatccgctctcgccgccgggtggtgctgactgggtaccctctgcaaaacaacctcattgagtactggtgcatggtggactttgtgcgcccagacttccttggcacccggcaggagttcagcaacatgtttgaacgccctatcctgaatgggcaatgtattgacagcacacctcaggacgtccgcctcatgcggtaccggagccatgtcctgcacagtcttctggagggctttgtgcagaggagaggccacactgtgctgaagattcatctccctgccaaggaagaaaatgtgatccttgtgcggctctccaagatccagcgagatttgtatacacagttcatggatcgcttccgggactgtggtagcagcggttggctggggctgaacccccttaaggcattctgtgtgtgttgcaagatctggaatcaccctgatgtgctgtatgaagcccttcagaaggagagcttggccaatgagcaggacctagacgtggaagaacttggctctgcagggaccagtgcccgctgtccaccacagggaacaaaaggcaagggagaggatagcaccttggcttcctcgatgggagaggcaaccaatagcaagttcctacagggcgttggcttcaaccctttccaggagcgaggcaacaacattgtcacatatgaatgggccaaggaccttctgactaattaccagactggagtcctagaaaactctcccaagatggtactgcttttccacctgattgaggaaagtgtgaagcttggggacaagatccttgtgtttagccagagtctttccaccttggctctcatcgaggaattccttggaaaacgagaagtaccctgtccacctggtaccgaggggcaaggagcacagaagtgggttcgaaacatcagctacttccggctagatggtagcacccctgcctttgagagggagcggcttattaatcagttcaatgatcccagcaacctcaccacctggctgttccttctctctacaagggccggatgcttgggtgtgaatctgattggtgccaaccgagtggtggtgtttgatgcttcctggaacccttgccatgatgcccaggcagtatgtcgggtataccgttatggccagaaaaagccctgttacatctatcgccttgtggctgattacactctagaaaagaagatctatgaccgtcagatttccaagcagggcatgtcagatcgggtggtggatgatctaaatccaatgctgaacttcacacggaaagaggtggaaaacctactgcactttgttgagaaggagccagctccccaagtttccttgaacgtaaaggggatcaaggagtcagtcctgcaactggcctgtctgaagtaccctcacctcatcaccaaggagcctttcgagcatgagtcattgctcttgaaccgaaaggatcacaagctaaccaaggctgagaaaaaagcagcaaagaaaagctatgaggaagacaaacgcacatcagtcccctatacccgcccatcgtatgcgcagtattaccctgccagcgatcagagcctgaccagcatccccgccttcagccagagaaactggcagccaactttgaagggtgatgaaaagcctgtggccagtgttcgtcctgtgcagtccacccccatccccatgatgccccggcatgtcccattgggaggaagtgtaagctctgcctccagcacaaatccatccatgaactttcccatcaactacttgcagcgtgcaggagtccttgtgcagaaggtggtcaccacgacagatattgttattcctggactcaacagctccacagatgtacaggcaagaattaatgctggtgagagcatccacatcatccgtgggacaaaagggacgtacatccgtaccagtgatggacggatctttgctgtccgggcaactggcaaaccaaaggttcctgaagatggtcggatggctgcctcaggttcccagggaccttcttgcgagtccacaagcaacggcagacacagtgcctcatcacccaaagcccccgaccctgaggggctggccaggcccgtctctcctgacagcccagagatcatcagtgagcttcagcagtatgcagatgtggctgctgcccgggaatcccgtcagagctccccaagcaccaatgccgccctgcctggccccccggcccaacttatggacagcagtgctgttcccgggacagctctcggaactgagcctcgactagggggtcattgcctcaatagttccctcttggtgactggccagccctgtggtgacaggcacccagtgctggacttaaggggccacaagcgaaagttggccacaccacctgctgcccaggagtcatcccgccggcggtccaggaagggtcatctgccagcccccgtgcagccgtatgaacacggctgccttgaggtgcagtgttggggatccagagccatgtcggacctgctactactgggcctgattgggggcctgactctcttactgctgctgacgctgctggcctttgccgggtactcagggctactggctggggtggaagtgagtgctgggtcaccccccatccgcaacgtcactgtggcctacaagttccacatggggctctatggtgagactgggcggcttttcactgagagctgcagcatctctcccaagctccgctccatcgctgtctactatgacaacccccacatggtgccccctgataagtgccgatgtgccgtgggcagcatcctgagtgaaggtgaggaatcgccctcccctgagctcatcgacctctaccagaaatttggcttcaaggtgttctccttcccggcacccagccatgtggtgacagccaccttcccctacaccaccattctgtccatctggctggctacccgccgtgtccatcctgccttggacacctacatcaaggagcggaagctgtgtgcctatcctcggctggagatctaccaggaagaccagatccatttcatgtgcccactggcacggcagggagacttctatgtgcctgagatgaaggagacagagtggaaatggcgggggcttgtggaggccattgacacccaggtggatggcacaggagctgacacaatgagtgacacgagttctgtaagcttggaagtgagccctggcagccgggagacttcagctgccacactgtcacctggggcgagcagccgtggctgggatgacggtgacacccgcagcgagcacagctacagcgagtcaggtgccagcggctcctcttttgaggagctggacttggagggcgaggggcccttaggggagtcacggctggaccctgggactgagcccctggggactaccaaaggagccagggactattttctgcaccagcccccagggctgccgcccctgttgtgtctttttttcagactcacagtggagcttccaggacccagaataaagccaatgatttacttgtttcacctgga

SEQ ID NO: 112434 - DNA, 3329 bp, Homo sapiens
gcagctataggcgccaccaatggcaagaacctagcctccgggaccccaaaaagaagagagctcagaagccctcccacatgagaagaaacatacgaaagctactccgggaggatcaattggagcctgttaccaaagcagcacagcaagaagagttggaaagaaggaagcgcctggagcagcagaggaaagattatgcagcccctattcctactgttccgctggagttcctccctgaggaaattgctttaagggcaagtgacggtccccaactgcctcctcgggtcttggcccaggaagtcatttgtttggacagtagcagtggcagtgaggatgaaaaaagcagtcgagatgaggtgattgaactgagctctggagaggaggacactctgcacattgtggacagcagtgaatctgtcagtgaagatgatgaggaagaagagaagggtggcacccatgtcaatgatgtcttaaaccagcgtgacgcccttgggcgggtccttgtcaacctaaaccaccctccagaggaggaaaatgtcttccttgccccacagttggcacgggctgtgaaacctcatcagattggcgggatccggttcctttacgataacctagtggagtctctggagaggtttaagaccagcagtggctttggctgtattctggcccacagcatgggtctggggaaaactttgcaagtgatctctttcatcgacgtcctcttccgccacacgccagccaaaacagtccttgccattgtgccggttaatactcttcagaattggctggcagagttcaacatgtggcttccacctcctgaagccctcccggctgacaacaagcctgaagaagtccagcctcggttctttaaagttcacatcttgaatgatgagcacaagacgatggcatctcgtgctaaagtgatggctgattgggtgtcagagggtggcgtgctgctgatggggtacgagatgtacagactcctcactctgaagaaatcatttgccacaggtagaccgaagaaaaccaagaagcgttctcacccagtcatcattgatctagatgaggaagatcggcagcaggagtttcggagagagtttgagaaggctttatgccgccctggccctgatgtagtaatctgtgatgagggacaccgcatcaaaaactgccaggccagcacctcacaggctctgaagaatatccgctctcgccgccgggtggtgctgactgggtaccctctgcaaaacaacctcattgagtactggtgcatggtggactttgtgcgcccagacttccttggcacccggcaggagttcagcaacatgtttgaacgccctatcctgaatgggcaatgtattgacagcacacctcaggacgtccgcctcatgcggtaccggagccatgtcctgcacagtcttctggagggctttgtgcagaggagaggccacactgtgctgaagattcatctccctgccaaggaagaaaatgtgatccttgtgcggctctccaagatccagcgagatttgtatacacagttcatggatcgcttccgggactgtggtagcagcggttggctggggctgaacccccttaaggcattctgtgtgtgttgcaagatctggaatcaccctgatgtgctgtatgaagcccttcagaaggagagcttggccaatgagcaggacctagacgtggaagaacttggctctgcagggaccagtgcccgctgtccaccacagggaacaaaaggcaagggagaggatagcaccttggcttcctcgatgggagaggcaaccaatagcaagttcctacagggcgttggcttcaaccctttccaggagcgaggcaacaacattgtcacatatgaatgggccaaggaccttctgactaattaccagactggagtcctagaaaactctcccaagatggtactgcttttccacctgattgaggaaagtgtgaagcttggggacaagatccttgtgtttagccagagtctttccaccttggctctcatcgaggaattccttggaaaacgagaagtaccctgtccacctggtaccgaggggcaaggagcacagaagtgggttcgaaacatcagctacttccggctagatggtagcacccctgcctttgagagggagcggcttattaatcagttcaatgatcccagcaacctcaccacctggctgttccttctctctacaagggccggatgcttgggtgtgaatctgattggtgccaaccgagtggtggtgtttgatgcttcctggaacccttgccatgatgcccaggcagtatgtcgggtataccgttatggccagaaaaagccctgttacatctatcgccttgtggctgattacactctagaaaagaagatctatgaccgtcagatttccaagcagggcatgtcagatcgggtggtggatgatctaaatccaatgctgaacttcacacggaaagaggtggaaaacctactgcactttgttgagaaggagccagctccccaagtttccttgaacgtaaaggggatcaaggagtcagtcctgcaactggcctgtctgaagtaccctcacctcatcaccaaggagcctttcgagcatgagtcattgctcttgaaccgaaaggatcacaagctaaccaaggctgagaaaaaagcagcaaagaaaagctatgaggaagacaaacgcacatcagtcccctatacccgcccatcgtatgcgcagtattaccctgccagcgatcagagcctgaccagcatccccgccttcagccagagaaactggcagccaactttgaagggtgatgaaaagcctgtggccagtgttcgtcctgtgcagtccacccccatccccatgatgccccggcatgtcccattgggaggaagtgtaagctctgcctccagcacaaatccatccatgaactttcccatcaactacttgcagcgtgcaggagtccttgtgcagaaggtggtcaccacgacagatattgttattcctggactcaacagctccacagatgtacaggcaagaattaatgctggtgagagcatccacatcatccgtgggacaaaagggacgtacatccgtaccagtgatggacggatctttgctgtccgggcaactggcaaaccaaaggttcctgaagatggtcggatggctgcctcaggttcccagggaccttcttgcgagtccacaagcaacggcagacacagtgcctcatcacccaaagcccccgaccctgaggggctggccaggcccgtctctcctgacagcccagagatcatcagtgagcttcagcagtatgcagaaacatggcaaaaccctatttctact

SEQ ID NO: 112435 - DNA, 3033 bp, Homo sapiens
gcagctataggcgccaccaatggcaagaacctagcctccgggaccccaaaaagaagagagctcagaagccctcccacatgagaagaaacatacgaaagctactccgggaggatcaattggagcctgttaccaaagcagcacagcaagaagagttggaaagaaggaagcgcctggagcagcagaggaaagattatgcagcccctattcctactgttccgctggagttcctccctgaggaaattgctttaagggcaagtgacggtccccaactgcctcctcgggtcttggcccaggaagtcatttgtttggacagtagcagtggcagtgaggatgaaaaaagcagtcgagatgaggtgattgaactgagctctggagaggaggacactctgcacattgtggacagcagtgaatctgtcagtgaagatgatgaggaagaagagaagggtggcacccatgtcaatgatgtcttaaaccagcgtgacgcccttgggcgggtccttgtcaacctaaaccaccctccagaggaggaaaatgtcttccttgccccacagttggcacgggctgtgaaacctcatcagattggcgggatccggttcctttacgataacctagtggagtctctggagaggtttaagaccagcagtggctttggctgtattctggcccacagcatgggtctggggaaaactttgcaagtgatctctttcatcgacgtcctcttccgccacacgccagccaaaacagtccttgccattgtgccggttaatactcttcagaattggctggcagagttcaacatgtggcttccacctcctgaagccctcccggctgacaacaagcctgaagaagtccagcctcggttctttaaagttcacatcttgaatgatgagcacaagacgatggcatctcgtgctaaagtgatggctgattgggtgtcagagggtggcgtgctgctgatggggtacgagatgtacagactcctcactctgaagaaatcatttgccacaggtagaccgaagaaaaccaagaagcgttctcacccagtcatcattgatctagatgaggaagatcggcagcaggagtttcggagagagtttgagaaggctttatgccgccctggccctgatgtagtaatctgtgatgagggacaccgcatcaaaaactgccaggccagcacctcacaggctctgaagaatatccgctctcgccgccgggtggtgctgactgggtaccctctgcaaaacaacctcattgagtactggtgcatggtggactttgtgcgcccagacttccttggcacccggcaggagttcagcaacatgtttgaacgccctatcctgaatgggcaatgtattgacagcacacctcaggacgtccgcctcatgcggtaccggagccatgtcctgcacagtcttctggagggctttgtgcagaggagaggccacactgtgctgaagattcatctccctgccaaggaagaaaatgtgatccttgtgcggctctccaagatccagcgagatttgtatacacagttcatggatcgcttccgggactgtggtagcagcggttggctggggctgaacccccttaaggcattctgtgtgtgttgcaagatctggaatcaccctgatgtgctgtatgaagcccttcagaaggagagcttggccaatgagcaggacctagacgtggaagaacttggctctgcagggaccagtgcccgctgtccaccacagggaacaaaaggcaagggagaggatagcaccttggcttcctcgatgggagaggcaaccaatagcaagttcctacagggcgttggcttcaaccctttccaggagcgaggcaacaacattgtcacatatgaatgggccaaggaccttctgactaattaccagactggagtcctagaaaactctcccaagatggtactgcttttccacctgattgaggaaagtgtgaagcttggggacaagatccttgtgtttagccagagtctttccaccttggctctcatcgaggaattccttggaaaacgagaagtaccctgtccacctggtaccgaggggcaaggagcacagaagtgggttcgaaacatcagctacttccggctagatggtagcacccctgcctttgagagggagcggcttattaatcagttcaatgatcccagcaacctcaccacctggctgttccttctctctacaagggccggatgcttgggtgtgaatctgattggtgccaaccgagtggtggtgtttgatgcttcctggaacccttgccatgatgcccaggcagtatgtcgggtataccgttatggccagaaaaagccctgttacatctatcgccttgtggctgattacactctagaaaagaagatctatgaccgtcagatttccaagcagggcatgtcagatcgggtggtggatgatctaaatccaatgctgaacttcacacggaaagaggtggaaaacctactgcactttgttgagaaggagccagctccccaagtttccttgaacgtaaaggggatcaaggagtcagtcctgcaactggcctgtctgaagtaccctcacctcatcaccaaggagcctttcgagcatgagtcattgctcttgaaccgaaaggatcacaagctaaccaaggctgagaaaaaagcagcaaagaaaagctatgaggaagacaaacgcacatcagtcccctatacccgcccatcgtatgcgcagtattaccctgccagcgatcagagcctgaccagcatccccgccttcagccagagaaactggcagccaactttgaagggtgatgaaaagcctgtggccagtgttcgtcctgtgcagtccacccccatccccatgatgccccggcatgtcccattgggaggaagtgtaagctctgcctccagcacaaatccatccatgaactttcccatcaactacttgcagcgtgcaggagtccttgtgcagaaggtggtcaccacgacagatattgttattcctggactcaacagctccttgtcgtggcgattgaatcctctag

SEQ ID NO: 112436 - DNA, 4207 bp, Homo sapiens
cggaagagaaagctggaacccggccggagtagctctgagcgccggctgtgaggaaggaggttctgggcaagctatagccatggctgtggctgtagccatggcgggagccttaatcgggtcggagccaggccccgcggaagaacttgccaaactcgagtacctgtctttggtgtcaaaggtttgcactgagctggacaatcacttggggatcaacgacaaggaccttgctgaatttgtgatcagtcttgctgagaaaaataccacctttgatacttttaaggcttctctcgtcaaaaatggtgcagaatttacggattctcttattagtaacttgctgcgtctcatacaaaccatgcggcctccagcgaagccttccactagcaaagatccagttgttaaacctaaaacagaaaaagaaaagctgaaggaactcttcccagtcctttgccaaccggacaacccttctgttcggaccatgttggatgaagatgatgtgaaagttgctgtggatgtcctgaaagaactggaagctttaatgcccagcgcagcaggccaggagaagcaaagagatgctgaacaccgggacaggacaaagaagaagaagcggagtcgaagccgagatcgaaaccgagatcgagacagagatagggaacgaaaccgagatagagaccacaagcggagacaccgatcccgctctcgatcacgttccaggacccgggagaggaataaagtgaagtctagatatcggtccaggagcaggagtcagagtccccccaaagaccggaaggaccgggacaaatatggagagcggaatctggatagatggcgggataagcatgtggaccgccctcctccagaagagcccaccattggtgacatttataatggcaaagttaccagcatcatgcagtttggttgctttgtgcagctggaaggactaaggaagcggtgggaaggcctggtgcacatctctgagctccggcgggagggtcgtgtggccaatgtagctgatgtcgtgagcaaaggccagagggtcaaagtcaaagtgctgtccttcactgggaccaagaccagcctgagcatgaaggatgtggatcaagagactggagaagatctaaacccaaatagacggcgaaatcttgtcggggagaccaatgaggagacctcaatgcggaatcctgatagacccactcacttgtcccttgtcagtgctcctgaagtagaggacgactcactggaacgcaagcgcctcacccgaatctctgacccagagaagtgggagatcaaacagatgattgctgccaatgtcctttccaaagaagaatttccagactttgatgaagagactggcattctccctaaggtggatgatgaagaagatgaggaccttgagattgaattggttgaggaagagcctccattcctgagagggcacactaagcaaagcatggacatgagccccattaaaattgtcaagaacccagacggctccctctcccaagcagcaatgatgcagagtgccttggccaaagaaaggcgggaactcaaacaggcccagcgggaagctgagatggattctattcccatgggactcaacaaacactgggttgaccctctgcctgatgcggaaggcagacagattgctgccaacatgaggggtattgggatgatgcccaatgatattcctgagtggaagaagcatgcctttgggggcaacaaagcctcttacggaaaaaagacccagatgtcaatccttgagcagagggagagcctgcccatctacaaactgaaggagcaattggtccaggccgtccatgacaatcagatcctgattgtcattggtgagacaggatctggaaagacaacacagatcacccagtacctggcggaggcaggctacacttccaggggcaagattgggtgtacccagcccagaagagtggcagctatgtcggtggccaaaagagtgtcagaggagtttggttgttgcttaggccaagaggtgggctacaccattcgatttgaggactgcactagccctgaaacagtcatcaagtacatgacagatgggatgttgcttagagagtgcttgattgaccctgacctcactcagtacgcgatcatcatgttggacgaggcacatgagaggacaattcacactgatgtgctctttggattgttgaaaaagacagttcagaaacggcaggacatgaagctgattgtcacctcagccaccttggatgcagtgaagttttctcaatacttctatgaagctcccattttcaccatcccaggtcgaacatatccagtggaaatactgtacacaaaggaacctgagacagattatctggatgccagcctgattactgttatgcagattcatttaacagaaccaccaggtgatatcctggtcttcctgactggtcaggaagaaattgatactgcttgtgagatcctgtatgaaagaatgaaatccctgggacctgatgttccagagttaattatcctcccagtgtactctgctcttcccagtgagatgcagacccgaatctttgacccagctccaccaggcagcagaaaggttgtgattgccaccaatatcgcagagacatcgctgactattgatggtatctactatgtggtggacccaggattcgtgaaacagaaagtttacaattccaagacagggattgaccagctcgtggtgacgcctatttctcaggctcaggcaaagcaacgagctggcagagctgggagaacaggcccagggaagtgttacaggttgtacacagaacgtgcctaccgagatgaaatgctgaccaccaacgtgccggaaatccagagaaccaacttagcaagcacagtgctgtcactcaaggccatgggtatcaatgatctgctgtcctttgatttcatggatgccccacctatggaaactttgatcacagccatggagcagctgtacacactgggggccctggatgacgagggcctgctcactcgcttgggccgccggatggcagagttccctctggagccaatgctatgcaaaatgctcatcatgtctgtgcatctgggctgcagtgaggaaatgctgaccattgtatccatgctgtctgtgcagaacgtcttctataggcccaaggataaacaagcccttgcagatcagaagaaggccaaattccaccagactgaaggggaccacctcaccctgctagctgtgtacaactcctggaagaacaacaagttctccaacccatggtgctatgagaactttatccaggctcgttccctgcgccgggcccaggacattcgcaagcagatgttaggcataatggacagacacaagctggatgttgtttcctgtggcaagtccacagtccgagtgcagaaggccatctgcagtgggttcttccgtaatgctgccaagaaagacccgcaggagggttaccggacactgatcgaccagcaggtggtctatatccatccttccagtgccctcttcaacagacagccagaatgggtggtgtaccatgagctggtgctcaccaccaaggaatacatgcgtgaagttaccaccatcgaccctcggtggcttgtggagtttgccccagccttcttcaaggtctcagacccaactaagctaagcaaacagaagaagcaacagcgtcttgaacccttgtacaaccgctatgaggaacccaatgcctggagaatatctcgagctttccgacggcgctgaaaggcaagattgttcctttgcctctccagcagcagtagccagggcttggacttatcgatgacaggctggtcctgaggatacagctgtcccgtgactgactgtcttaactgagcattttctcaactcgactctcatttcttccctgctggtaaaatagaaacagggatttaaacctggctttggcaagagcctgcagcctccatcaccccaagtccttgggcccagttgggagctcatatctaacacagagacacattgcatcaacttcaagaaagggacaatttgtgcagctccaggatgggaaggtggagtgggtgagcatcttgtgcagggacatggtgagtgccctgatgccccagctagcaggagctactgtgctcatctaaagtgtttgccccacttcccaccccgtctccagcccctgtactttggcttgacctcgtggaaatatttattttcttaagg

SEQ ID NO: 112437 - DNA, 4226 bp, Homo sapiens
cggaagagaaagctggaacccggccggagtagctctgagcgccggctgtgaggaaggaggttctgggcaagctatagccatggctgtggctgtagccatggcgggagccttaatcgggtcggagccaggccccgcggaagaacttgccaaactcgagtacctgtctttggtgtcaaaggtttgcactgagctggacaatcacttggggatcaacgacaaggaccttgctgaatttgtgatcagtcttgctgagaaaaataccacctttgatacttttaaggcttctctcgtcaaaaatggtgcagaatttacggattctcttattagtaacttgctgcgtctcatacaaaccatgcggcctccagcgaagccttccactagcaaagatccagttgttaaacctaaaacagaaaaagaaaagctgaaggaactcttcccagtcctttgccaaccggacaacccttctgttcggaccatgttggatgaagatgatgtgaaagttgctgtggatgtcctgaaagaactggaagctttaatgcccagcgcagcaggccaggagaagcaaagagatgctgaacaccggtgcttattgatttgttagggacaggacaaagaagaagaagcggagtcgaagccgagatcgaaaccgagatcgagacagagatagggaacgaaaccgagatagagaccacaagcggagacaccgatcccgctctcgatcacgttccaggacccgggagaggaataaagtgaagtctagatatcggtccaggagcaggagtcagagtccccccaaagaccggaaggaccgggacaaatatggagagcggaatctggatagatggcgggataagcatgtggaccgccctcctccagaagagcccaccattggtgacatttataatggcaaagttaccagcatcatgcagtttggttgctttgtgcagctggaaggactaaggaagcggtgggaaggcctggtgcacatctctgagctccggcgggagggtcgtgtggccaatgtagctgatgtcgtgagcaaaggccagagggtcaaagtcaaagtgctgtccttcactgggaccaagaccagcctgagcatgaaggatgtggatcaagagactggagaagatctaaacccaaatagacggcgaaatcttgtcggggagaccaatgaggagacctcaatgcggaatcctgatagacccactcacttgtcccttgtcagtgctcctgaagtagaggacgactcactggaacgcaagcgcctcacccgaatctctgacccagagaagtgggagatcaaacagatgattgctgccaatgtcctttccaaagaagaatttccagactttgatgaagagactggcattctccctaaggtggatgatgaagaagatgaggaccttgagattgaattggttgaggaagagcctccattcctgagagggcacactaagcaaagcatggacatgagccccattaaaattgtcaagaacccagacggctccctctcccaagcagcaatgatgcagagtgccttggccaaagaaaggcgggaactcaaacaggcccagcgggaagctgagatggattctattcccatgggactcaacaaacactgggttgaccctctgcctgatgcggaaggcagacagattgctgccaacatgaggggtattgggatgatgcccaatgatattcctgagtggaagaagcatgcctttgggggcaacaaagcctcttacggaaaaaagacccagatgtcaatccttgagcagagggagagcctgcccatctacaaactgaaggagcaattggtccaggccgtccatgacaatcagatcctgattgtcattggtgagacaggatctggaaagacaacacagatcacccagtacctggcggaggcaggctacacttccaggggcaagattgggtgtacccagcccagaagagtggcagctatgtcggtggccaaaagagtgtcagaggagtttggttgttgcttaggccaagaggtgggctacaccattcgatttgaggactgcactagccctgaaacagtcatcaagtacatgacagatgggatgttgcttagagagtgcttgattgaccctgacctcactcagtacgcgatcatcatgttggacgaggcacatgagaggacaattcacactgatgtgctctttggattgttgaaaaagacagttcagaaacggcaggacatgaagctgattgtcacctcagccaccttggatgcagtgaagttttctcaatacttctatgaagctcccattttcaccatcccaggtcgaacatatccagtggaaatactgtacacaaaggaacctgagacagattatctggatgccagcctgattactgttatgcagattcatttaacagaaccaccaggtgatatcctggtcttcctgactggtcaggaagaaattgatactgcttgtgagatcctgtatgaaagaatgaaatccctgggacctgatgttccagagttaattatcctcccagtgtactctgctcttcccagtgagatgcagacccgaatctttgacccagctccaccaggcagcagaaaggttgtgattgccaccaatatcgcagagacatcgctgactattgatggtatctactatgtggtggacccaggattcgtgaaacagaaagtttacaattccaagacagggattgaccagctcgtggtgacgcctatttctcaggctcaggcaaagcaacgagctggcagagctgggagaacaggcccagggaagtgttacaggttgtacacagaacgtgcctaccgagatgaaatgctgaccaccaacgtgccggaaatccagagaaccaacttagcaagcacagtgctgtcactcaaggccatgggtatcaatgatctgctgtcctttgatttcatggatgccccacctatggaaactttgatcacagccatggagcagctgtacacactgggggccctggatgacgagggcctgctcactcgcttgggccgccggatggcagagttccctctggagccaatgctatgcaaaatgctcatcatgtctgtgcatctgggctgcagtgaggaaatgctgaccattgtatccatgctgtctgtgcagaacgtcttctataggcccaaggataaacaagcccttgcagatcagaagaaggccaaattccaccagactgaaggggaccacctcaccctgctagctgtgtacaactcctggaagaacaacaagttctccaacccatggtgctatgagaactttatccaggctcgttccctgcgccgggcccaggacattcgcaagcagatgttaggcataatggacagacacaagctggatgttgtttcctgtggcaagtccacagtccgagtgcagaaggccatctgcagtgggttcttccgtaatgctgccaagaaagacccgcaggagggttaccggacactgatcgaccagcaggtggtctatatccatccttccagtgccctcttcaacagacagccagaatgggtggtgtaccatgagctggtgctcaccaccaaggaatacatgcgtgaagttaccaccatcgaccctcggtggcttgtggagtttgccccagccttcttcaaggtctcagacccaactaagctaagcaaacagaagaagcaacagcgtcttgaacccttgtacaaccgctatgaggaacccaatgcctggagaatatctcgagctttccgacggcgctgaaaggcaagattgttcctttgcctctccagcagcagtagccagggcttggacttatcgatgacaggctggtcctgaggatacagctgtcccgtgactgactgtcttaactgagcattttctcaactcgactctcatttcttccctgctggtaaaatagaaacagggatttaaacctggctttggcaagagcctgcagcctccatcaccccaagtccttgggcccagttgggagctcatatctaacacagagacacattgcatcaacttcaagaaagggacaatttgtgcagctccaggatgggaaggtggagtgggtgagcatcttgtgcagggacatggtgagtgccctgatgccccagctagcaggagctactgtgctcatctaaagtgtttgccccacttcccaccccgtctccagcccctgtactttggcttgacctcgtggaaatatttattttcttaagg

SEQ ID NO: 112438 - DNA, 2335 bp, Homo sapiens
tgctaggtagaggcgggtgttgaatcggccgaggcagggcaagattgggtgtacccagcccagaagagtggcagctatgtcggtggccaaaagagtgtcagaggagtttggttgttgcttaggccaagaggtgggctacaccattcgatttgaggactgcactagccctgaaacagtcatcaagtacatgacagatgggatgttgcttagagagtgcttgattgaccctgacctcactcagtacgcgatcatcatgttggacgaggcacatgagaggacaattcacactgatgtgctctttggattgttgaaaaagacagttcagaaacggcaggacatgaagctgattgtcacctcagccaccttggatgcagtgaagttttctcaatacttctatgaagctcccattttcaccatcccaggtcgaacatatccagtggaaatactgtacacaaaggaacctgagacagattatctggatgccagcctgattactgttatgcagattcatttaacagaaccaccaggtgatatcctggtcttcctgactggtcaggaagaaattgatactgcttgtgagatcctgtatgaaagaatgaaatccctgggacctgatgttccagagttaattatcctcccagtgtactctgctcttcccagtgagatgcagacccgaatctttgacccagctccaccaggcagcagaaaggttgtgattgccaccaatatcgcagagacatcgctgactattgatggtatctactatgtggtggacccaggattcgtgaaacagaaagtttacaattccaagacagggattgaccagctcgtggtgacgcctatttctcaggctcaggcaaagcaacgagctggcagagctgggagaacaggcccagggaagtgttacaggttgtacacagaacgtgcctaccgagatgaaatgctgaccaccaacgtgccggaaatccagagaaccaacttagcaagcacagtgctgtcactcaaggccatgggtatcaatgatctgctgtcctttgatttcatggatgccccacctatggaaactttgatcacagccatggagcagctgtacacactgggggccctggatgacgagggcctgctcactcgcttgggccgccggatggcagagttccctctggagccaatgctatgcaaaatgctcatcatgtctgtgcatctgggctgcagtgaggaaatgctgaccattgtatccatgctgtctgtgcagaacgtcttctataggcccaaggataaacaagcccttgcagatcagaagaaggccaaattccaccagactgaaggggaccacctcaccctgctagctgtgtacaactcctggaagaacaacaagttctccaacccatggtgctatgagaactttatccaggctcgttccctgcgccgggcccaggacattcgcaagcagatgttaggcataatggacagacacaagctggatgttgtttcctgtggcaagtccacagtccgagtgcagaaggccatctgcagtgggttcttccgtaatgctgccaagaaagacccgcaggagggttaccggacactgatcgaccagcaggtggtctatatccatccttccagtgccctcttcaacagacagccagaatgggtggtgtaccatgagctggtgctcaccaccaaggaatacatgcgtgaagttaccaccatcgaccctcggtggcttgtggagtttgccccagccttcttcaaggtctcagacccaactaagctaagcaaacagaagaagcaacagcgtcttgaacccttgtacaaccgctatgaggaacccaatgcctggagaatatctcgagctttccgacggcgctgaaaggcaagattgttcctttgcctctccagcagcagtagccagggcttggacttatcgatgacaggctggtcctgaggatacagctgtcccgtgactgactgtcttaactgagcattttctcaactcgactctcatttcttccctgctggtaaaatagaaacagggatttaaacctggctttggcaagagcctgcagcctccatcaccccaagtccttgggcccagttgggagctcatatctaacacagagacacattgcatcaacttcaagaaagggacaatttgtgcagctccaggatgggaaggtggagtgggtgagcatcttgtgcagggacatggtgagtgccctgatgccccagctagcaggagctactgtgctcatctaaagtgtttgccccacttcccaccccgtctccagcccctgtactttggcttgacctcgtggaaatatttattttcttaagg

SEQ ID NO: 112439 - DNA, 321 bp, Homo sapiens
gttcttggcaggaaatggatgactcatcctgaacatgtgctttcgttgctgggacaatggggcgcaatgaaaatgttcaacttactgaatagtgtggacatttttgtcatctgtttgtaggagactgatgaaatacaactacagattaataagaaccccgaagtaacctatgcttttgtgtgagaaaactaatgataaatattaagaaaaagacatggactgtttcaaaataatcagtaggttttctatgcactaaaagagactgtgtacggcagatcccaggaaagtagaggtggagaaattccagaatttaggaaggaa

SEQ ID NO: 112440 - DNA, 798 bp, Homo sapiens
gcaaaagaacaacttatttataaaaaaatgaaaaagcacaaataaagtttgtctctaagaagaaactgcttggagcttgcattagtttgctcaggctgccgtaacaaaatgccatagactgagtggcttaaacaacagaaatttgttttctcacagttctggaggatggaagtctgatatcagcatgccagcatggttgggttctggtgagggctctatgcctggcttgcagatggccgccttcttgctgtgccctcacatggtggagggagggcaagctctctgatgtctcttcttataaggacttaactaaccccatcatgagggccctacctcatctaaccctaattacctccaaaagatcccatctttaaggatgcagtcacactggggattaaggctttaacatatgaatttgaggaggagacacacttcagtccatatcagagcttaatccatttggtgcaagtgttacttcagttatgtagttttctaaatttgtaattaaatgttactattagaaggaaatcacatattaatacgaagagttgttttttttttaattaaggaaaagatttaaagagcacaaagcagtattttatgaaacataaaaaatatatcaaagatcattgtgccaaggaaatgagaaagctaggtgtttaatacctctacgtttatgatacagtgatacttcgcttatccaaaattctgctctgtggtagcatgagctatacagaaaagacctaaaaacaagcagcataaatattatgtaccaaagctcttctgttttattcatag

SEQ ID NO: 112441 - DNA, 516 bp, Homo sapiens
tttttagaaaaagatatttacccagatatgtggatttaactttattatattaggtcaatgaaaccagaatttatgtattagtggaagctgaacttccagtatcgcctagactgaaggtccccctccatatgggaagctgccctcttcaccaaatacacaatgagtaaaggagaaaccacaagcagaaatggaagaagcagatactcactagccaggctggtcaacctaattaaccctagtaggcagtgggacagcagttgtgttaaccagacaaagaactcttctggaagactggaatagaccctagataaacactaacttttttctagattaacttcgaataaattttatttgcattagtaaaattatcccaccatcatagttattttattcaactatattttccacattctttaatctttcaaagtgtatataaagatgtcttaggagatataaaggccacaaagttaagatgaaattcagataaaatttagtaacctagtcaataaaagtcag

SEQ ID NO: 112442 - DNA, 237 bp, Homo sapiens
cactagcagaagctccttcttggtttcagtattaaaacttggagtcttccagaaactttgccactatattgaagtactttagttgtaattacctttctataagttgaattccaattattgtttttttttaactctttagaatacaaaactcacaatatgttttaattttaatgcattctctaatgttattccattactgcaggccattttggtctgcatatttcaatattttgttcc

SEQ ID NO: 112443 - DNA, 2774 bp, Homo sapiens
tttgtttctggcgaccgtccccacccgggctcgcgtctccgtttctccgagaggcccaaggtgtcttcgccgcagcctctgtcgcgccgtgacctgtacaggtcgcgggagtcgtagggaggacgccgggacacctggaagccgagaaatggattcagtggcctttgaggatgtggctgtgaacttcaccctggaggagtgggctttgctggatccttcccagaagaatctctacagggatgtgatgcgggaaaccttcaggaacctggcttctgtaggaaaacaatgggaagaccagaacattgaagacccattcaaaattcccaggagaaatataagtcatattccagagagactctgtgaaagtaaagaaggtggtcaaggtgaagaaaccttcagccagattccagatggtattctgaacaagaaaactcctggagtaaaaccgtgtgaaagcagtgtgtgtggagaagttggcatgggtccttcatcacttaataggcacatcagagatcacactggacgtgaaccaaatgaatatcaggaatatggaacgaagtcatatacacgtaaccagtgtggacgagccttgagttatcatcgctcttttccagtacgtgaaaggactcatcctggaggaaagccctatgattgtaaggaatgtggagaaacctttatttctcttgtaagcattcgaagacacatgttaacgcataggggaggtgtaccttacaaatgtaaggtgtgtgggaaagcctttgattatcccagtttatttcgtatacatgaaagaagtcacactggagagaaaccttatgaatgcaagcaatgtgggaaagccttcagttgttccagttacattagaatacatgaaaggactcacactggagataaaccctatgaatgcaagcagtgtgggaaagctttcagttgttccaagtacattcgaatccatgaacgaactcacacaggagagaaaccctacgaatgtaaacagtgcggtaaagcctttaggtgcgccagttctgttcgaagtcacgagaggactcacaccggagagaaactttttgaatgtaaggaatgcgggaaggctttgacttgtcttgcaagtgttagaagacacatgataaagcacactggcaatggaccttataaatgtaaggtgtgtgggaaagcctttgatttccccagttcatttcgaatccatgaaaggacccacactggagagaaaccctatgattgtaagcaatgtgggaaagccttcagttgttccagttcgtttcgaaaacatgaaagaattcacactggagagaaaccctataaatgtacaaaatgtgggaaagccttcagtcgttccagttacttccgaatccatgaaagaactcacactggagagaaaccctatgaatgtaagcaatgtgggaaagccttcagtcgatccacttactttcgagtacatgaaaaaattcatactggagagaaaccctatgagaaccctaaccctaacgcttcagttgtcccagttctttcatgagcataaaaggagtcacatagagaaaccccatgaaagtaagaaatttgggaaagccttcagtcctttctgtttctttcaactacgtgaaaggattcacagtggagaaagaccctgtaagataattggctttaaattacgagagacttgtgataggacagtaaaacctagagttggagttggatctctggattgtgttatgtcagtgttggtaggttaggaactagatttcccagaatccattccatttgtgattccatgatacaattcaccagtaacctatcttacatgagattcggaagtaagttaagaaggcattagtcatggtttggaagcaccatacagggagacagctgtgtgaatacaggctgtatggacacttgcttccatcccattttcctgcttctttgggttgccaatcaagagtatcctcaaaacgacttgactttaattttctcggaggtgataggcttccacacaggtctccagaagccctgcattgaatatccatccacactttggttttccttcagacattattatgtctgtactaggcaactaattcagactgtcctggttgggaatattctgtgatgctctgactcccctagtctgtagacggaattggcatacggtctaatttgtgtagtaagcacctttgttcatactagtagtgactgtattcttgattcagcctgatagctaccatgctgctgtcaaaaccaaccagaggggagcttgttcttctgctgtagtgtgcagtgactggcctcacccaggactttgatgtgagaatgagcactttcctctatcaggaaatttcaagtgtttcctgttattcgtagctcaatgtaatgcctcagttcattttcagttgtttgattatatgtgactaatatgtattttttattcaaacaagacttctgtacatgtttcttcaaaacagtttattaactgtcttcagtcttggattacatcaagtttataattttggcaaattgttaagacactgtgaagtcagcgttaaccatgtgcatacaacttaaggaattttttcctcctcatgtaaattttacttttcatgcttatatagtttcaacttttatcttcatagtaatttctcatctactcataataccaaaagttaagtcatgctgttttgtgtgctctcttgctaaagaccgcagagaccatacctgttgtcaaagagggtgtaataaactgtaataataatcatgaccac

SEQ ID NO: 112444 - DNA, 1094 bp, Homo sapiens
gtctttttagtagagacggggtttctccatgttggtcagggtggtctctcttggctttttatctttatttttgtaccagtggaccttcctgctccctgagactgttttgattgacatcttttgtgtttctatattttccgaggcagtattttctttgtatgttaatcatagttatagtaaagtcagactcattaacttttcttcctagtaattttgacttggattattttctagcctgggggatggggttcatatgtgttgttgtaactttagattactaaacaaaacaaactgtttttttgtttgaaggtatcctttacatacctgtctgtaggtaagcaagtgttagtaaaaacaattttgtcaaacagtactcctgacagcttggtaaagtctaggtagagtttctgatttgtattatgtcctaagacttgaaagtgcatttgtctagttgccaaaagttctaaaaatgagatggtgggctttctcagcatctttttgcttcctagaattgagttgctcttgaagtctgtactcctgtgtcagaaagatggcagactgcaaatgggcagtacaggctttgccccatgctttcaaagtaggattctggattgcagtttcaaaaaaatatgatagattattgttatagaatcaaagtgtcctgaagggagaagaatagctatagttgctgggcaaagagtgtaagaaagaaactttagagcatttatcaatacttgagtgctttattatgttccaggctagaaatgtgatcattgcatggcctaagtgtagtcattcatatatatatgaatatctatatctatatctatacatatatatgtatcgccattatcgagtgttttctagccctggataaagttaatttttttgaagtttgattgccaagcaatccagtgaatctaaagtaatttttctcactttaaagaccagtgatgaggagtctggtccttcctgtactgatactgtagaactccagtcaaacttcagtgcactgctttcttacaggaagacaactcagaacacacagccataatctgctttggtgtcagtcacatcacagtggttatacattt

SEQ ID NO: 112445 - DNA, 417 bp, Homo sapiens
ccaatccctggtagtcagaaaatgagcctggaaatgggaatatgtgtataacgtggggcggggaaaggagagagagggaaagaggtgctacttgtgtatctgtaggagcaggtgtgtctatttctgtgtgtttgtgttaaggaacatgagaatgagcaggtgtgtgcactcttgcagctttctcagcatgcatgccgtagccagtgtttttgctctgtgcctcaaattcactttgccattagccacactactagccacccgcagcttttgaaagaactctctgctaggttctaatatctgggtctccttccagccaagtgacccctccttttttctcttttattgctagttcttcttactacccctcaaatctgggtgttctccagctcctcctgctttccactttctttattgaca

SEQ ID NO: 112446 - DNA, 476 bp, Homo sapiens
tctgcatctcctgcttgggaatcaagcaccttaaactgctatgcagggcaagtacatgtcttggatcttcagtgtgaacggaggctaagagtgtctcattttaatgctctgctgcacgtgagtgtaagaaagtaactgagaagtcacagatggcagagtgagtggagataagattttcattctgtagaagcaggaccctagaagagaaagaactctctccttcagaactcttttccccagatttatagtattggattcctgaagaaggaatcagaaaagaactacatgaggttacagcttacctgctggtattagaaaatgtagaatgcaattttgtggttggtcactaaaagattcactaagatctgagctgtgtcttactcagagtaagaactacgatgaaagccttgagctgtgagagggtgaagacaaagaccccgctggccactatgaggagaagaggaaaatctgagact

SEQ ID NO: 112447 - DNA, 265 bp, Homo sapiens
ccaggctaaagatttctgaactgcacgcaatgtctgaagaagcgcttgaaaggcactttatttctcccaggtccccaaccatgggtttaggtttttatgccagaaaggggaccttcatgaacaaagacccccaagacctagagagaagaggaagtctgaaagagggaggtttgaattcagccttcaggaatgaagagggcagacagagcaggaggctcaggcaggggagtcaggaaccacagaccagaaacatggacttggaaag

SEQ ID NO: 112448 - DNA, 267 bp, Homo sapiens
aacatgaacagagaagtaatttgagaaaattaattgttctttagtggatagtatcaactttagtgggaagaaaatggagtcaggaagtgtgcttagaaaattattgcaacacaacccacatagagtgagagaaatggcaggaaggcccgcaacaaaggacaccaggcaacggaggagcagagcaaagacgatgccaaggcctcgagccaggtgctcaaaaggggcatgagttacacaggcaccaggaaaatctggagaaggaattag

SEQ ID NO: 112449 - DNA, 252 bp, Homo sapiens
tcataaaactcacatttttattgtgtacccaaattcagcctataccaaaaatagttattgaacttacttcctgtgctggacattctaaatttcattcagcagaaatgttgaaatggatgtatttatttatttattcttcttgggtttttttttttttaacatggttcctacattttattgccaatatcatgttctggacttcagaagtcatgtgcttttcagtgttagatcatcttactaaagttattagtg

SEQ ID NO: 112450 - DNA, 688 bp, Homo sapiens
cagacagtttggcaaattgtattggtccataacctgtagtattagtagtgtctctctttccctctctctgtcgggatttttatgattgtgttgcagtcaaaatcgattagttctggtctgtttccatggaaacaagattgtgtcagaaggctgtaaatttttcatctttatggatggaaagttgctgtatgtcatacaacttgagatagcattaaaaaaatctgtaatgtattttcacgtctttgagaaggagagtgtgagttgctgtgaaggactgggtccattactgaggagggatgctgtattttcttggtatctacaagagactattatagtaagggtataaggtaaaagacaagattgaccgatgaattacctgttgaagaaaattagttatttttcccagtgaaattttcactgagagctaatgattgtctgttatttaccatatattctcaggcagcatatgcacccaacagcataagatttatcaaaggcatacatagagcactcagcacattataatgataaccactggacacattccaaggcagaattaaatactattttctataatttcaatagttttgaaataacaccttaatcagggggctgtgaagattgaataacaataaacaaaattctattgaatgattactatatctcagacactgtcatgccatatatg

SEQ ID NO: 112451 - DNA, 393 bp, Homo sapiens
gcccaggccggtcttgaactcctgggctcaagtgatcctcccacctcagcctcctgagtaccagggactacagatgcgtaccactgtgccctcactgtgcactttttatagacaagttttctaatataaaaggtggaagataattaatatttatcaagcaactgttttatgccagttattatagcaaaactaatgatctcacaacaaacctctagcataggagtttccatcaccattttagacatgaataactgaggatcaaaaatgttaagcttttggctaccaaagatcatacataacctaggaattagtaagcctagagctgcaattccaaagtccacattattttgaaacactgctagtcctgccttccagaaataattaacacttttt

SEQ ID NO: 112452 - DNA, 287 bp, Homo sapiens
caagggactctgaataacagaagtaatcttgaagaagagcaaatttggaggtctcatacttcctgatttcaaaacatattataaagtaatcaaaacagcatgatactggcataaagacaaatagatctacggaatagggtagggagtccagaaataaacccttgaccaaatatttagcatgcatgccaggtgcagatctcagctaattttttgtattttagtagagacagggttttactatgttggccaggatggtcttgaactcctgagctcaggcgatctgtccg

SEQ ID NO: 112453 - DNA, 329 bp, Homo sapiens
actcctacaaataatgtaaaatttatattttcatataaacattttgtatgtacatgtttaaaagtcaaatatatattctacaaggctctacctactctttagaggtaccactttatttatttacttatttattttgaggtggagttttgctctagtcgcccaggctggagtgcaatggcatgatctcggctcactgcaacctctgcctcctgggttcaagtgattcttctgcttcgacctccagagtagctgggattacaggcatgtgccaccatgctcagctaatttttgtatttttagtagagacagggtttcaccacattggccag

SEQ ID NO: 112454 - DNA, 477 bp, Homo sapiens
gaaaagcatggcactgactcagctcatgcttaacaagaaataatgcacagaccacagcaaaaaagccctttatgttgtgtgaaagtctatgccggagcagctgctgccacctcatgtactgtgatagagtgtgcatgtgtgtgtgtgtgcatgagtgtgagtacgcacacaaatgtgtgctgggagggggaggagctcacaccttccacagtcgccacctcagccttagctagcagcatggagaaatgccaaaagtcaagaggaagctgcaccaaagcaactgtgatcaccacatcagcaggtgctttctggttagtaaagctactgggactgaaaaacacacacgatctcgtccttcttttattttaatcagagcaaaatatttttataataattgtgttatatgaataaataattcataatgctgtaacccattatcacattcaatcctcccaacaaccctagaagatatgtaga

SEQ ID NO: 112455 - DNA, 467 bp, Homo sapiens
cacccgcctcagcctcccaaagtgctgggattacaggcgtgagccaccatgcccagcagacctgaattattattattattaaaatgttacatcaacatgtacaaatataaaactacatctaaactctaagtacaaacttcttatgcttaaaactcttacacagtgttaaccccaagacagatttgcaattaagtagttaaaataaaacaacaaagtcaataaaaatcaaataaacaatatacatttaatgtggtagactttgctgttttgctgaagctaagcaaggaaccagtttttaaatcagcaatccgttattttaatggactgagcaatttaatagtgcacctcaaaggtcaatgctaaaaactaaaaaaaaaattcctactgaaaaaactgtcatcgtttcacatttctggctacgttagtgcaaaagggaataaataaaggtgagatgtgtgtgacagtgt

SEQ ID NO: 112456 - DNA, 415 bp, Homo sapiens
actaaaccacagatccaggaagctaagaaaaggccaagcagaataactaccaaaaaattgacacctagatgtatatctaaactgtagaaaaccaaaaacataaaatcttgaaagaagccagaagaaaaaaacacatatagagaaacatgaataacattggatttcttgtcagaaatcatgcaagcaagagccagaatggaaatatttatgatgttaaaagaaaaacttcacaaacataggattttatccagcaaaattatccttcaaatgtgaaggagaaaagcaaagagaaaatcaaattgaaaaaaagaaatagtgaaggagaaatgaagactaaaactaaggaaatttaaggctgggcatagtggctcagacctataatcccaacatttggggaggccaaggcaggtgtatt

SEQ ID NO: 112457 - DNA, 378 bp, Homo sapiens
aaaattgtaggcaaagtttgtgtatgctgtggcctatcgacagcggggactctgccgctgatttctcctaagaagcctcctgggggtttgagcgaatcgtggtggtctccttccctctggagtgattagttttggctttggctcaacatggtgcagacccatgggatccaaagggaagttggccgggcatttctgggaaggatgtctcttcttctgatttctgagtgagggtaggaagccctcttcttcatcagacgccatggctcttacacgaatgatgcctagagcagacacagcccttccaggaccagaggccaaggctgacaatgggacaagagggcggaggaagaagtggggagcacctaagccttcctctga

SEQ ID NO: 112458 - DNA, 481 bp, Homo sapiens
cttcacgggaaagagaaccaaaagtattctgcaaatggcaggagattggaactgggctctctgtataaaagtagggaactgggaccgtgttttaggcagtgcaactatacctgaaatactatacccgaaataattccacctgacactgttggtattttcctgtgacccaatgaggcagttatgcaaaaataggaatgtaaccctataatatatgtagatgtggcacctgaattagagctctacttatgagggaccaaagttccagtcttctttatgttagacctactctggagctgtgtaactccagaggtgtgagtaaccatgcaaccacacagcaggcaggagttcgcagaggataaaacttccacataagatgaacctgcaaacaaatatcttaggaaacatgttgccataagagatatcggacatattaagtagcctcatttacatctgaggaaatgagagtaagaaccacaattcc

SEQ ID NO: 112459 - DNA, 608 bp, Homo sapiens
acctccttgacaatgtatagtatcagacaataaaagtatgattggaagatgcaagaagagcaagggctcctcagagtgtttcacagaactgtcaactgtcctcaccactatccccagcccttacaggataaactgaggccaagatggaggaagcaatgcctccctgaagtcttagatgtcacagaagggacaccgaggcttggggaaagcaggtgccaggtggacgtggggctctgccagctaggaggagttctgcttgtgtggcccaacagccagcttccagggagcaagcagagagaaaaactgtgctggtgggggctggcacctggggaaccctgctccaagaggagccagatagcaaaggccaaaccgcctgcctcctgcggtgggaagcaagcaatcccagagccttgaaatatgcttgctgtttctgcctcaaatggcgttttccttgctgggaagaggcttcagtatgaaaatgctgatatgttataaagaacaatgtaaatttcactagaatcactgcctaaaaataagaaggtctggctgggtgcagtggctcacgcctgtaatcccagcactttgggaggccaaggaggacagatcac

SEQ ID NO: 112460 - DNA, 358 bp, Homo sapiens
ctcctctgcatggaaccaggtggggagagagcgaacctcaaagtcatgcaaagggcttcttagcctggcttgaccactttggaacaggctgtctgtgggcaaaggattcaacctcactgaacctcaattttctcaaatgcaaaaagggttttaagtgctggctgttgttcaatggaagaggaaatcatttgaacaagaatcgcatcaagttgtgttgtgataaattttctttattaggatgaataacatgcacagatgagcttcaaaagtgaatgagcaaacttactggttacactctgcatccatttactctgtttagtatggagtaatgttaggcaataaatgatgctggcaaatg

SEQ ID NO: 112461 - DNA, 373 bp, Homo sapiens
gaataagtcaagagagaacaagcaacaataaaaacatcgtttatatagcaccgagagagagagaaagtagagatgaatgtattgccattagtgtcgcaggccaacttcagaaaagcttttggtgactggaaaatgatacggaggttaggaaatgaacacagaaggaacataactactggaattcaaaccaacatcaaaggctctaaagaagacagttgagcctgtcttgctggttcttagtctctccctagaaaacaaaacagttacataactggagaaggttcttccaactaacatttcctctctgtcccacttatgtttttctcccccactacttcaccctgtcacccacctcaatgtgaacgatcataca

SEQ ID NO: 112462 - DNA, 303 bp, Homo sapiens
gggattacaggcgtgagccaccgcacctggcaattattttattttttttatagagatgggatcttgcaatgttttctaggctagtctcgaactagcttcaagccatcctcttgccctggcctcccaaaacgctgggatttcaggtgtgtatcttctgaaagtacagtttgttacttctgatgaaatatttttttcttccagagcttctcagtttctgaagtaaattagaattaatctctgattctttgtctctttcagggcttttcataatttgacttactctgcacacccaactataccatc

SEQ ID NO: 112463 - DNA, 143 bp, Homo sapiens
gttgtttttggctttcttacctggggtgcaagtggagcaccctgtgggcatcatgagggtgtcaggaaagccttctggtaactgaaacgcagtccattctgtgtcccccagattctgagttttcagcacctgacagtggcggg

SEQ ID NO: 112464 - DNA, 655 bp, Homo sapiens
caaataagaaaatggacaaggcatcacatattggcctcttgcctgttttaaaagggtgaaaatggaagtagataagctgcaaagtgtcctgtgtgtgatgaatgttgacacatgaaacaaatgtctaaagtgcttcacaaatggaactgttgttccaaagcatcgttcaaagttgttccactattaatttaggatgaatagtctaaatggtggctaagatttttaatttttaattgaattaatagtttcactttattcaaaaggggctattatcacgtattctctgttaatcatgtgtacttctaatggctttctgtgatagtaaataagactttcctgtgggctgccattgcatttttgctaaataatttagcatctagttaagaatcaggaataaaagagtactaagactgtgtcacaagcaaatcacagttgttgagggcatatttcaccatctcttaagtgattccttctcattgatcaatcccccttcttcagggtgttatatggaactcaatattggatcatttttataattgattatcaataccacgtgttactgttacccacatctaatggctccttcctcttggtagtagaattattagtaggtactcttcagacacagtgtaaaagctcagaaacaactctctga

SEQ ID NO: 112465 - DNA, 671 bp, Homo sapiens
ctcttaacctttatcataatcatgcaaatcatcaaataattagtaactgcctacagtttgtgtggctcatcataataagacctttcccttaagttatttatcatcttagggtaggcagcataagtagaagatttcagtactattaacagcaaacaacttctaaaactccattgacaatgatacataatttagaaaggaaataatgttaaaggtcttatttatcatttctaatcttgttctttcacaatatcaggactttttaaaaaataattataatgtatttggttctgagtagctcatagtgtgtttcacctgcataatttcatttgatcttcacagttctgtgtgcatggaatagggtacactaccctacattctacatatgaggaaacaaactcagtgtttggtggatgctcatgtttgaagtgacaaaaccttggttttctgactcctaattcaggatttgttctacaacataggtcctgttcttcttgttttccatttagtaatgttctagagtcagaggtagtcttttgagatcatagtcatgagccacactggctatttttttgttatttattttactactgatttttgagtaggtaacatatatatatatatatatatatatacacatatatatggtgcacaattcagaggcacaaaagaat

SEQ ID NO: 112466 - DNA, 753 bp, Homo sapiens
atcctcagagttgtttctgagcatctcaggcttaaggcgaaagtgcccattatacacataatgctaattgtataacaagtaaaaggaagctaggcagcaagctgtggccagaatctcctactttatacactagaatgcacttagttcttaatcctaaaaactacattcttgaaataagcttattagcatgtggcctaaactgatcttagagcagttatattctgtttaatgtttacctttgcctataagtaaaatattttaatgttagatttgtagtttacccaacatccatgtatcaaaaacattttttaaaaggttataagcacatgtgacttactctataggaaataacatcattgttggaatcttacccagattctaaatggcctagaattatatgtaaaataggattgcagttctagtaagtttcactatttaatacatcattatcagcagttttgtagtatactcaggaaattgagggaagggctattgaaaacattaacacttattcaagtaaaataattcaacaaaattgccaggacttgtattaggcatggagacacaaaaataagtagagacatggtgttttgcccttaagaaattagtaagaataagaagtgacaacatttttgaagtaggagacagaagaactataaaatttaggaataaagactgtaacagcttagtgatctatgcttttagtgcagggttgtttaaaagtagatgaaggtgcttctcctttctactata

SEQ ID NO: 112467 - DNA, 382 bp, Homo sapiens
gcatgtcaatggtggagttgggataagaattaatgttgactacgttcttgtctaattattgccctagcccagacaaaacagaaaatctaattttctggaaattactagttatgtctatgtattttgcacaaatttttttttctacctaattattgctgtctgggaagcttgaaaggattgctaagcaaacaccatggaactacctctaaccaatagggcctgtgctaaggaggtgcacatgagaattattttggctccattccactaaccttatgagtcaaaattgctggtcatcctccttctacaaaagcaccatggaagcactgtacctagtgcttctcaccatctctgtcccctcctgctccccgaaccttatgggcat

SEQ ID NO: 112468 - DNA, 287 bp, Homo sapiens
tatgaggcccaatcttagtgttatatagtctaaattttcaaaaagccatgtttcacttttcacatacatttgttaaagacaacagaatagtaccttccttataaaataccctatagtgactcttatatataattacataatttaaggttagaaaaaaaaactagctaaaattcatctggtctccaaatactacaataatagggagataaggagcttttgagattagacttacaaatgtcaggagtaaaggttacagatacatcctcatagatgctagaacacacttg

SEQ ID NO: 112469 - DNA, 514 bp, Homo sapiens
atacttgaagaggttgttgactttcaggaataaggggaagctgaggttacacacacccaaaggatgagagggaggtggggaagatgacccccatatattgttcagaaataaaaaatgaaagcatgtggttagtagggacagctctttgcattcaaagacacaagagcttaattgttgtcattgtccttatcattaaaatcttgctttcctcttccttcatcttttcccgtcttctttgtcccttatttattgagcatttatcaagtcttcctctaggtaaggttgggcatagaaagctcagttattgtcaagttaatattaaggtgcacttgagtaagggagtgaataattatacatgtaactattagtggcagaactctgaatatcttggtcacaagttacagaggatcaaccaacacctttaaggaggtggctgtttggctggcctctgaaagaggtaccaattggatgttattttgagaggtatctgtatgtgtataggttgtagcatagg

SEQ ID NO: 112470 - DNA, 586 bp, Homo sapiens
gacagcttttacataaacaattggatacaccaggaaccccagtcatcccttgtgctgtggatgcatcctggttccctgaaagaggcagcatcatggtacccatgttccagagcagtgtgtcgcaaactctagtgtgcatccaagtcttgttaaaaatgcaatttctgtataggattcagtaggtctaggagggggcctgggattctgcatttctaaactcccacatgatgccaatgctgctggtctgtgaaccacttgttgaatagcaaagttctagaagaaggtcttattaggcttttcatatgggaaatctgggcttgcctagtatggatatatatttttttattcatattccacccacctaactttgaagaagaaagatgcctatttcttttccccacaattcctttcttccactccctgccctatcccttcctccccttcttgaacagaggctgcttagcttagcagtggcaggagtccctctgaggatttgatttttaaaaaccattgaagaggtgtaaaggaccctgcttgctgaaaggaaaaggaagagtgactgggcctcccccaggtcatccctgtc

SEQ ID NO: 112471 - DNA, 289 bp, Homo sapiens
ctgaatcttatctttacttcattctcctcttggagtgttctaggctgtggccctctctgctacctccatccttcaacatgcttccatccatcttgtgagctccagaaatagattgaaatttcttatctattgatgattttccttcctatcctgtatgctgttgtaggtttatccccttttgttttctttgctgtcattttaatggcatgctgagacaaaagggcataaagcagatgcttagattcattatctacctggaagctacccaactgttttaaaatagaaaacc

SEQ ID NO: 112472 - DNA, 296 bp, Homo sapiens
aggctggtctcgaactcctgacctcaggtgatccacctgcctcggccttccaaagttctgggattacaggcttcagccaccgtgcccagccgatagctcatttctttctagtgctgaataatattttatttatggatatatcacaatttgttcatccatttacctgttgcgggacatcttggtttgggtagctgaagtttagacaattatgaataaaggtgctgtaaacattcatgtgcaggtttttatgtggtcatattttcagtccatttgagtaaataccaggtagtacaatt

SEQ ID NO: 112473 - DNA, 693 bp, Homo sapiens
ggggaagcttaattaaaaaaattttaaaaatagaaatatctagccagactgatcgaaaattaggaggagatatacagattaccaatattaggactgagagaggtgatatcaatgtgaattctacagatattaaaaggataataagagacttatggtcaaccttatgcaggtaaatttgacaacttatataaaatggataaatttaatgaacagcacaaaccacctaatctcactcaggaagaaatagaaacctgagcagtcctgtatctgttatagaaattgaatttgtagttgaaaaccttcccacaaaggaaactgcagacacagatggctttgctatggaattctaccagacatttagggaagacatagtattaattatattctaactcttctaggaaattaaagaggagagaatacttcccttctgattctatagtataggcaccataaccaggcaagcatattacaagtaaaagtacagaccaatatttctcataaacatggctctaaaaatacctgacaaaattttagcgaatgatccagcaattcataagaagaaaaacacatcataaccaagtaggtttatggaatgcaagcttaacattcaaaactcaggaaaacagtttattatattaacaggctaaaaaagaaaaccatatgatcatttgattgctgtaaatgaaaaaaaaa

SEQ ID NO: 112474 - DNA, 456 bp, Homo sapiens
cttgcattgttaaaagataaaatttcaatactgtaataatatttgattctatttgatgttacatgtttggtgtgtgtagtatacagaattactcttatcatgggcttggcttaagccatagtgtacatataaggctgtttcattacattattgaaagtaggtctttaaagtagtgacattatggatatttcatgaaataaaattatttttcattgaagatactaagaaaacttaaaactctataatggtagcccctttttaaaaatcatctggctaggcatggtggttcacacctgtaatcccagcactttgggcggccaaggtggggaggatcccttgagcccaggagttcaagaccagccttggcaatgtaaggagacccccatcactacaaaaaataaaaataaaattagccagatgtgttggctcatgctaatggtcacagctactcagaag

SEQ ID NO: 112475 - DNA, 272 bp, Homo sapiens
ccactgtattacagagtatgcgttagagactcctttatgcatttgttgattgtttttattgagtggctgctccgtgcctggcactgtgctagagactctcaagtactggctcatggtggaatggatgagaaagaaaactcaaaagacccatgtggccgggtgctatggctcacgcctgtaatcccagcactttgggaggccgaggcaggtggatcacctgaggtcaggagtttgagaccaatctcagcaacatggagaaaccctgtctctac

SEQ ID NO: 112476 - DNA, 250 bp, Homo sapiens
ctgcctggtgagcaagagagattccaaagactttactttgaaaagcatctcccagcttctacttttttttaaggaaaagtagattttctttgtctttgtttttgttttaagcaagaacagaatctaatgacttttttcatgccatcgctttgaaatagcgtcgtcttcctttctttctctccctcttcctggcaaagtatatactggatttttattgccttcttgggtttttttccctacgtgtatcggc

SEQ ID NO: 112477 - DNA, 121 bp, Homo sapiens
agggaggcctcgtccttgctgaggtatttcataacctcaggatagagaaatccccccaactttaatgcaaagccaagcaagctgaaaaatggccttgaataggctgagatgaaaaaacaaa

SEQ ID NO: 112478 - DNA, 163 bp, Homo sapiens
gctgactggtagtggagttcagtctagctccagtgctgtccattccatcatgctgtatccgagagcactagtcagggatataaagagattatccctacccttgaataatttgaagcccaattacactgacaatcacaataatgacttagatctgaaaagcaga

SEQ ID NO: 112479 - DNA, 567 bp, Homo sapiens
taatagctcaccatgttggggtaaaatgttggtatgttgcacacaggtgcaagaactttgttttttagagagaccaacttcttaaatgtgtaacagtcacattgtgaagggactgcatttgtctggatttcacctgcagctgggcccacagcctgcctgaggtcagaaaatttttcatgacccattttttaccctgaattgacaagtttagaaaacagggtaatggactacttcatcctcctggaccttgaaaagctggctgaccaatattagactactactgctcaattagtgtgctagggaaacctttttgctgcacatgcagatttttctgtgacattttgactaaaatttgagggcttctggggactatgcctgtttcctttgtacaccatcttcatccttctcatttgaagcagagttgaagtggctaatgcagggaatgcatttatggaagcttgcacgctatctgcctttgtgcagcaaatgcaggtggctcctagcatttatctatgttatagatatgtgaggtcagggaagggtactaaataacactctggaaaaaaa

SEQ ID NO: 112480 - DNA, 824 bp, Homo sapiens
gcggccgccctcatgctagcccccgccccctcgcaggctcccggccttcgccaacctgcaggaggcgctgctggagaacatgatccagaacatcctggtggaggcgagccgcggggaggtggtactcacctcgcggccacgcgtcatcgccctgccgccgttctgcgtgcccaggagtctgaccccggacacgctgctgccgacgcagcaagcagaggtactccacccggtggtgccacttcctaccgaccttccgtaaatgcccgcgcccagcctctccgacatgccgctaggggtcacgcctggccccctctccaccgccagtaaaagcatctagtcttttttctgtatctaccttgactttatttccccgacgagggggaacgcgcgcgcgagctctgagagggaaggatggcagggagcagcccgggcggactgcagaggcgcggcgggaacttagggcccgggaggatgcacctctccgcccacactgcagctggactgagacctggccgctagctgccggccgctggaccgggtctggccagtggagggcgctccggacggggcctggctggcctttgccccagcgcaccttggtgcacagtaactgagtgccaggcctggccagcgaagcaggtgtccactgggcagggcggccacccctcacctttccgcgccgcgcctgctcggaggcttagcacccccagggccagccccttagtgtagtggatgaggggagtcgaatgggaatctccgtagagctcgcggcacactgtaccgcacggacaggcgagcgaggaggcgcgcgggcactgcggccg

SEQ ID NO: 112481 - DNA, 421 bp, Homo sapiens
tataaataattttggtctatatttttaaatagacaacaggcaatataacctaaataagaaaaaattgcctatataatatgtttttccaaatgttacaagtacctttgaacagcaatgcaaagaataggagaatatgctgtttcaaaaaggtcttcaaacaaaagattttccagtagttgtggtcagaaatgtgatttaatttcttgtttgtaaaatagcaacaaaaaaaatcttatagaaaaatctcatatttttctgtatagcctgttcacaggaagaattctgttcagctgaactccagagaaatagtttctctctttggaaagtgcaaattctaaagcattacagaatagaaatgtaaaaggaaatagagaacagagaaatggttgtggtaggtaaagatgttacctgggaaaaaaaa

SEQ ID NO: 112482 - DNA, 425 bp, Homo sapiens
atccatgctaaaggtaaacaaactgcaacttatatctgcaatttattttggtatagacaagaggtatgccagtagcacactggtggcttcagaagaaattctcaacacctagctcgccagagagtctatgtatgggattgaacaatctgtaaactaaaggtatgaaaaaatttgtaaaattgggaaggtgagggaaaggtgtgacatttatttttgggtgcagaaacatctaatgcccatgtataaactagggatctggggtgaaaggtgcttctaggggatgagatgttggaaggagcaatgagatgttggaaggagcactgagactgttggaaggacgcgactgagatgttcggaaggaggcatcgagatcgttggacacggagctatgagactgctggacggagccactcgagatgcatgga

SEQ ID NO: 112483 - DNA, 915 bp, Homo sapiens
atccatgctaaaggtaaacaaactgcaacttatatctgcaatttattttggtatagacaagaggtatgccagtagcacactggtggcttcagaagaaattctcaacacctagctcgccagagagtctatgtatgggattgaacaatctgtaaactaaaggatcctaatcatgaaaataagtatgataaattataagtcactattggcactgttgtttatattagcctcctggatcatttttacagttttccagaactccacaaaggtttggtctgctctaaacttatccatctccctccattactggaacaactccacaaagtccttattccctaaaacaccactgatatcattaaagccactaacagagactgaactcagaataaaggaaatcatagagaaactagatcagcagatcccacccagacctttcacccacgtgaacaccaccaccagcgccacacatagcacagccaccatcctcaaccctcgagatacgtactgcaggggagaccagctgcacatcctgctggaggtgagggaccacttgggacgcaggaagcaatatggcggggatttcctgagggccaggatgtcttccccagcgctgatggcaggtgcttcaggaaaggtgactgacttcaacaacggcacctacctggtcagcttcactctgttctgggagggccaggtctctctggctctgctgctcatccaccccagtgaaggggggtgcagctctctggagtgcaaggaaccaaggctatgacagggggatcttcactggccaggttggtcaatggcacttcccaggtccactctgaatggggggcggaccctaaacacaaggctggattgggcagtacctggacaacagagaccaagaaggcttctactgtgtgaggcctcaacaca

SEQ ID NO: 112484 - DNA, 301 bp, Homo sapiens
atccacaatccccagtgggcatgtctggagaaacacatggaatcctgtctcctgtagtttggctacagtcaaaatgaaggaatgcctgagaggaaaactcatatacctaatgggagattccacgatccgccagtggatggaatacttcaaagccagtatcaacagtatgcctcagtctaagctataattcttacccctttcagaaacttcttttccatttcaaaggggagaagggaatatgggaaattcctctttttttcatattcttcaatcacaacacaccaaaatttttcacaaggca

SEQ ID NO: 112485 - DNA, 1690 bp, Homo sapiens
atccatgctaaaggtaaacaaactgcaacttatatctgcaatttattttggtatagacaagaggtatgccagtagcacactggtggcttcagaagaaattctcaacacctagctcgccagagagtctatgtatgggattgaacaatctgtaaactaaaggatcctaatcatgaaaataagtatgataaattataagtcactattggcactgttgtttatattagcctcctggatcatttttacagttttccagaactccacaaaggtttggtctgctctaaacttatccatctccctccattactggaacaactccacaaagtccttattccctaaaacaccactgatatcattaaagccactaacagagactgaactcagaataaaggaaatcatagagaaactagatcagcagatcccacccagacctttcacccacgtgaacaccaccaccagcgccacacatagcacagccaccatcctcaaccctcgagatacgtactgcaggggagaccagctgcacatcctgctggaggtcaaatgtgggtgtagagattatggaaaaattcaatacaattagtgcctccaaatgcaacaaagaaacagttgcaatgaaagagaaatgcaagtttggaatgacatccacaatccccagtgggcatgtctggagaaacacatggaatcctgtctcctgtagtttggctacagtcaaaatgaaggaatgcctgagaggaaaactcatatacctaatgggagattccacgatccgccagtggatggaatacttcaaagccagtatcaacacactgaagtcagtggatctgcatgaatctggaaaattgcaacaccagcttgctgtggatttggataggaacatcaacatccagtggcaaaaatattgttatcccttgataggatcaatgacctattcagtcaaagagatggagtacctcacccgggccattgacagaactggaggagaaaaaaaatactgtcattgttatttccctgggccagcatttcagaccctttcccattgatgtttttatccgaagggccctcaatgtccacaaagccattcagcatcttcttctgagaagcccagacactatggttatcatcaaaacagaaaacatcagggagatgtacaatgatgcagaaagatttagtgactttcatggttacattcaatatctcatcataaaggacattttccaggatctcagtgtgagtatcattgatgcctgggatataacaattgcatatggcacaaataatgtacacccacctcaacatgtagtcggaaatcagattaatatattattaaactatatttgttaaataacacaaaagtctgaaattcattcacttaagtaaaaaaatttattgactgtctactagcaggccagatgctgtgtttggctctgaattcccaactagcaagagcagagaatctacattatggctgatccataagccaccaattcagctaaatgagatgtttctaatctgggcttccacttaaaaataaaactaaaaatactcatgaaaagagcctacccttcttgatcagagccatacccctcttcaccaatgggaagtcaagacacctatgggtaaaagttctctctgatgcatgaaaactcagagtgataaagtaattttaaaataaaaatttggagaaagcagt

SEQ ID NO: 112486 - DNA, 404 bp, Homo sapiens
gggcctgtcggagggctgggggcaagaggagggagagcagtaggacaaatatctaatccatgtggggcttaaaacctagatgatgggttgataggtgcagcaaaccaccatggcacatgtatacctatgtaagaaacctgcatgttctgcaaatgtatcccagaacttaaaagaaaatttaaaaaaagccagggaatcaatagatttgtgacagtggaggtagagagagacaaataagtaaaatgtcaggtgataataaatgctgtgaagtaagcagtgggtaagaggctaaaaaatgacaaggtgcactgctgttttaggtaaggaggtggtcaagatgatattcgagcagagacttaaataaaaaataaaacaaacacactaaccgccctctccagaagaga

SEQ ID NO: 112487 - DNA, 884 bp, Homo sapiens
tgcggtggctcatgcctgtaatcccagcactttggaaggccgaggcaggcggatcatgtgagggtcaggagttcaaaaccagcctggctaacatggtgaaaccctgtctctactaaaaatacaaaaattagccaggtgtggtggcaggcacctgtaatcccagctactcgggaggctgaggcatgagaattgcttgaacccaggaggcagaggttgcagtgagccaagacctcgccactgcactccagcctgtgctatagagcgagactcagtctcaaataaataataataattaaaaaacaaaaatcaaacaaacaaaaaaacaaaaaccttacctacaaagaagcaaggataagaattacctgggagtactttgcagaagccgtgcaaacaggaagagaataaaatgaatctaatttttaaagtgttaaaagaaaaaacccaccaacctagaattctggattcagcaagattaaccttcaaaagagaaagaaaaatattttcttagacaaacaagaattgatggaatttattgctagcatatatgccttgcaagaaatgtttaaaaaagttcttcagaaaggagaaaaggtgataaagtcagaaactgccatctacataaagaaaaaaagagtattaaagaaggaataagtggatataagataaaatattttcttattaatttgacagatgacactttgtgttcaacatcataattgcaatagtgtttgtagtaattttagtttatgaataactgaagttaatggcagaaatgttataaaggatgagagagggcttgggaattctgttataagcaatttatactattcaagaagtggcataggtttacttgaaagtaaacttaagttagttataaatattta

SEQ ID NO: 112488 - DNA, 827 bp, Homo sapiens
tattaatctgcaacacaatcaatttagcaggctcttatatttaaaaataacaagagaaattataattcctttctttttataacaaccattcaatgaaacctgtagtttattaaacaatatcacctcttctgtcttttttctttttcggttaaaattttaccattcattaagtgagctgaatgaatgtttacgtgaacttcatatgtagtaaatgcataacataagcacacatataagttctggaaatagaatatttgctaaaggaaatagattttgttgttacattggtaaaataattttgtgcacagcattccctatatttattctttataaggcagaacaaaaattaaaagacatgctgattatagaactgcaatgttgaaagttgcaatcttaaagcttactgtgtactatctatttgtgtgcaaactattagtatgactgagccactcatatctggttaaaatatttttggtttcttaatgcagtggaatgaatttggtaactcagcattctttattcatttacttaataattaccaagtacttattatgtggtagcactatcccaagaggttgtagtaaaatagtaaataaagcaaacaaattcaacctcaataaataagtctacctgggggatagacggaacaatgtgaaaactgataaattacaaatcctcaatcaacagatttctattttctctcagacaattttaaaactgaaaattattatgaaatattatagctgtacttatttcacagagtctcatttgtaaaatgggtgtaattctacctgccttgcttacagagtatgaggaccaaaggagaa

SEQ ID NO: 112489 - DNA, 203 bp, Homo sapiens
ctgggaggactccagcttagaccagagacggtggtggcctggcctgaggggaggcccagcccagtcacaggccggctctcttctgggctttctgcctcctgtcatcgtgtccgggagttgattagtctggacgtgcagagtggagccctgctggtctggggccggaggagtctgcgagagttgcttcaaagagtgctgtcctg

SEQ ID NO: 112490 - DNA, 321 bp, Homo sapiens
gtttctttctgattcaatcttggaaagttgtacatttccaggcatttgtccatttttctaggttttccaggttgtgttcatagaggtgtttgtagtagtcctgagggtttttggtatttctgtggcatcagtagtaaagtcccctttgccatttctgattgtgttaatttggatcagcctgtgatctatcaatcttatttattctttctaagaatcagctcctgggttcattgattttttttgtatagttcagttctgattttggttattttttgtcttctgctagcttcggggttggtttgctcttgtttttctagttcc

SEQ ID NO: 112491 - DNA, 592 bp, Homo sapiens
atcactcagaatgcttttttgcctccgtcttttggttatacttcctgaagtatactaactatagtaaggagagaggtgtaatgcctctcctttacaaacgaggagaagagtgtttgagcagagggaatgtggaaaaggagaatggtaatgaaatatttgccacaggaaccctttcaggtagatcagtttagtaaagaatacatttatctagaagatgaagagctggaaattgagtcacttaaaatgatctatacctgcatatctctttaaaggagtttatgtaccctagagcccacaaattccttagtttgaggaattatggcatttgtttttatctttgtagatattggcttactttctttggattttcattcatgcaataaatacttattcattgtctatttactagaatactgtgttttatatctgatttccagttgcttagtaaatacatgaattgaattgaatatttgttgaatgtgcctattaaatagatttccaagctagttccttccataatttttgtagttaaatggactttatatgtcttgccatgagacctatttgaaatattattttgataagaaaatgc

SEQ ID NO: 112492 - DNA, 483 bp, Homo sapiens
ttgaaagtgttcctcatggtgcgccggcttcatgatacgttgaaggcagctttcactctgcaaatcttcattgcggctgggagttccattctctcttgttgctctccacttcccactggaccaagcccctctctattacatgttactagatggctgctgcctctcagggtattttttgaggctgtttgtttagcctgggtaggaggattcctttggacaggctggcagcccactccaactttggcgatttccagaaacagcttcaactaaacagaagaaccagttcatgctcaaattatcctttgcatgaggctatatccactttggaagaaagatgaatttagagtatttcagtgggttttctaatagcaaatagctctaacgatacacacaaaagaagcctgtggctgagtcgaagtggggcaggcctcctgctcttgagtttggagtccacccctctcagtggcagaggaggggctccca

SEQ ID NO: 112493 - DNA, 296 bp, Homo sapiens
agacgggatctagaggatcccagagactggagaaggagtaaaatatctacaaattacttatgttatttataaagttgtgcatctacggaaatgtttactgcctgaatgctgctatatatatcactgaagctgaatctcatgtgactctccagggataggctaaaagagagaactgggagaaagaagtggcaagaaaaaagcaaacccagggattcactccatgacacaattatgtacaattacaatcatgttgacataaatgttatgttctctctccttctccctttctacttgaa

SEQ ID NO: 112494 - DNA, 701 bp, Homo sapiens
tttctgtagtgtggtttatacacaaggagaatcacgaacccagacactagtcaatctctctattccctgacttgtactgagattggggaatttgggaggtcagacttacctcaaacgtagaagaaggcagatagagttcttaacctttttcaacttagccacctcaattatttgttcacattttaaggaagtaggaaagagtagtttgaagtcacaaaatttgttctcaggtgttcttaaagctccctgttctcactgcgacagaagactcaggcctactcattttgtgctgtcccacaaaagtgagaggagtacttctctttttttaaatcatcagtaaatttcaattttaaggggcctatgcaaaatgcctcctttctgatgtgattttcttgggttgctggccctagttgaatttatgggccctgaagcctctagtggaaatcttgtcttccctatagaacgagaacagctatgtaatttgcttcaccttctgttaggacttgcaccctctttgccatacagaatgctataaaaaggacagtctgccagtgaccgaagctttctcatttttttttcttccagaacaatagcacacatcttggttaaagctatagtctccttattattcagaaatattctttttcctgctgcaccattaggcaaacatacattatgcttagaatgatacttggaaactc

SEQ ID NO: 112495 - DNA, 368 bp, Homo sapiens
cagttttggcatcgaaagaccaagcattctcttttggatgtgtccagattgagatgtctgtgattcatccaattagagaagtctggcagacaattagataacatgagtctggaagtctggggagaggtctgagctgtaggtataaatttaggaatcacgagcatgtcatagctattttaagccatgggatgggataatgtcaattagggcagaaggtatggatagagaataactgagggcccaggaatgaggtgaaggccacaccgacatttaccaatggggtaggggaaaggaggaggtggctttttacagatgatcaagtatgagctaccagggaagtgagcagaaaaccaacacatgtaagctga

SEQ ID NO: 112496 - DNA, 1128 bp, Homo sapiens
gcggccgcacctgcaccgcctggggcgcctgccactctactgcctcctggctgcgttatgccagggactccccgctgggtgctcgacagacctcaaagcctgtgggatggccccctgcctcctgtgagggcgcaggaattggggcctggaagatgtcaagcgacttgccgaaggtcatgcagaccacacccgatggctgcttagtaaattggaaactggctgaacccccagattcaagtgtttcaagttggcttcaccatgcagtatcctcagtccagtcctctaccgaacaatcgctgggatcacccttaagtgggttcaggtcccagctcagaagtccagctgccaggtgggagcaaggccctgtggatttgtgaaggatccctgaacacctgctgccctgaggaactctcactgggatgggcagtaccccccaccatacatcctggggcggagcctcagtggttaggtgcctgggcactggacaggcagtgcctgagttcaaatcccactgatgggcggtgtgatcctgggcaggtgttatggaccccactccccttcatatgttgaagccctcagccccagagtatctgtatttgcagatggggctgtgaggaggtgatcaagattaattgaggtcataagggttaggtgcccttataaggagaggaagacacaccagggccctctccaccatgaggacacatccagaaggcagccatccacaaggcggagtgccaccaccaggaaccaataggctggcattctgatcttggacttcctaggctctaaaaccgtgagaaataaatggctgttgtttaagcacccccatctacggtattttgtcatggcagcctgagatgactaatacagcaggttatctaacttctctgtgttctcatttcttcatctagaaaatgtggctaataatagattctatcacagacatagctgtattccgtggacacagacgagtgtggaggggccagtctctgcacatcccactaaagaatgctgatcaggaagatgagtgctagtgacatcatcaaggggtggcttcaaattctctccattggctgggatttattttttttaagtcagtcatttggaaactctgacgctttattg

SEQ ID NO: 112497 - DNA, 315 bp, Homo sapiens
gatttatttatttatttttccctaggaacaaagttcaacaaaagtaggtaatttaaggaatttatgaggaacaatttttaaaagtgcataattttttagttctgtacagctgtagtttgaggcagtaccttcatgaatttctttaggtgacgtacacctgtattttctcttcttattttcaaatggttgcttctgctagaaatccacttggtaaccatgtatgagtgaaaatgtgttcctaaactgaggcattttgactgtgggaagagctataaataatgatggaaaattcaggataaaaattcaggcaaaaac

SEQ ID NO: 112498 - DNA, 140 bp, Homo sapiens
acactgaaaggagcaattctaaagatatccagacaaggcatggaaatttcttccatgtgcaacgggaaaagtcagtactcaaacactaactctgctatttcagtatcatatttctgtccactgacactttctctttctcc

SEQ ID NO: 112499 - DNA, 473 bp, Homo sapiens
tgaaagtgctgggaatacaggtgtgagccactgcgcctggcctccacttcccacatttcttaagtccgtggcccagaccttcctgcttgaccgccccggccaccgcccggattcctccttggcaaagatgcctcatcacagtttggtgaaccctcactcctcaccctgccacccccactggggacactaagttccccgccttgtcccacccatccctacggccccctccacccagggaggagacttttcagagtgtgtttggggagggagtcgtctgtatgctgggcagtcctggcctacagcggtgctggccacggaaacacccaggactcaggaatgaagcacaagtgtttccagtccccacacgctaaaaaggcgacaagaaccggtgaaagtaattttaatattctatttaatccagtgtagctaacatattacttcaacgctgattaacataaaattcttcgcgagat

SEQ ID NO: 112500 - DNA, 640 bp, Homo sapiens
tgaaagtgctgggaatacaggtgtgagccactgcgcctggcctccacttcccacatttcttaagtccgtggcccagaccttcctgcttgaccgccccggccaccgcccggattcctccttggcaaagatgcctcatcacagtttggtgaaccctcactcctcaccctgccacccccactggggacactaagttccccgccttgtcccacccatccctacggccccctccacccagggaggagacttttcagagtgtgtttggggagggagtcgtctgtatgctgggcagtcctggcctacagcggtgctggccacggaaacacccaggactcaggaatgaagcacaagtgtttccagtccccacacgctaaaaaggcgacaagaaccggtgaaagtaattttaatattctatttaatccagtgtagctaacatattacttcaacgctgattaacataaaattcttcgcgagatagtgaagtttctttttcttctcacactgaaatgagtggtgtatttttgatgtgccgaggtctctcatcagagccctgtttcagatgctcagtagcgcccttggccagtgccccccaatatgggacagcgcaggtccagtggcctccccagtggggaacaaggcggac

SEQ ID NO: 112501 - DNA, 733 bp, Homo sapiens
atgaggattaaaataaagcaataaagcctttaacctgccacatagtgagtctttgataagtattatagctcctattatggttataataattactatttatatttttcttaatataataacgaatatataaatagaaataaaatataaaataaataactttatgataattaagctgattataaaaacttgaattgtactttgcaattttatgaagccctttctcgtgtcattttcttcatgcattcaataaatctttgttgaataccatctgctttttagtaacagtgttaagtgagtctgctatgaagtgaataacacattgctccttttgtcttgattgagccaccacctcggaagggataatgcaaaggcatgggaataaagtgtgataagtgtactgtgggctttagttctcagcttctttttggagagctacacatggtgtaaaaagttgatatgtatgtgcacatgtgtaatatatttccttgttctgatatagatatcatgtcagctgccacggaatggagctgaattgttgttactccatacattctggtttcctagaaggccagtatttgcccagttattgggaaacctggttgaggtgtgcacctaagattatgttctaatcctagttctattacttgctagttgtgagtttttggaaaagttatttaacttcttcatgattcacacttgcttatctatgtgggggtgagcgaatatcttataa

SEQ ID NO: 112502 - DNA, 377 bp, Homo sapiens
ttttttttttcatttcttcataaaatatttctatgataatattaatcgtgaagatttgtcacaagggttgcctcctccaacaaacacctctccttgcccttgttcacccactaggtctagtttgggttttgttcctctttgcctcacctcataccatcccagttacccaattctgctattatcttcccacgttataaatgcaaataattaatacgttccatagttaaccccatataaattttaattcccaatatactaatgcaatatcctgcaaattcatataccatggtcataaaataaattggcatgaggtgcagtatttcagatgaatgaacacactttctcagagcttccacttccactatctaattgaagtt

SEQ ID NO: 112503 - DNA, 387 bp, Homo sapiens
gttggcaggccatcacaaggctggcctgtcttcttctgtcctgtggctccctcctcgttctcctttttcatctcctaagagttaggatccccagggcttaacaatttgatactcttctcactcaggctgccaggaacagcctccgcatcatggcttcagcaaccacctttatgcagaaaaggcctgactttcaaaattatatttctctacccacatattaaaatgtaacagattcttcttaaagagcccatatgaagaaataattcttttttgtgtgctttttaaaatgataaataatcgtacactttttttttttttttgagacggagtttcgctcttgttgcccgggctgaagtgcaatggcaccatcttggctcactacaacct

SEQ ID NO: 112504 - DNA, 783 bp, Homo sapiens
aagtgaaaagaaggaagtaatctgacattaggggtagagaaaacctagcctgagccctaggactattgccgtttatgactagtggatttttgaagtgcttaggtgaagatgtgggctacaggctttgcaactacttatgtttagtaacctcagaaagtctttaggcttttggttttcaaagtaatatactattgggggtataaatcacatcccctttgttactcctgtacctgagcaaggaatttttcacaagcctcttcacttcctgtcagactttgccattcatgacataccatggataggaacagcgtagaaggtgtttgaccactgcggacattgaatgtgtctttggtgagtcagtataaaaactgaagccatggcagttattatttctacatatgacagtgaccctctgccatctgaactttacttgccaggtagaatctgtgtctggagccttaatttgtaagatctgtactcaagtcctgactctaccactggacactgaatatctttcacttttagtctattcatttgtaaaagggatataataaaaatacctgttctgctttctaaaaatatttgtttaaagcataaaatgtagtgacacatgcaaaagccattaaatgtaagtgatgaagtacaatgctaatgtaaggcaataatacatttaaaataaacatagtgaacattatactagaaacttcaagttaatgtagcaagacttattatttattccaaataattttgaacaaaaaagtaccattatttttaaatgagaaa

SEQ ID NO: 112505 - DNA, 599 bp, Homo sapiens
caagctatgtgtctttgtttgatctctttgtacttcaaatatttcatatttataatggagataatggtatccaactcataggttttattggttacagtctttacggcacttataatagcatttgcatatggtaaaatataagttgctaagttgctattgtcatccctacatgtctaatgtttttattttaatgtttattaagtaattgccccaatccccttcagaagtaggtagaggtacatgccttccatgaggtactgagaggaactaaagtttctcaaatgaataattctctttattaatcacagcccagttctctaaattgtaatgatgagactccactgtgatagtttcacctacaataccttcaagtcggaacgggtaggtatcactatagttcagcaattctgagatgcacatcttttcactgttaggttgtgttttacaattactgtatatcctagcttaattgggagcaatttttctttcttagtggtacattagataatggcaaattttacaatccatggcaccttagatttgatgaaatatgggtttagtctcatgtagacggggagactgagatactatgtgctctg

SEQ ID NO: 112506 - DNA, 533 bp, Homo sapiens
ccattaatgctgaactctttagatagagtcacttatttgttcttcatagcagtcctatgaggtaggaattgttactgttacaactttatagtggaggaaaccaagagacagattaaatagcatgccccaaatcacttagctgctgtgggtagagacaggattgaatctcatgagattggctatagaagttgtggtcttagccacctgtcaaatggactaaaccagaggttttcatactttcttagttctagtaacccctaggccaaaagaaatacagtaagtcctcacttaatgtcatatataataagttactggaaattgtgactttaaacgaaatgatgtgtaacaaaaccagttttttccctcatcaacgttgtaatgaaccgatgaaagaatgatgttatttctttcaacctgctgtaagtcctttcacttaaagttgcagtttctaagaactgctccatgatgttaagtaaggacttgctgaccgttaagtatttgtcttctaacaaatttagtgaccattaaaaaaa

SEQ ID NO: 112507 - DNA, 172 bp, Homo sapiens
tcaccccagcctcccaaagtgctgggattacaagcataagccaccatgccccatggctcttccactctttccccaagccctgtacacaagaaccatcagaccctattagcttcagcatcaccatagagcctgacctaccacttctcataccctcactccactgaggcatcca

SEQ ID NO: 112508 - DNA, 384 bp, Homo sapiens
ctttccttcctgaaatgccagcaggaaggggttggagctcccgtgattagccagggagtcaggcttcctgaagtttacacaatacaaagcatattaagtgagaatgtagcagaaaaaagaacttatcccaatgattatagcaatttaaattctcttgaacccaagctctcaaggcctacctgttttatagcctcaagggactctactcctatcccagactataatgaattgtgtctcctggagttgtgcagtacgcaacctgtgaagctgtacacgacagccctataaattctctagcagacagccctcctagattctagttcccacttcacagctgaactgcatttaatctctgtaggactgttttcctgtctgtaaacctgg

SEQ ID NO: 112509 - DNA, 422 bp, Homo sapiens
acatttgggggcaggaggctgtagggtccatgaagaaactccactgtaggttgtggggtcggaggaagccgagggctaaaggatgagtatcacctggagagaggaagaggtttccattgacctggagagaggaagaggtttccattggcaagtggtactggattcctgtttgctgtgggagctgcctgggtgttgtaggatattgagtttaggcaaagccctggaggcagcagatagcaggtgtgtctgtaactatgtgaccccagggaggttggcgcccagtgggcagcctggggagcataagaggaggctgtaggagcaaacaagcaggcaggatcctggagggcccataggtactgaggagtgtgggctacgtgtttggagcaggaaagccacatactccgagcagccttttacaatgg

SEQ ID NO: 112510 - DNA, 721 bp, Homo sapiens
ggaactggaagaaagggcttttcttcctggttctggcatgttctttgtgtttgtttctgtagcacatgggacacccagcagtgcacatcccaatgagttccaaaggccccatccctatgggtagcttcccagcaagttctgtaccaggtcagctccccatggggagcttctagcaccccagagtgtggctcctcagtgagttctgccagctcagcactgcagtggcatctccatccagtgggctgtggctgtgccctctccaacaaggcctggatctaagacctggcaggaaaggggaagttgtggcaccctcctgcaaatttgttcttacctttgatgttctgcctcagccctagagacactctatatctgttattgctgtattcttttgagtttcactttttgttataacacttagtagttaataattcttaacattaaactttccctgttcaaatgattatgtggtttctattactgaaaatgtattcatctccatcttagggactgtcttgccaatgaagccaaaattaaataacagaatactgagctttgaatattatggatatttagccaggcatggtggtgtacaactgtagtcctagctactctggaggctgaggcaggaggatcactttaacccaggggttcaaggctgctgcagtgagctgtggttgcaccactgcactccaacctgggtgatagagtgagaccccatcta

SEQ ID NO: 112511 - DNA, 761 bp, Homo sapiens
gacctttccatctcctgaggtacatttgatgaggctaaaaacctgatgaaattattgttctctcttgaatgattccctgtattgtattagatcatacaatttctgagcataatgtcttaaaaatcaactaattgtttttctcgaaatatctgaaaaaatgcattgtttgtgtcaatcttggttcaggctagggtaaaccaaaatacgttttcaaaaaatatttttattctaacatttcttctgtggttatcaaaattggatgcagactctatgttcctgcttagccacatgaacatctttggtgaatatttttaaatggttgttgagcttgtcataagcacagttgtaatgatcctattttaaaagaattatatataattgggtcatagcaagagctaagtatatggcataagaaacttactcaatggcagaaggactttcaagctaaagccaaaccttttattaggtctctttgttaataaaatatggtcattgtgaattttgttgaggcagcttaaaacttttgaacggatagcttgaatgtaagttatctatccattttcctatgtatgtatgtatctatcaatcaatgtaacatctttctagttagattttcttatcatctattccagaagtgaagtatagttattaacaatggatcatatttaacacgtcttatgaagatacctaccatctgtgatttattttaagttttccagtttatcgaggttgtttgacaaatcaaaattgtctatactgaa

SEQ ID NO: 112512 - DNA, 392 bp, Homo sapiens
ttcaatgtcatgccactgtctacaggataaactgaagctgtaaagcacagtatgcaaagtcccaccataatcaaacctttctctccatccctactcatccccaagctaccatttcatactacatttttactgatttgtgattctttaaaaaataaaaattaatgttaaaacccattctttttcacacctctatatatactcatgtagctccccttagctcaaatgcctttccctcactcatttgacacccagccagcagccactcatactcccgcttcacccagtttgagacccagctgatctgctcctcgaagcttttcctgggctcctaaactgggttaggtgccagactctttgatatttccttagtatggtaggtgaaataaggaccc

SEQ ID NO: 112513 - DNA, 755 bp, Homo sapiens
aacaggcttggaaagcaggcatcaccatgcctatttaacagttggggtcccttggccaccaggtgctggagtaggaatctgagcccggacatgcctgatctgtaaattttgtgttttccccactgtgctgggcagatcacagctatcagcgccaaattcatagaaggggcgccccctgtggtcaattgagggatttgtgtttgaggtagatctcaagaaggaatgggtggggaacttagcctaggacagagcagaaaggagccctcactccccaagcaccaacggcctcagtccttcctgctgactccagcctctagctctcacccagactatctgcatccttctctccaccacgctcctttggaacctgcgtaaaacacagattaaaggaattccgccttacttccctttccgcattatgaccaaatggttttacactatcattgaacagtttagtacaaaacatgccaccttttaatctattcattcatttaacaaatactttggagtgtttaccatgtgccaagtgctgttctaatagacataagctgtgaggttatgcttatctgattctcacagcaacagctttcgagatatgaattggtatactcatttgacagatgaggaaattgaattcatgtagtgagaaaggaagagctgcaattcagggttactggtttctcctgcactaagcactgagccacactagaagagaaggcatgaggaagacaaaagtgagaaggtacgagagaaga

SEQ ID NO: 112514 - DNA, 269 bp, Homo sapiens
gctgatttgcaacatcttacctttccataaccctcctgactgagccacaaattgaagtctgcaaattcccctcccaaccactctgattactgtcctcagagaggtcaggtcagctctcctttctagtggaaaaccccttcttttggaggaataaacctaagtctttcctgggttccttggcccttaagaccatcggaaatttgtctgccctttgcttgcttctgcacagctactgttcccgaaagactcttgctgctaaccatgctcat

SEQ ID NO: 112515 - DNA, 180 bp, Homo sapiens
tcttgaactcctgagctcaagaaatcctcccacctcagcctcccaaagcgttgagattacatgtgcaagccactgtgccctgccatgtttcttaatatatgcacatatgtatatgtaacacataaataattacatacataatacaggaagacacagaaataattacatacatgatacagg

SEQ ID NO: 112516 - DNA, 262 bp, Homo sapiens
gttaagatagcaatactcccaaagttgatctatagtgtcaataaaatacctatcaaaattccaacagccttttttgcagaaataaacaagctgatcctaaaattcatatggatttgcaaggcaacacgaatagccgtaacaatctaaaaagaagtctaaagttggaggactcactcttttcaatttgaaaacttactataaaactacagtaatcaagactgtctgagccaggcacagtggtgttcacctgtaatcctagctc

SEQ ID NO: 112517 - DNA, 491 bp, Homo sapiens
tcctgactacagccccaaagccctacatgatcctgccccatttacagctccaggctcattacctacctcgtgctcccagcccacggatcatcgcctaccacatgctcccagcccccggatctccagcacatcagcctcttggctcttcttagaactccctgaattcactcctgtctcaaggactttcctgtgcttttccttagacaggagacacccctcccagttcacatggctcactcgcttcatccaggtctcttctccagtgtcccctccttgtgacccctggatctaaaggagttgaaccaccccactcctacccttatattctcatagctcctcacgctgcctcacttttagcaagatttcattaaaattttattgctgtctaaaattctattatatatttaaccatttacttgtttagtatctgtgtcttccattagcaagtaagttctggccaggcgtggtggctcacacctgtaatcccagca

SEQ ID NO: 112518 - DNA, 583 bp, Homo sapiens
atcactgctacttgcacaccctcctcccccagcaggaccttgtctgaggctgacttgatgtggactccactgtatccggcacagtccctcaggttctccttctttaacactctccttacctggttctgtgacgaggctcttctagcatcctctctgtcactcctcaggggtcctctcccacctcttccagactgctccttctccactcaggtctgaaatgctggtgccctccgggttctgcccttggctgttcttctcccgcacaccctgcatcatggggacccatccttgaactcccacctcttcactgatgaagcccaagtgtacatctcccacatacatctgtccccaaagcccagccccaggccccttgaattgactgtggtaggggatgctcttctgcctggacgtcttccacgcacaccccaaatgcaatagaaacatatcgagatgccacatctttccccaccgactctccctactgcccccgtccttccttcctctgcctccatcagtgaccccacctacctactcactcctctttgtccccatcctgtggaatttctgttctaaatatttttaa

SEQ ID NO: 112519 - DNA, 174 bp, Homo sapiens
ggagattaaggtcgcagtgagctatgatggcgccgctgcattccagtctgggcgacaaagcaatacctcatttcaagaaacgaaatggaattttttccttataagaatcttaaagaaggtgtacattatcttggctaactttctataggattaagtagaagttattgagacttg

SEQ ID NO: 112520 - DNA, 430 bp, Homo sapiens
ctcaaatataaaattttctttttaattctcagcaaggcaaagtacttctacagaaaggtgtgcccttacagatggagcaatgatggagtctcactttgtcagtcagactggagtgcagtagcacgatctcagctcacggcaacctctgcctctcgggttcaagagattctctcaagtagctggtattacagaggccctggacaatgtcaacatcaggagcctcatatgcgctggagaggccagtggacctgctccagcacctggtgctgcaccagtgggaggtcctgctccctccaccactgcagcccaagctgaagagagggaagtggaatcaaagaaagaagaatccgaggagtctgatgatgcatgggctttggtcttttttgacaaaatctcttttgtaacatgttcaataaaaaaccaaactctt

SEQ ID NO: 112521 - DNA, 248 bp, Homo sapiens
atcttgacagctgccatgtcttgagaacactcaagcagctctgtggagaagcccatgtgggaggaactgaggccttctgccaacagccagcatcaacttgtcagcagcattgtgagaccccaagccagaaccacccagctaagctgctcctgcattcctaacccacaaaaactagctgagcaattaatgttcacattgtgttaagctgtcaaatgttgggataatgcgttacacgacaatggataata

SEQ ID NO: 112522 - DNA, 442 bp, Homo sapiens
ttagcgtggtcacgcaatcacctcgacatcgagcagatattccaacccagatcctacacatcaaaatacatcatggcatttttcatccaaaatagccagaatgtgcacttccaaagcaaaggccctaatataaacaaatgctcatgtagacattgggtatgtatctgacagccaaatattggagctatgcagagcagctagaagagtggaccgcaggcagcatggcaagtccagaagacagctcacttaaaacatcatttttaaaatgtacattcttaaagccttaaagacaagactcaaatctgatccaggaataactgtagctgccatctctaatttaaaaagcaggtgataatctcattttccagccctcctgtcatgtgaaggttgtttatctttccatagagacataacctaccagtatccaggtttctgcaggggc

SEQ ID NO: 112523 - DNA, 349 bp, Homo sapiens
gagattgtgccactgcactccagcctgcgtgacagagtgagattctgtctttaaaaaaaaaaaaagaaaagaaaactatgacccagccaaatttgtccagctgcctgtttttaagaggctcatgagctcagaatggcttttatatttttaatgactggagggaaaaagtcaaaagaagaatgtttcatgacacatgaaaattacatgaaattcaaatgtcactgcccttaaataaagttttattgcaacacagcaatacctatttgcattatccctgccttctcattgaaatggcaacgttgagtaactgacagggactgtatggactacacagtgtaagatatttacc

SEQ ID NO: 112524 - DNA, 414 bp, Homo sapiens
gcccttgctgtggcccccagcttcacacaggtataacctgacagcaccctgccttggctgtaccatgtctttctagcattctgccttggggcgtctttgagacacctgcagaaacacgtacaaacctgaaagtacagggactcagtaccctggggcaacacttggccaagggagaggggaataatggatacatgcctacctcatctgtccttcagccacttcccaagcacattctatgtggctcctcagaggatccctgtgggattaagcccccactgcccacagcagtgaccagcttgataatgcaggcttgtgttggctcttcctccttccttgtttctctctttgtagccccttctcctgttgcctgggatcagtgcccaaaataagccacccgcacaccagcccttgcct

SEQ ID NO: 112525 - DNA, 214 bp, Homo sapiens
tttattcaattaacaaatatttattgagcacctactatattttaggcactgtgctaaaatcaattccaatggtcaacaaatatgtgaacaaatggtaatcattattgaaggaatgcaaatgtacaaaaagtgacttttccatttttcacctattcaatggtctatattcaaaataaatgattctccaggattggatgagcgtggctttgggatc

SEQ ID NO: 112526 - DNA, 348 bp, Homo sapiens
gtggtgggtgcccccctctctcaatggggggtgctgtttacagttaacaattgatcagaacaggtaaagggtaattaaaatgtattcgcccaacaaatgggcattccttttataataatgaaaaaaacctctctgttcgtaaagagttgtctgcatcataaataagaaaggtattcataattatatcccaaaactgaaaagacaacaagtgtctcccaaggtggattgtgaaatcaactcggtgcttcaacgtacttggaaagtcagcctggtttttgttttgttttgtttttgtttttgttttgagacggagtttagctcttgttgcccaggctgtagtgcagtctc

SEQ ID NO: 112527 - DNA, 355 bp, Homo sapiens
  misc_feature (271)..(271): n is a, c, g, or t
ctgtcatcataggcttgatcaactgtaatagacatgaaccaacatgacaccctggaggatgcatgtgatgttgaaatcatacccatgctctgttctcactcataagtgggagctgaacaatgagaacacatggacacggggaggggaacgtcacacaccggggcctgtcgggggttgggggcaaggggagggggagcattaggacaaatacctaatgtatgtggggcttaaaacctggatgacgggttgatgggtgcaacaaaccaccatngcacatgtatacctatgtaacaaacctgcacattctgcacattatcccagagcttaaggcataataaaaaaataataaaaaatc

SEQ ID NO: 112528 - DNA, 301 bp, Homo sapiens
tggaattacatagtggtgatggttgcacaacactgtgaatatactaaaaaaaatcaccgaattatgcactttaaagtgtgtattttaaaagataaattttgggccgggcactgtggttcatgcctgtaatcccagcactttgagaggccaaggtgggcagatcacttgaggtcgggagttggagaccagcctgaccaacatggagaaaccgcatctctacttaaaatacaaaattagctgggtatggtggcgcatgcctgtaatcccagctactcgggaagctgaggcaggagaatcgctt

SEQ ID NO: 112529 - DNA, 397 bp, Homo sapiens
taatatatctagtgtgtagaagtttcaatagcacctagttttagaagtttcaatagcagcatcatcagtattaaatacatagatatacatttgaaaaaagagggttaaaacctacacattgaaaattacaaaggtattatgtgatgctgaggtttggggtatgattgaccccatcacccaggtaatgatgatagtacccaataataggtaagttttcagcccttgcccccctccctctctaccccctcaaggagtcctcagtgtctgttgttcccatctttatgtccgtggcattacacaggatacctttgtaacaaacctgcacatgtatctccctgtttctacaataaaagttgaaaagaaaaaaagaaaattacaaaatatgccaaaagaaact

SEQ ID NO: 112530 - DNA, 392 bp, Homo sapiens
atctatgactgtctcaataaaaacttaaattaaaaacaccatttacaatagcagcatcatcagtattaaatacatagatatacatttgaaaaaagagggttaaaacctacacattgaaaattacaaaggtattatgtgatgctgaggtttggggtatgattgaccccatcacccaggtaatgatgatagtacccaataataggtaagttttcagcccttgcccccctccctctctaccccctcaaggagtcctcagtgtctgttgttcccatctttatgtccgtggcattacacaggatacctttgtaacaaacctgcacatgtatctccctgtttctacaataaaagttgaaaagaaaaaaagaaaattacaaaatatgccaaaagaaact

SEQ ID NO: 112531 - DNA, 1018 bp, Homo sapiens
cttgcagtgagccgagatggcgccactgcactccagcctgggcgacagagcgagactccgtctcagaaaaaactacaaccttgactatagtcccatattttagtccaaatactgtgattggcttctcttcctgttagacacaacctatgcaaaaccaaatgaatttgggttcggtatttctatcgtcattggctttggaaatcatttcacacttaatagaaaaattgtgagagttttacagaaaactcctctatagctttttcctagattgacaaacacacatacagatttatttacatatataagtttttttctgaaccatttgagtgtaggctatatatgttatgcttcttgatctcttaatacttcagtgtatatttcccatcaaaaaaggatattcttatgtaaccacttagaaatttaacattggcaaaatactgaaatctacagtgcatgtttcagttttattacttgtcccaataatgtactttatgttcctcctgtttagaatcttgaattgcatttaatttcatgtctctttgatctttaatctggagctttttcagcctttgtcttaattgacattaacagttctgaagaatacaaactagttactttatagaatattcctcaatttgggtttttcttatcattcggaagcctaacattagattcagttatatattcttaacttaaatacaccgtgaagtctccttttcaggaatcacagctagaggcacatgatatctgactgctcctctttgttaaggttagttttgactatgtagtcaagatgttgtccagcttctctgctgtgtagttactctctacccttgcaactaataagcaatctgtagggagatctttctagccagtacaaatagcctgctgatcattgaatcccacacccctggatgtagcatccactgatgattcttgcctgaatcgaacttgactaaaatgattacaaaatcatagcacctctacaggttgcagtatcctccctcaactctaccac

SEQ ID NO: 112532 - DNA, 931 bp, Homo sapiens
actagcatgtgtaagtagtgatttatgttaaggctgattgttatttctcaatcattagacatgtttcctttgttgactgtcctggccacgatattttgatggctactatgctgaacggtgcagcagtgatggatgcagctcttctgttgataggtaaatacctcacaattggtttggacaaatcaatgtggaacaaatccaagatgaaatatttaaaggggaactaaggcctttaaggatcatatctattacctaagggtgacatgaatgggaactaacatgtcatccaggatgactttcctacctatcagctatcacaaaatactcaaaaagatagacttggggctgatagcttgcgagaattcttgtggtagcatttgagaaaaagaaaaaaagtcaatagttcatttttctcatttaaatcacatgaggtgatttatttagttttaaatgtatgtgtaaaactatttgtgttatggttgtgtgtgtgtatgtctgaactgtctactgtggaagtatttaagatacaaatattcataatacgtgctgaagtgtaggaataagtggagtttgaagggtagcgtatgcttgtttcttatgttagctgttgagagatttcattactagggggtaaaattttttaaaagctgctggtgcggtggctcacgcctgtaatcctagcactttgggaggctgaggtcggcggatcacctgaggtcaggagtttgagaccagcctgaccaacatggagaaacccctctctactaaaaatacaaaattagccgggtgtggtggcgcatgcttgtaatcccatctactcaggagaatctcttgaaccgggaggcagaggtggcagtgagccaagattgcgccattgcactccagtctgggtaacaagagtaaaactacatctcaaaaaaaaaaaaaaaaa

SEQ ID NO: 112533 - DNA, 558 bp, Homo sapiens
taaagaggcaaagaaagcagcaaaggttcaaaagctgtctaagaatgaagtgctcatggtgaacataggatccctgtcaacaggagggagagttagtgctgtcaaggccgatttgggtaaaattgttttgaccaatccagtgtgcacagaggtaggagaaaaaattgcccttagccgaagagttgaaaaacactggcggtaagtttgttagtctttgccactgtctaattaaaaaaagacacagtcttgtacagaaaaaaaagcacacaatcttccttgaggacaacagttactgtggctttcagtctcaactatttatttggatgactttgaaaactatacttcggccgggtgcggtggctcacgcctgtaatcccagcactttgggaggcctaggcgggtggatcatgaggtcaggagatcaagaccatcctggctaacatggtgaaaccccgtctctactaaaaaatacaaaaaattagccgggcgtggtggcgggcgcctgtagtcccagctactcgggaggctgaggcaggagaatggcgtgaacctgggagt

SEQ ID NO: 112534 - DNA, 428 bp, Homo sapiens
tactactactactaaattcgggccgcgtcgactgattttaattgttctgatttaattggcttggagtagaattcaggcattgatatctttaaaaactccccagtgttgagaaacaaatttagagagttgagaagtaggtatattaaattacagaatcttactgagttttggtagactgataatacaatttgctttgcttttcttaaatttgcattgagatgggatttgaagcatattgtgctcttgtgaatgttgaagttgcattgtagaagtttagaagctctggctatgggttgcctaaattgatgttttgaggaagcatattaatgttataaacttcgctgactttgaaggttgtgttgtagcatgaggaacacaaataaaacaattctaaatcaaacaaaaaaaaagtcgacgcggccgcgaat

SEQ ID NO: 112535 - DNA, 312 bp, Homo sapiens
cttgcagtgagccgagatggcgccactgcactccagcctgggcgacagagcgagactccgtctcagaaaaaactacaaccttgactatagtcccatattttagtccaaatactgtgattggcttctcttcctgttagacacaacctatgcaaaaccaaatgaatttgggttcggtatttctatcgtcattggctttggaaatcatttcacacttaatagaaaaattgtgagagttttacagaaaactcctctatagctttttcctagattgacaaacacacatacagccccatgccgcaaagcctgtagatc

SEQ ID NO: 112536 - DNA, 343 bp, Homo sapiens
ttggctgcggctgatctagaggatcccgtgtgtcgagataagcagggaatcacagctagaggcacatgatatctgactgctcctctttgttaaggttagttttgactatgtagtcaagatgttgtccagcttctctgctgtgtagttactctctacccttgcaactaataagcaatctgtagggagatctttctagccagtacaaatagcctgctgatcattgaatcccacacccctggatgtagcatccactgatgattcttgcctgaatcgaacttgactaaaatgattacaaaatcatagcacctctacaggttgcagtatcctccctcaactctaccac

SEQ ID NO: 112537 - DNA, 3689 bp, Homo sapiens
agtattgcctgcacaaatatctaccaggtctgcgacgaatagctccagcaacttcgcaccgtgttttccactcagcctaccgacaggcactgtgcagattcaagcggagagatgtccaagcagtgaggccgctgctgcaccggccatcctgagcccctactcggccttcccgtctccgcttccccgccccgcactaggacccctgcagatgatcaggcggcagccggggtgatttccttcctcttttggcaacatggcgggcggagaagctggagtgactctagggcagccgcatctttcgcgtcaggatctcaccaccttggatgttaccaagttgacgccactttcacacgaagttatcagcagacaagccacaattaacataggtacaattggtcatgtagctcatgggaaatccacagtcgtcaaagctatttctggagttcatactgtcaggttcaaaaatgaactagaaagaaatattacaatcaagcttggatatgctaatgctaagatttataagcttgatgacccaagttgccctcggccagaatgttatagatcttgtgggagcagtacacctgacgagtttcctacggacattccagggaccaaagggaacttcaaattagtcagacatgtttcctttgttgactgtcctggccacgatattttgatggctactatgctgaacggtgcagcagtgatggatgcagctcttctgttgatagctggtaatgaatcttgccctcagcctcagacatcggaacacctggctgctatagagatcatgaaactgaagcatattttgattctacaaaataaaattgatttggtaaaagaaagtcaggctaaagaacaatacgagcagatccttgcatttgtccaaggtacagtagcagagggagctcccattattccaatttcagctcagctgaaatacaatattgaagttgtttgtgagtacatagtaaagaaaattccagtacccccaagagactttacttcagagccccggcttattgttattagatcttttgatgtcaacaaacctggctgtgaagttgatgaccttaagggaggtgtagctggtggtagtatcctaaaaggagtattaaaggtgggccaggagatagaagtaagacctggtattgtttccaaagatagtgaaggaaaactcatgtgtaaaccaatcttttccaaaattgtatcactttttgcggagcataatgatctgcaatatgctgctccaggcggtcttattggagttggaacaaaaattgaccccactttgtgccgggctgacagaatggtggggcaagtacttggtgcagtcggagctttacctgagatattcacagaattggaaatttcctatttcctgcttagacggcttctaggtgtacgcactgaaggagacaagaaagcagcaaaggttcaaaagctgtctaagaatgaagtgctcatggtgaacataggatccctgtcaacaggagggagagttagtgctgtcaaggccgatttgggtaaaattgttttgaccaatccagtgtgcacagaggtaggagaaaaaattgcccttagccgaagagttgaaaaacactggcgtttaattggttggggtcagataagaagaggagtgacaatcaagccaacagtagatgatgactgaagaataccagttaaataatacattcggatggatttggaagttggaattcctcttaacaaccaaggggtttattttcaaagcaatattggggaattgatttcacagttcgttaccttagtaggtaacggtaaggttattcttttttttttttttttttggttatgaaaacttagggactaaaattaatataaaaattggcataatgttggattgaatctacattttggcagaagttaaacattcccacataatgtcaaaattatacatcatgcagttctgtttttttgtttgttttattttgttttgtttttgagtctggctctgtcacccaggctggagtgcagtggcgtgatctgcaacctctgccccccgggttcaagcgattctcctgcctcagcctcccgagtagctgagattacaggtgcgcgccaccacacttggctaatttttgtattattagtagagacggggtttcagcatgttggctaggccggtctctcctgacctcagggtgatcagcccacctcggcctcacaaagtgctgggattacaggcgtgagccaccttgcccagcccacatcatacagtttgaaatgaaactttgccacaaccagcctttgctgtagcacacacatatatcactgaacctgtttgaaataaagttttttttctttttcatgattcgtctttgagtacctccaggctgaaagactgttgtaccagtaaaaacttaaaggcacaaattctccttgaagaccttctcccttttatgtggccccatattttatgttgctttatctttgaaattttgcatgaaaaggaaatgaatggattcgaatgaaattgtcctttagagcatgattacttgttcccatggacaaatatttttctccccttgctcttcctggcctgaaacacgggaaaccagagtcaaaagttatctccctctccctgtgatgccttgagatttttttctgcgttgtttaatgcctgaaatccaagtcttcctccatgggaaaatactgttataccaaataattctagatgagtaacaaagatctttttaggccttcattttatgttttttcttaactgttatattatgattgtgacatagattatactactactaatttttggatgtttcaaaaggtcaagaagtaaaagatgttagaaagcaatgagtgagtccttttgatttttaacttattccccatgtccctatacttcgtgtgcttttcctttttttttttgagacggaggctcactccgtcacctaggctagagtacagtggcacgatcttggctcgctgcaacctctgcctccctgattcaagtgattctcgtgcttcagcctcccatgtagctgatattacaggcacttgccaccatacccggctaattttggtatttttagtagagatggggtttcaccatgttgcccaggctggtcttgaactcctaacctcaggtgatccgcccgcctctgccttccaaagtgctgggattacaggcgtgagccactctgcccggcttatttttctttatgtttttgcttcgtaagaggttctgttgagcagtgatttgcaactcttgctgacgttgctggggaagctttaaaaaaaaaaaagatgccccacagagattctgattttaattgttctgatttaattggcttggagtagaattcaggcattgatatctttaaaaactccccagtgttgagaaacaaatttagagagttgagaagtaggtatattaaattacagaatcttactgagttttggtagactgataatacaatttgctttgcttttcttaaatttgcattgagatgggatttgaagcatattgtgctcttgtgaatgttgaagttgcattgtagaagtttagaagctctggctatgggttgcctaaattgatgttttgaggaagcatattaatgttataaacttcgctgactttgaaggttgtgttgtagcatgaggaacacaaataaaacaattctaaatcaaac

SEQ ID NO: 112538 - DNA, 2853 bp, Homo sapiens
agtattgcctgcacaaatatctaccaggtctgcgacgaatagctccagcaacttcgcaccgtgttttccactcagcctaccgacaggcactgtgcagattcaagcggagagatgtccaagcagtgaggccgctgctgcaccggccatcctgagcccctactcggccttcccgtctccgcttccccgccccgcactaggacccctgcagatgatcaggcggcagccggggtgatttccttcctcttttggcaacatggcgggcggagaagctggagtgactctagggcagccgcatctttcgcgtcaggatctcaccaccttggatgttaccaagttgacgccactttcacacgaagttatcagcagacaagccacaattaacataggtacaattggtcatgtagctcatgggaaatccacagtcgtcaaagctatttctggagttcatactgtcaggttcaaaaatgaactagaaagaaatattacaatcaagcttggatatgctaatgctaagatttataagcttgatgacccaagttgccctcggccagaatgttatagatcttgtgggagcagtacacctgacgagtttcctacggacattccagggaccaaagggaacttcaaattagtcagacatgtttcctttgttgactgtcctggccacgatattttgatggctactatgctgaacggtgcagcagtgatggatgcagctcttctgttgatagctggtaatgaatcttgccctcagcctcagacatcggaacacctggctgctatagagatcatgaaactgaagcatattttgattctacaaaataaaattgatttggtaaaagaaagtcaggctaaagaacaatacgagcagatccttgcatttgtccaaggtacagtagcagagggagctcccattattccaatttcagctcagctgaaatacaatattgaagttgtttgtgagtacatagtaaagaaaattccagtacccccaagagactttacttcagagccccggcttattgttattagatcttttgatgtcaacaaacctggctgtgaagttgatgaccttaagggaggtgtagctggtggtagtatcctaaaaggagtattaaaggtgggccaggagatagaagtaagacctggtattgtttccaaagatagtgaaggaaaactcatgtgtaaaccaatcttttccaaaattgtatcactttttgcggagcataatgatctgcaatatgctgctccaggcggtcttattggagttggaacaaaaattgaccccactttgtgccgggctgacagaatggtggggcaagtacttggtgcagtcggagctttacctgagatattcacagaattggaaatttcctatttcctgcttagacggcttctaggtgtacgcactgaaggagacaagaaagcagcaaaggttcaaaagctgtctaagaatgaagtgctcatggtgaacataggatccctgtcaacaggagggagagttagtgctgtcaaggccgatttgggtaaaattgttttgaccaatccagtgtgcacagaggtaggagaaaaaattgcccttagccgaagagttgaaaaacactggcgtttaattggttggggtcagataagaagaggagtgacaatcaagccaacagtagatgatgactgaagaataccagttaaataatacattcggatggatttggaagttggaattcctcttaacaaccaaggggtttattttcaaagcaatattggggaattgatttcacagttcgttaccttagtaggtaacggtaaggttattcttttttttttttttttttggttatgaaaacttagggactaaaattaatataaaaattggcataatgttggattgaatctacattttggcagaagttaaacattcccacataatgtcaaaattatacatcatgcagttctgtttttttgtttgttttattttgttttgtttttgagtctggctctgtcacccaggctggagtgcagtggcgtgatctgcaacctctgccccccgggttcaagcgattctcctgcctcagcctcccgagtagctgagattacaggtgcgcgccaccacacttggctaatttttgtattattagtagagacggggtttcagcatgttggctaggccggtctctcctgacctcagggtgatcagcccacctcggcctcacaaagtgctgggattacaggcgtgagccaccttgcccagcccacatcatacagtttgaaatgaaactttgccacaaccagcctttgctgtagcacacacatatatcactgaacctgtttgaaataaagttttttttctttttcatgattcgtctttgagtacctccaggctgaaagactgttgtaccagtaaaaacttaaaggcacaaattctccttgaagaccttctcccttttatgtggccccatattttatgttgctttatctttgaaattttgcatgaaaaggaaatgaatggattcgaatgaaattgtcctttagagcatgattacttgttcccatggacaaatatttttctccccttgctcttcctggcctgaaacacgggaaaccagagtcaaaagttatctccctctccctgtgatgccttgagatttttttctgcgttgtttaatgcctgaaatccaagtcttcctccatgggaaaatactgttataccaaataattctagatgagtaacaaagatctttttaggccttcattttatgttttttcttaactgttatattatgattgtgacatagattatactactactaatttttggatgtttcaaaaggtcaagaagtaaaagatgttagaaagcaa

SEQ ID NO: 112539 - DNA, 3878 bp, Homo sapiens
agtattgcctgcacaaatatctaccaggtctgcgacgaatagctccagcaacttcgcaccgtgttttccactcagcctaccgacaggcactgtgcagattcaagcggagagatgtccaagcagtgaggccgctgctgcaccggccatcctgagcccctactcggccttcccgtctccgcttccccgccccgcactaggacccctgcagatgatcaggcggcagccggggtgatttccttcctcttttggcaacatggcgggcggagaagctggagtgactctagggcagccgcatctttcgcgtcaggatctcaccaccttggatgttaccaagttgacgccactttcacacgaagttatcagcagacaagccacaattaacataggtacaattggtcatgtagctcatgggaaatccacagtcgtcaaagctatttctggagttcatactgtcaggttcaaaaatgaactagaaagaaatattacaatcaagcttggatatgctaatgctaagatttataagcttgatgacccaagttgccctcggccagaatgttatagatcttgtgggagcagtacacctgacgagtttcctacggacattccagggaccaaagggaacttcaaattagtcagacatgtttcctttgttgactgtcctggccacgatattttgatggctactatgctgaacggtgcagcagtgatggatgcagctcttctgttgatagctggtaatgaatcttgccctcagcctcagacatcggaacacctggctgctatagagatcatgaaactgaagcatattttgattctacaaaataaaattgatttggtaaaagaaagtcaggctaaagaacaatacgagcagatccttgcatttgtccaaggtacagtagcagagggagctcccattattccaatttcagctcagctgaaatacaatattgaagttgtttgtgagtacatagtaaagaaaattccagtacccccaagagactttacttcagagccccggcttattgttattagatcttttgatgtcaacaaacctggctgtgaagttgatgaccttaagggaggtgtagctggtggtagtatcctaaaaggagtattaaaggtgggccaggagatagaagtaagacctggtattgtttccaaagatagtgaaggaaaactcatgtgtaaaccaatcttttccaaaattgtatcactttttgcggagcataatgatctgcaatatgctgctccaggcggtcttattggagttggaacaaaaattgaccccactttgtgccgggctgacagaatggtggggcaagtacttggtgcagtcggagctttacctgagatattcacagaattggaaatttcctatttcctgcttagacggcttctaggtgtacgcactgaaggagacaagaaagcagcaaaggttcaaaagctgtctaagaatgaagtgctcatggtgaacataggatccctgtcaacaggagggagagttagtgctgtcaaggccgatttgggtaaaattgttttgaccaatccagtgtgcacagaggtaggagaaaaaattgcccttagccgaagagttgaaaaacactggcgtttaattggttggggtcagataagaagaggagtgacaatcaagccaacagtagatgatgactgaagaataccagttaaataatacattcggatggatttggaagttggaattcctcttaacaaccaaggggtttattttcaaagcaatattggggaattgatttcacagttcgttaccttagtaggtaacggtaaggttattcttttttttttttttttttggttatgaaaacttagggactaaaattaatataaaaattggcataatgttggattgaatctacattttggcagaagttaaacattcccacataatgtcaaaattatacatcatgcagttctgtttttttgtttgttttattttgttttgtttttgagtctggctctgtcacccaggctggagtgcagtggcgtgatctgcaacctctgccccccgggttcaagcgattctcctgcctcagcctcccgagtagctgagattacaggtgcgcgccaccacacttggctaatttttgtattattagtagagacggggtttcagcatgttggctaggccggtctctcctgacctcagggtgatcagcccacctcggcctcacaaagtgctgggattacaggcgtgagccaccttgcccagcccacatcatacagtttgaaatgaaactttgccacaaccagcctttgctgtagcacacacatatatcactgaacctgtttgaaataaagttttttttctttttcatgattcgtctttgagtacctccaggctgaaagactgttgtaccagtaaaaacttaaaggcacaaattctccttgaagaccttctcccttttatgtggccccatattttatgttgctttatctttgaaattttgcatgaaaaggaaatgaatggattcgaatgaaattgtcctttagagcatgattacttgttcccatggacaaatatttttctccccttgctcttcctggcctgaaacacgggaaaccagagtcaaaagttatctccctctccctgtgatgccttgagatttttttctgcgttgtttaatgcctgaaatccaagtcttcctccatgggaaaatactgttataccaaataattctagatgagtaacaaagatctttttaggccttcattttatgttttttcttaactgttatattatgattgtgacatagattatactactactaatttttggatgtttcaaaaggtcaagaagtaaaagatgttagaaagcaatgagtgagtccttttgatttttaacttattccccatgtccctatacttcgtgtgcttttcctttttttttttgagacggaggctcactccgtcacctaggctagagtacagtggcacgatcttggctcgctgcaacctctgcctccctgattcaagtgattctcgtgcttcagcctcccatgtagctgatattacaggcacttgccaccatacccggctaattttggtatttttagtagagatggggtttcaccatgttgcccaggctggtcttgaactcctaacctcaggtgatccgcccgcctctgccttccaaagtgctgggattacaggcgtgagccactctgcccggcttatttttctttatgtttttgcttcgtaagaggttctgttgagcagtgatttgcaactcttgctgacgttgctggggaagctttaaaaaaaaaaaagatgccccacagagattctgattttaattgttctgatttaattggcttggagtagaattcaggcattgatatctttaaaaactccccagtgttgagaaacaaatttagagagttgagaagtaggtatattaaattacagaatcttactgagttttggtagactgataatacaatttgctttgcttttcttaaatttgcattgagatgggatttgaagcatattgtgctcttgtgaatgttgaagttgcattgtagaagtttagaagctctggctatgggttgcctaaattgatgttttgaggaagcatattaatgttataaacttcgctgactttgaaggttgtgttgtagcatgaggaacacaaataaaacaattctaaatcaaactaattttatatctaacatgtccccatgtgttttgtaggtaccttctaccagaaattttggaataagacttaaaatatagacattgtaattaatctcatgtaagatttgaaaccagaattctattataattaatttcagacatccacatgaattagcaaatttgtaaagcactgtactgagtgtaatggg

SEQ ID NO: 112540 - DNA, 3944 bp, Homo sapiens
  misc_feature (3744)..(3744): n is a, c, g, or t
  misc_feature (3750)..(3750): n is a, c, g, or t
  misc_feature (3753)..(3753): n is a, c, g, or t
agtattgcctgcacaaatatctaccaggtctgcgacgaatagctccagcaacttcgcaccgtgttttccactcagcctaccgacaggcactgtgcagattcaagcggagagatgtccaagcagtgaggccgctgctgcaccggccatcctgagcccctactcggccttcccgtctccgcttccccgccccgcactaggacccctgcagatgatcaggcggcagccggggtgatttccttcctcttttggcaacatggcgggcggagaagctggagtgactctagggcagccgcatctttcgcgtcaggatctcaccaccttggatgttaccaagttgacgccactttcacacgaagttatcagcagacaagccacaattaacataggtacaattggtcatgtagctcatgggaaatccacagtcgtcaaagctatttctggagttcatactgtcaggttcaaaaatgaactagaaagaaatattacaatcaagcttggatatgctaatgctaagatttataagcttgatgacccaagttgccctcggccagaatgttatagatcttgtgggagcagtacacctgacgagtttcctacggacattccagggaccaaagggaacttcaaattagtcagacatgtttcctttgttgactgtcctggccacgatattttgatggctactatgctgaacggtgcagcagtgatggatgcagctcttctgttgatagctggtaatgaatcttgccctcagcctcagacatcggaacacctggctgctatagagatcatgaaactgaagcatattttgattctacaaaataaaattgatttggtaaaagaaagtcaggctaaagaacaatacgagcagatccttgcatttgtccaaggtacagtagcagagggagctcccattattccaatttcagctcagctgaaatacaatattgaagttgtttgtgagtacatagtaaagaaaattccagtacccccaagagactttacttcagagccccggcttattgttattagatcttttgatgtcaacaaacctggctgtgaagttgatgaccttaagggaggtgtagctggtggtagtatcctaaaaggagtattaaaggtgggccaggagatagaagtaagacctggtattgtttccaaagatagtgaaggaaaactcatgtgtaaaccaatcttttccaaaattgtatcactttttgcggagcataatgatctgcaatatgctgctccaggcggtcttattggagttggaacaaaaattgaccccactttgtgccgggctgacagaatggtggggcaagtacttggtgcagtcggagctttacctgagatattcacagaattggaaatttcctatttcctgcttagacggcttctaggtgtacgcactgaaggagacaagaaagcagcaaaggttcaaaagctgtctaagaatgaagtgctcatggtgaacataggatccctgtcaacaggagggagagttagtgctgtcaaggccgatttgggtaaaattgttttgaccaatccagtgtgcacagaggtaggagaaaaaattgcccttagccgaagagttgaaaaacactggcgtttaattggttggggtcagataagaagaggagtgacaatcaagccaacagtagatgatgactgaagaataccagttaaataatacattcggatggatttggaagttggaattcctcttaacaaccaaggggtttattttcaaagcaatattggggaattgatttcacagttcgttaccttagtaggtaacggtaaggttattcttttttttttttttttttggttatgaaaacttagggactaaaattaatataaaaattggcataatgttggattgaatctacattttggcagaagttaaacattcccacataatgtcaaaattatacatcatgcagttctgtttttttgtttgttttattttgttttgtttttgagtctggctctgtcacccaggctggagtgcagtggcgtgatctgcaacctctgccccccgggttcaagcgattctcctgcctcagcctcccgagtagctgagattacaggtgcgcgccaccacacttggctaatttttgtattattagtagagacggggtttcagcatgttggctaggccggtctctcctgacctcagggtgatcagcccacctcggcctcacaaagtgctgggattacaggcgtgagccaccttgcccagcccacatcatacagtttgaaatgaaactttgccacaaccagcctttgctgtagcacacacatatatcactgaacctgtttgaaataaagttttttttctttttcatgattcgtctttgagtacctccaggctgaaagactgttgtaccagtaaaaacttaaaggcacaaattctccttgaagaccttctcccttttatgtggccccatattttatgttgctttatctttgaaattttgcatgaaaaggaaatgaatggattcgaatgaaattgtcctttagagcatgattacttgttcccatggacaaatatttttctccccttgctcttcctggcctgaaacacgggaaaccagagtcaaaagttatctccctctccctgtgatgccttgagatttttttctgcgttgtttaatgcctgaaatccaagtcttcctccatgggaaaatactgttataccaaataattctagatgagtaacaaagatctttttaggccttcattttatgttttttcttaactgttatattatgattgtgacatagattatactactactaatttttggatgtttcaaaaggtcaagaagtaaaagatgttagaaagcaatgagtgagtccttttgatttttaacttattccccatgtccctatacttcgtgtgcttttcctttttttttttgagacggaggctcactccgtcacctaggctagagtacagtggcacgatcttggctcgctgcaacctctgcctccctgattcaagtgattctcgtgcttcagcctcccatgtagctgatattacaggcacttgccaccatacccggctaattttggtatttttagtagagatggggtttcaccatgttgcccaggctggtcttgaactcctaacctcaggtgatccgcccgcctctgccttccaaagtgctgggattacaggcgtgagccactctgcccggcttatttttctttatgtttttgcttcgtaagaggttctgttgagcagtgatttgcaactcttgctgacgttgctggggaagctttaaaaaaaaaaaagatgccccacagagattctgattttaattgttctgatttaattggcttggagtagaattcaggcattgatatctttaaaaactccccagtgttgagaaacaaatttagagagttgagaagtaggtatattaaattacagaatcttactgagttttggtagactgataatacaatttgctttgcttttcttaaatttgcattgagatgggatttgaagcatattgtgctcttgtgaatgttgaagttgcattgtagaagtttagaagctctggctatgggttgcctaaattgatgttttgaggaagcatattaatgttataaacttcgctgactttgaaggttgtgttgtagcatgaggaacacaaataaaacaattctaaatcaaacaaaaaaaaaaaaaaaaaaaaaaaaaaaaaaaaaaaaaaaaaaggggaggagaganaaaaanatnaccagaaggggcccaaagagaaagcaaccacagttagtgaaaaacagggggccacttaagacgagggcacaaataagaacaaagagagaaggacaggagaaaaaaaaagtgaacgcgcgaaaaacggaaaccagtaagaactgggaaagagcacacaacaaggggggagacacataagggcacaaatacag

SEQ ID NO: 112541 - DNA, 3980 bp, Homo sapiens
  misc_feature (3780)..(3780): n is a, c, g, or t
  misc_feature (3786)..(3786): n is a, c, g, or t
  misc_feature (3789)..(3789): n is a, c, g, or t
agtattgcctgcacaaatatctaccaggtctgcgacgaatagctccagcaacttcgcaccgtgttttccactcagcctaccgacaggcactgtgcagattcaagcggagagatgtccaagcagtgaggccgctgctgcaccggccatcctgagcccctactcggccttcccgtctccgcttccccgccccgcactaggacccctgcagatgatcaggcggcagccggggtgatttccttcctcttttggcaacatggcgggcggagaagctggagtgactctagggcagccgcatctttcgcgtcaggatctcaccaccttggatgttaccaagttgacgccactttcacacgaagttatcagcagacaagccacaattaacataggtacaattggtcatgtagctcatgggaaatccacagtcgtcaaagctatttctggagttcatactgtcaggttcaaaaatgaactagaaagaaatattacaatcaagcttggatatgctaatgctaagatttataagcttgatgacccaagttgccctcggccagaatgttatagatcttgtgggagcagtacacctgacgagtttcctacggacattccagggaccaaagggaacttcaaattagtcagacatgtttcctttgttgactgtcctggccacgatattttgatggctactatgctgaacggtgcagcagtgatggatgcagctcttctgttgatagctggtaatgaatcttgccctcagcctcagacatcggaacacctggctgctatagagatcatgaaactgaagcatattttgattctacaaaataaaattgatttggtaaaagaaagtcaggctaaagaacaatacgagcagatccttgcatttgtccaaggtacagtagcagagggagctcccattattccaatttcagctcagctgaaatacaatattgaagttgtttgtgagtacatagtaaagaaaattccagtacccccaagagactttacttcagagccccggcttattgttattagatcttttgatgtcaacaaacctggctgtgaagttgatgaccttaagggaggtgtagctggtggtagtatcctaaaaggagtattaaaggtgggccaggagatagaagtaagacctggtattgtttccaaagatagtgaaggaaaactcatgtgtaaaccaatcttttccaaaattgtatcactttttgcggagcataatgatctgcaatatgctgctccaggcggtcttattggagttggaacaaaaattgaccccactttgtgccgggctgacagaatggtggggcaagtacttggtgcagtcggagctttacctgagatattcacagaattggaaatttcctatttcctgcttagacggcttctaggtgtacgcactgaaggagacaagaaagcagcaaaggttcaaaagctgtctaagaatgaagtgctcatggtgaacataggatccctgtcaacaggagggagagttagtgctgtcaaggccgatttgggtaaaattgttttgaccaatccagtgtgcacagaggtaggagaaaaaattgcccttagccgaagagttgaaaaacactggcgtttaattggttggggtcagataagaagaggagtgacaatcaagccaacagtagatgatgactgaagaataccagttaaataatacattcggatggatttggaagttggaattcctcttaacaaccaaggggtttattttcaaagcaatattggggaattgatttcacagttcgttaccttagtaggtaacggtaaggttattcttttttttttttttttttggttatgaaaacttagggactaaaattaatataaaaattggcataatgttggattgaatctacattttggcagaagttaaacattcccacataatgtcaaaattatacatcatgcagttctgtttttttgtttgttttattttgttttgtttttgagtctggctctgtcacccaggctggagtgcagtggcgtgatctgcaacctctgccccccgggttcaagcgattctcctgcctcagcctcccgagtagctgagattacaggtgcgcgccaccacacttggctaatttttgtattattagtagagacggggtttcagcatgttggctaggccggtctctcctgacctcagggtgatcagcccacctcggcctcacaaagtgctgggattacaggcgtgagccaccttgcccagcccacatcatacagtttgaaatgaaactttgccacaaccagcctttgctgtagcacacacatatatcactgaacctgtttgaaataaagttttttttctttttcatgattcgtctttgagtacctccaggctgaaagactgttgtaccagtaaaaacttaaaggcacaaattctccttgaagaccttctcccttttatgtggccccatattttatgttgctttatctttgaaattttgcatgaaaaggaaatgaatggattcgaatgaaattgtcctttagagcatgattacttgttcccatggacaaatatttttctccccttgctcttcctggcctgaaacacgggaaaccagagtcaaaagttatctccctctccctgtgatgccttgagatttttttctgcgttgtttaatgcctgaaatccaagtcttcctccatgggaaaatactgttataccaaataattctagatgagtaacaaagatctttttaggccttcattttatgttttttcttaactgttatattatgattgtgacatagattatactactactaatttttggatgtttcaaaaggtcaagaagtaaaagatgttagaaagcaatgagtgagtccttttgatttttaacttattccccatgtccctatacttcgtgtgcttttcctttttttttttgagacggaggctcactccgtcacctaggctagagtacagtggcacgatcttggctcgctgcaacctctgcctccctgattcaagtgattctcgtgcttcagcctcccatgtagctgatattacaggcacttgccaccatacccggctaattttggtatttttagtagagatggggtttcaccatgttgcccaggctggtcttgaactcctaacctcaggtgatccgcccgcctctgccttccaaagtgctgggattacaggcgtgagccactctgcccggcttatttttctttatgtttttgcttcgtaagaggttctgttgagcagtgatttgcaactcttgctgacgttgctggggaagctttaaaaaaaaaaaagatgccccacagagattctgattttaattgttctgatttaattggcttggagtagaattcaggcattgatatctttaaaaactccccagtgttgagaaacaaatttagagagttgagaagtaggtatattaaattacagaatcttactgagttttggtagactgataatacaatttgctttgcttttcttaaatttgcattgagatgggatttgaagcatattgtgctcttgtgaatgttgaagttgcattgtagaagtttagaagctctggctatgggttgcctaaattgatgttttgaggaagcatattaatgttataaacttcgctgactttgaaggttgtgttgtagcatgaggaacacaaataaaacaattctaaatcaaacaaaaaaaaaaaaaaaaaaaaaaaaaaaaaaaaaaaaaaaaaaaaaaaaaaaaaaaaaaaaaaaaaaaaaaaaaaaaaaggggaggagaganaaaaanatnaccagaaggggcccaaagagaaagcaaccacagttagtgaaaaacagggggccacttaagacgagggcacaaataagaacaaagagagaaggacaggagaaaaaaaaagtgaacgcgcgaaaaacggaaaccagtaagaactgggaaagagcacacaacaaggggggagacacataagggcacaaatacag

SEQ ID NO: 112542 - DNA, 3375 bp, Homo sapiens
agtattgcctgcacaaatatctaccaggtctgcgacgaatagctccagcaacttcgcaccgtgttttccactcagcctaccgacaggcactgtgcagattcaagcggagagatgtccaagcagtgaggccgctgctgcaccggccatcctgagcccctactcggccttcccgtctccgcttccccgccccgcactaggacccctgcagatgatcaggcggcagccggggtgatttccttcctcttttggcaacatggcgggcggagaagctggagtgactctagggcagccgcatctttcgcgtcaggatctcaccaccttggatgttaccaagttgacgccactttcacacgaagttatcagcagacaagccacaattaacataggtacaattggtcatgtagctcatgggaaatccacagtcgtcaaagctatttctggagttcatactgtcaggttcaaaaatgaactagaaagaaatattacaatcaagcttggatatgctaatgctaagatttataagcttgatgacccaagttgccctcggccagaatgttatagatcttgtgggagcagtacacctgacgagtttcctacggacattccagggaccaaagggaacttcaaattagtcagacatgtttcctttgttgactgtcctggccacgatattttgatggctactatgctgaacggtgcagcagtgatggatgcagctcttctgttgatagctggtaatgaatcttgccctcagcctcagacatcggaacacctggctgctatagagatcatgaaactgaagcatattttgattctacaaaataaaattgatttggtaaaagaaagtcaggctaaagaacaatacgagcagatccttgcatttgtccaaggtacagtagcagagggagctcccattattccaatttcagctcagctgaaatacaatattgaagttgtttgtgagtacatagtaaagaaaattccagtacccccaagagactttacttcagagccccggcttattgttattagatcttttgatgtcaacaaacctggctgtgaagttgatgaccttaagggaggtgtagctggtggtagtatcctaaaaggagtattaaaggtgggccaggagatagaagtaagacctggtattgtttccaaagatagtgaaggaaaactcatgtgtaaaccaatcttttccaaaattgtatcactttttgcggagcataatgatctgcaatatgctgctccaggcggtcttattggagttggaacaaaaattgaccccactttgtgccgggctgacagaatggtggggcaagtacttggtgcagtcggagctttacctgagatattcacagaattggaaatttcctatttcctgcttagacggcttctaggtgtacgcactgaaggagacaagaaagcagcaaaggttcaaaagctgtctaagaatgaagtgctcatggtgaacataggatccctgtcaacaggagggagagttagtgctgtcaaggccgatttgggtaaaattgttttgaccaatccagtgtgcacagaggtaggagaaaaaattgcccttagccgaagagttgaaaaacactggcgtttaattggttggggtcagataagaagaggagtgacaatcaagccaacagtagatgatgactgaagaataccagttaaataatacattcggatggatttggaagttggaattcctcttaacaaccaaggggtttattttcaaagcaatattggggaattgatttcacagttcgttaccttagtaggtaacggtaaggttattcttttttttttttttttttggttatgaaaacttagggactaaaattaatataaaaattggcataatgttggattgaatctacattttggcagaagttaaacattcccacataatgtcaaaattatacatcatgcagttctgtttttttgtttgttttattttgttttgtttttgagtctggctctgtcacccaggctggagtgcagtggcgtgatctgcaacctctgccccccgggttcaagcgattctcctgcctcagcctcccgagtagctgagattacaggtgcgcgccaccacacttggctaatttttgtattattagtagagacggggtttcagcatgttggctaggccggtctctcctgacctcagggtgatcagcccacctcggcctcacaaagtgctgggattacaggcgtgagccaccttgcccagcccacatcatacagtttgaaatgaaactttgccacaaccagcctttgctgtagcacacacatatatcactgaacctgtttgaaataaagttttttttctttttcatgattcgtctttgagtacctccaggctgaaagactgttgtaccagtaaaaacttaaaggcacaaattctccttgaagaccttctcccttttatgtggccccatattttatgttgctttatctttgaaattttgcatgaaaaggaaatgaatggattcgaatgaaattgtcctttagagcatgattacttgttcccatggacaaatatttttctccccttgctcttcctggcctgaaacacgggaaaccagagtcaaaagttatctccctctccctgtgatgccttgagatttttttctgcgttgtttaatgcctgaaatccaagtcttcctccatgggaaaatactgttataccaaataattctagatgagtaacaaagatctttttaggccttcattttatgttttttcttaactgttatattatgattgtgacatagattatactactactaatttttggatgtttcaaaaggtcaagaagtaaaagatgttagaaagcaatgagtgagtccttttgatttttaacttattccccatgtccctatacttcgtgtgcttttcctttttttttttgagacggaggctcactccgtcacctaggctagagtacagtggcacgatcttggctcgctgcaacctctgcctccctgattctgattttaattgttctgatttaattggcttggagtagaattcaggcattgatatctttaaaaactccccagtgttgagaaacaaatttagagagttgagaagtaggtatattaaattacagaatcttactgagttttggtagactgataatacaatttgctttgcttttcttaaatttgcattgagatgggatttgaagcatattgtgctcttgtgaatgttgaagttgcattgtagaagtttagaagctctggctatgggttgcctaaattgatgttttgaggaagcatattaatgttataaacttcgctgactttgaaggttgtgttgtagcatgaggaacacaaataaaacaattctaaatcaaac

SEQ ID NO: 112543 - DNA, 3275 bp, Homo sapiens
agtattgcctgcacaaatatctaccaggtctgcgacgaatagctccagcaacttcgcaccgtgttttccactcagcctaccgacaggcactgtgcagattcaagcggagagatgtccaagcagtgaggccgctgctgcaccggccatcctgagcccctactcggccttcccgtctccgcttccccgccccgcactaggacccctgcagatgatcaggcggcagccggggtgatttccttcctcttttggcaacatggcgggcggagaagctggagtgactctagggcagccgcatctttcgcgtcaggatctcaccaccttggatgttaccaagttgacgccactttcacacgaagttatcagcagacaagccacaattaacataggtacaattggtcatgtagctcatgggaaatccacagtcgtcaaagctatttctggagttcatactgtcaggttcaaaaatgaactagaaagaaatattacaatcaagcttggatatgctaatgctaagatttataagcttgatgacccaagttgccctcggccagaatgttatagatcttgtgggagcagtacacctgacgagtttcctacggacattccagggaccaaagggaacttcaaattagtcagacatgtttcctttgttgactgtcctggccacgatattttgatggctactatgctgaacggtgcagcagtgatggatgcagctcttctgttgatagctggtaatgaatcttgccctcagcctcagacatcggaacacctggctgctatagagatcatgaaactgaagcatattttgattctacaaaataaaattgatttggtaaaagaaagtcaggctaaagaacaatacgagcagatccttgcatttgtccaaggtacagtagcagagggagctcccattattccaatttcagctcagctgaaatacaatattgaagttgtttgtgagtacatagtaaagaaaattccagtacccccaagagactttacttcagagccccggcttattgttattagatcttttgatgtcaacaaacctggctgtgaagttgatgaccttaagggaggtgtagctggtggtagtatcctaaaaggagtattaaaggtgggccaggagatagaagtaagacctggtattgtttccaaagatagtgaaggaaaactcatgtgtaaaccaatcttttccaaaattgtatcactttttgcggagcataatgatctgcaatatgctgctccaggcggtcttattggagttggaacaaaaattgaccccactttgtgccgggctgacagaatggtggggcaagtacttggtgcagtcggagctttacctgagatattcacagaattggaaatttcctatttcctgcttagacggcttctaggtgtacgcactgaaggagacaagaaagcagcaaaggttcaaaagctgtctaagaatgaagtgctcatggtgaacataggatccctgtcaacaggagggagagttagtgctgtcaaggccgatttgggtaaaattgttttgaccaatccagtgtgcacagaggtaggagaaaaaattgcccttagccgaagagttgaaaaacactggcgtttaattggttggggtcagataagaagaggagtgacaatcaagccaacagtagatgatgactgaagaataccagttaaataatacattcggatggatttggaagttggaattcctcttaacaaccaaggggtttattttcaaagcaatattggggaattgatttcacagttcgttaccttagtaggtaacggtaaggttattcttttttttttttttttttggttatgaaaacttagggactaaaattaatataaaaattggcataatgttggattgaatctacattttggcagaagttaaacattcccacataatgtcaaaattatacatcatgcagttctgtttttttgtttgttttattttgttttgtttttgagtctggctctgtcacccaggctggagtgcagtggcgtgatctgcaacctctgccccccgggttcaagcgattctcctgcctcagcctcccgagtagctgagattacaggtgcgcgccaccacacttggctaatttttgtattattagtagagacggggtttcagcatgttggctaggccggtctctcctgacctcagggtgatcagcccacctcggcctcacaaagtgctgggattacaggcgtgagccaccttgcccagcccacatcatacagtttgaaatgaaactttgccacaaccagcctttgctgtagcacacacatatatcactgaacctgtttgaaataaagttttttttctttttcatgattcgtctttgagtacctccaggctgaaagactgttgtaccagtaaaaacttaaaggcacaaattctccttgaagaccttctcccttttatgtggccccatattttatgttgctttatctttgaaattttgcatgaaaaggaaatgaatggattcgaatgaaattgtcctttagagcatgattacttgttcccatggacaaatatttttctccccttgctcttcctggcctgaaacacgggaaaccagagtcaaaagttatctccctctccctgtgatgccttgagatttttttctgcgttgtttaatgcctgaaatccaagtcttcctccatgggaaaatactgttataccaaataattctagatgagtaacaaagatctttttaggccttcattttatgttttttcttaactgttatattatgattgtgacatagattatactactactaatttttggatgtttcaaaaggtcaagaagtaaaagatgttagaaagcaatgagtgagtccttttgatttttaacttattccccatgtccctatacttcgtgtgcttttcctttttttttttgagacggaggctcactccgtcacctaggctagagtacagtggcacgatcttggctcgctgcaacctctgcctccctgattcaagtgattctcgtgcttcagcctcccatgtagctgatattacaggcacttgccaccatacccggctggccaacatggcgaaaccctgtctctactaaaaatacaaaagttagccgggtgtggtggcaggtgcctgtaatcccagctactctggaggctgaggcaggggaatcgcttgaacccaggaggtggaggttgcagtgagctgaggtcacaccattgcactccagcctgggtgacaagaacaagactccatctcaaaaaaaaaaa

SEQ ID NO: 112544 - DNA, 2733 bp, Homo sapiens
agtattgcctgcacaaatatctaccaggtctgcgacgaatagctccagcaacttcgcaccgtgttttccactcagcctaccgacaggcactgtgcagattcaagcggagagatgtccaagcagtgaggccgctgctgcaccggccatcctgagcccctactcggccttcccgtctccgcttccccgccccgcactaggacccctgcagatgatcaggcggcagccggggtgatttccttcctcttttggcaacatggcgggcggagaagctggagtgactctagggcagccgcatctttcgcgtcaggatctcaccaccttggatgttaccaagttgacgccactttcacacgaagttatcagcagacaagccacaattaacataggtacaattggtcatgtagctcatgggaaatccacagtcgtcaaagctatttctggagttcatactgtcaggttcaaaaatgaactagaaagaaatattacaatcaagcttggatatgctaatgctaagatttataagcttgatgacccaagttgccctcggccagaatgttatagatcttgtgggagcagtacacctgacgagtttcctacggacattccagggaccaaagggaacttcaaattagtcagacatgtttcctttgttgactgtcctggccacgatattttgatggctactatgctgaacggtgcagcagtgatggatgcagctcttctgttgatagctggtaatgaatcttgccctcagcctcagacatcggaacacctggctgctatagagatcatgaaactgaagcatattttgattctacaaaataaaattgatttggtaaaagaaagtcaggctaaagaacaatacgagcagatccttgcatttgtccaaggtacagtagcagagggagctcccattattccaatttcagctcagctgaaatacaatattgaagttgtttgtgagtacatagtaaagaaaattccagtacccccaagagactttacttcagagccccggcttattgttattagatcttttgatgtcaacaaacctggctgtgaagttgatgaccttaagggaggtgtagctggtggtagtatcctaaaaggagtattaaaggtgggccaggagatagaagtaagacctggtattgtttccaaagatagtgaaggaaaactcatgtgtaaaccaatcttttccaaaattgtatcactttttgcggagcataatgatctgcaatatgctgctccaggcggtcttattggagttggaacaaaaattgaccccactttgtgccgggctgacagaatggtggggcaagtacttggtgcagtcggagctttacctgagatattcacagaattggaaatttcctatttcctgcttagacggcttctaggtgtacgcactgaaggagacaagaaagcagcaaaggttcaaaagctgtctaagaatgaagtgctcatggtgaacataggatccctgtcaacaggagggagagttagtgctgtcaaggccgatttgggtaaaattgttttgaccaatccagtgtgcacagaggtaggagaaaaaattgcccttagccgaagagttgaaaaacactggcgtttaattggttggggtcagataagaagaggagtgacaatcaagccaacagtagatgatgactgaagaataccagttaaataatacattcggatggatttggaagttggaattcctcttaacaaccaaggggtttattttcaaagcaatattggggaattgatttcacagttcgttaccttagtaggtaacggtaaggttattcttttttttttttttttttggttatgaaaacttagggactaaaattaatataaaaattggcataatgttggattgaatctacattttggcagaagttaaacattcccacataatgtcaaaattatacatcatgcagttctgtttttttgtttgttttattttgttttgtttttgagtctggctctgtcacccaggctggagtgcagtggcgtgatctgcaacctctgccccccgggttcaagcgattctcctgcctcagcctcccgagtagctgagattacaggtgcgcgccaccacacttggctaatttttgtattattagtagagacggggtttcagcatgttggctaggccggtctctcctgacctcagggtgatcagcccacctcggcctcacaaagtgctgggattacaggcgtgagccaccttgcccagcccacatcatacagtttgaaatgaaactttgccacaaccagcctttgctgtagcacacacatatatcactgaacctgtttgaaataaagttttttttctttttcatgattcgtctttgagtacctccaggctgaaagactgttgtaccagtaaaaacttaaaggcacaaattctccttgaagaccttctcccttttatgtggccccatattttatgttgctttatctttgaaattttgcatgaaaaggaaatgaatggattcgaatgaaattgtcctttagagcatgattacttgttcccatggacaaatcttcctccatgggaaaatactgttataccaaataattctagatgagtaacaaagatctttttaggccttcattttatgttttttcttaactgttatattatgattgtgacatagattatactactactaatttttggatgtttcaaaaggtcaagaagtaaaagatgttagaaagcaa

SEQ ID NO: 112545 - DNA, 2588 bp, Homo sapiens
agtattgcctgcacaaatatctaccaggtctgcgacgaatagctccagcaacttcgcaccgtgttttccactcagcctaccgacaggcactgtgcagattcaagcggagagatgtccaagcagtgaggccgctgctgcaccggccatcctgagcccctactcggccttcccgtctccgcttccccgccccgcactaggacccctgcagatgatcaggcggcagccggggtgatttccttcctcttttggcaacatggcgggcggagaagctggagtgactctagggcagccgcatctttcgcgtcaggatctcaccaccttggatgttaccaagttgacgccactttcacacgaagttatcagcagacaagccacaattaacataggtacaattggtcatgtagctcatgggaaatccacagtcgtcaaagctatttctggagttcatactgtcaggttcaaaaatgaactagaaagaaatattacaatcaagcttggatatgctaatgctaagatttataagcttgatgacccaagttgccctcggccagaatgttatagatcttgtgggagcagtacacctgacgagtttcctacggacattccagggaccaaagggaacttcaaattagtcagacatgtttcctttgttgactgtcctggccacgatattttgatggctactatgctgaacggtgcagcagtgatggatgcagctcttctgttgatagctggtaatgaatcttgccctcagcctcagacatcggaacacctggctgctatagagatcatgaaactgaagcatattttgattctacaaaataaaattgatttggtaaaagaaagtcaggctaaagaacaatacgagcagatccttgcatttgtccaaggtacagtagcagagggagctcccattattccaatttcagctcagctgaaatacaatattgaagttgtttgtgagtacatagtaaagaaaattccagtacccccaagagactttacttcagagccccggcttattgttattagatcttttgatgtcaacaaacctggctgtgaagttgatgaccttaagggaggtgtagctggtggtagtatcctaaaaggagtattaaaggtgggccaggagatagaagtaagacctggtattgtttccaaagatagtgaaggaaaactcatgtgtaaaccaatcttttccaaaattgtatcactttttgcggagcataatgatctgcaatatgctgctccaggcggtcttattggagttggaacaaaaattgaccccactttgtgccgggctgacagaatggtggggcaagtacttggtgcagtcggagctttacctgagatattcacagaattggaaatttcctatttcctgcttagacggcttctaggtgtacgcactgaaggagacaagaaagcagcaaaggttcaaaagctgtctaagaatgaagtgctcatggtgaacataggatccctgtcaacaggagggagagttagtgctgtcaaggccgatttgggtaaaattgttttgaccaatccagtgtgcacagaggtaggagaaaaaattgcccttagccgaagagttgaaaaacactggcgtttaattggttggggtcagataagaagaggagtgacaatcaagccaacagtagatgatgactgaagaataccagttaaataatacattcggatggatttggaagttggaattcctcttaacaaccaaggggtttattttcaaagcaatattggggaattgatttcacagttcgttaccttagtaggtaacggtaaggttattcttttttttttttttttttggttatgaaaacttagggactaaaattaatataaaaattggcataatgttggattgaatctacattttggcagaagttaaacattcccacataatgtcaaaattatacatcatgcagttctgtttttttgtttgttttattttgttttgtttttgagtctggctctgtcacccaggctggagtgcagtggcgtgatctgcaacctctgccccccgggttcaagcgattctcctgcctcagcctcccgagtagctgagattacaggtgcgcgccaccacacttggctaatttttgtattattagtagagacggggtttcagcatgttggctaggccggtctctcctgacctcagggtgatcagcccacctcggcctcacaaagtgctgggattacaggcgtgagccaccttgcccagcccacatcatacagtttgaaatgaaactttgccacaaccagcctttgctgtagcacacacatatatcactgaacctgtttgaaataaagttttttttctttttcatgattcgtctttgagtacctccaggctgaaagactgttgtaccagtaaaaacttaaaggcacaaattctccttgaagaccttctcccttttatgtggccccatattttatgttgctttatctttgaaattttgcatgaaaaggaaatgaatggattcgaatgaatagtccctgggcagttatcgatcccaggacaacatgtgcccccgacttccggccgaacaggaaacggtcagttt

SEQ ID NO: 112546 - DNA, 2456 bp, Homo sapiens
agtattgcctgcacaaatatctaccaggtctgcgacgaatagctccagcaacttcgcaccgtgttttccactcagcctaccgacaggcactgtgcagattcaagcggagagatgtccaagcagtgaggccgctgctgcaccggccatcctgagcccctactcggccttcccgtctccgcttccccgccccgcactaggacccctgcagatgatcaggcggcagccggggtgatttccttcctcttttggcaacatggcgggcggagaagctggagtgactctagggcagccgcatctttcgcgtcaggatctcaccaccttggatgttaccaagttgacgccactttcacacgaagttatcagcagacaagccacaattaacataggtacaattggtcatgtagctcatgggaaatccacagtcgtcaaagctatttctggagttcatactgtcaggttcaaaaatgaactagaaagaaatattacaatcaagcttggatatgctaatgctaagatttataagcttgatgacccaagttgccctcggccagaatgttatagatcttgtgggagcagtacacctgacgagtttcctacggacattccagggaccaaagggaacttcaaattagtcagacatgtttcctttgttgactgtcctggccacgatattttgatggctactatgctgaacggtgcagcagtgatggatgcagctcttctgttgatagctggtaatgaatcttgccctcagcctcagacatcggaacacctggctgctatagagatcatgaaactgaagcatattttgattctacaaaataaaattgatttggtaaaagaaagtcaggctaaagaacaatacgagcagatccttgcatttgtccaaggtacagtagcagagggagctcccattattccaatttcagctcagctgaaatacaatattgaagttgtttgtgagtacatagtaaagaaaattccagtacccccaagagactttacttcagagccccggcttattgttattagatcttttgatgtcaacaaacctggctgtgaagttgatgaccttaagggaggtgtagctggtggtagtatcctaaaaggagtattaaaggtgggccaggagatagaagtaagacctggtattgtttccaaagatagtgaaggaaaactcatgtgtaaaccaatcttttccaaaattgtatcactttttgcggagcataatgatctgcaatatgctgctccaggcggtcttattggagttggaacaaaaattgaccccactttgtgccgggctgacagaatggtggggcaagtacttggtgcagtcggagctttacctgagatattcacagaattggaaatttcctatttcctgcttagacggcttctaggtgtacgcactgaaggagacaagaaagcagcaaaggttcaaaagctgtctaagaatgaagtgctcatggtgaacataggatccctgtcaacaggagggagagttagtgctgtcaaggccgatttgggtaaaattgttttgaccaatccagtgtgcacagaggtaggagaaaaaattgcccttagccgaagagttgaaaaacactggcgtttaattggttggggtcagataagaagaggagtgacaatcaagccaacagtagatgatgactgaagaataccagttaaataatacattcggatggatttggaagttggaattcctcttaacaaccaaggggtttattttcaaagcaatattggggaattgatttcacagttcgttaccttagtaggtaacggtaaggttattcttttttttttttttttttggttatgaaaacttagggactaaaattaatataaaaattggcataatgttggattgaatctacattttggcagaagttaaacattcccacataatgtcaaaattatacatcatgcagttctgttataacggtggtcaaataggttggtggagtctggactctggaactccagcctgggggtgaccagagtaagactgtctcaaaaaaataggaaaaagaaagaaaaagaccgtatcaggtctccatccctggagactctcatttaaatagttggtgggatggattcccgtgctaggtgaccctaatgtgccatttgggggtgggaacccacggtcaattaccattataagggccctatatcccaccgtagggttactaggggatttttcccagaaatattaaccgcctttttagagaagaaagccgtgctgcggctggcattgggcactgcttatattaagacgtgcgcataatcttagcagacttttgggtgtgtgcctactggaacacgataatcacacgcccaagaaagcgcgttgttatagagacgcagtacttggcaaaaagcgaattagtgggatattactgtgacagaaatggtaggacaaaagcgagcttttgtgtaaa

SEQ ID NO: 112547 - DNA, 3015 bp, Homo sapiens
agtattgcctgcacaaatatctaccaggtctgcgacgaatagctccagcaacttcgcaccgtgttttccactcagcctaccgacaggcactgtgcagattcaagcggagagatgtccaagcagtgaggccgctgctgcaccggccatcctgagcccctactcggccttcccgtctccgcttccccgccccgcactaggacccctgcagatgatcaggcggcagccggggtgatttccttcctcttttggcaacatggcgggcggagaagctggagtgactctagggcagccgcatctttcgcgtcaggatctcaccaccttggatgttaccaagttgacgccactttcacacgaagttatcagcagacaagccacaattaacataggtacaattggtcatgtagctcatgggaaatccacagtcgtcaaagctatttctggagttcatactgtcaggttcaaaaatgaactagaaagaaatattacaatcaagcttggatatgctaatgctaagatttataagcttgatgacccaagttgccctcggccagaatgttatagatcttgtgggagcagtacacctgacgagtttcctacggacattccagggaccaaagggaacttcaaattagtcagacatgtttcctttgttgactgtcctggccacgatattttgatggctactatgctgaacggtgcagcagtgatggatgcagctcttctgttgatagctggtaatgaatcttgccctcagcctcagacatcggaacacctggctgctatagagatcatgaaactgaagcatattttgattctacaaaataaaattgatttggtaaaagaaagtcaggctaaagaacaatacgagcagatccttgcatttgtccaaggtacagtagcagagggagctcccattattccaatttcagctcagctgaaatacaatattgaagttgtttgtgagtacatagtaaagaaaattccagtacccccaagagactttacttcagagccccggcttattgttattagatcttttgatgtcaacaaacctggctgtgaagttgatgaccttaagggaggtgtagctggtggtagtatcctaaaaggagtattaaaggtgggccaggagatagaagtaagacctggtattgtttccaaagatagtgaaggaaaactcatgtgtaaaccaatcttttccaaaattgtatcactttttgcggagcataatgatctgcaatatgctgctccaggcggtcttattggagttggaacaaaaattgaccccactttgtgccgggctgacagaatggtggggcaagtacttggtgcagtcggagctttacctgagatattcacagaattggaaatttcctatttcctgcttagacggcttctaggtgtacgcactgaaggagacaagaaagcagcaaaggttcaaaagctgtctaagaatgaagtgctcatggtgaacataggatccctgtcaacaggagggagagttagtgctgtcaaggccgatttgggtaaaattgttttgaccaatccagtgtgcacagaggtaggagaaaaaattgcccttagccgaagagttgaaaaacactggcgtttaattggttggggtcagataagaagaggagtgacaatcaagccaacagtagatgatgactgaagaataccagttaaataatacattcggatggatttggaagttggaattcctcttaacaaccaaggggtttattttcaaagcaatattggggaattgatttcacagttcgttaccttagtaggtaacggtaaggttattcttttttttttttttttttggttatgaaaacacttgagggcattaaaatattcaattataaaatatgggcctataagtgttgtggctatgtgaaactcttcactatcttgtggcccagacacgttctcacacactaatcttcccacacatataaatagtgtttcaaacacactgtattatcgacatactccgtagtggcagactatctccgtgggtatttctttactgtcgggttgtagtgagtttttcaactacttatagtcgtagtcgtttgtagaggtgttatactatttgtggagaggtattctggtggggggacacttccgattggtgttacaacaacccaccgccaggaaggtgggtgcctggttggtggagcaagcttgtgtggtgtcgagcaaggtcagttgggcgggagctggttgcattgaagcaaactttcgttgtttgggagatcagaacaacccgccttccttgcttgttggcagcacccgccccgctcctgcaggagggtctgattgattcctccacgtagaggtaacgcagcagtggaacaaattgctatctaccatgccgcctgtgttgggagccactcttgctctttcaggacagggtgcccaatccagtttacacgcgcgacggactgaaggtatgtacttcgaaggccgagtccggttaggagtgcaaggaactctatcgtttatttcacaacaccggaagggaaggtaagtttggcaggccgagctgcgcccgtgctgccacactacaagcccaacctacatgaccaacacttctgcttcggttggctggtgacgttcatatatcgaagcaattcttcgtacatcgacgtaggttaggagtagattcatatcctttttacattctacttccgtttaactattacgtaccggcgtctagttaacagaggcaaaagcagacaacctccgctcgggtaggagagaggcgggtactagttgaatagcactacacctaaaggcagcgacactacaacgagctaagggtcgactttcgttggaggcgtcccctctactttacttgggacggtgcccccgcgtagtagaggagtagttaccttagcttcctacgctcccctcgcctgtttagagtagaagctcctactttcactagatggcagggaggttggactagcaataacatgcagtaagagaggccgtccaacacag

SEQ ID NO: 112548 - DNA, 1968 bp, Homo sapiens
agtattgcctgcacaaatatctaccaggtctgcgacgaatagctccagcaacttcgcaccgtgttttccactcagcctaccgacaggcactgtgcagattcaagcggagagatgtccaagcagtgaggccgctgctgcaccggccatcctgagcccctactcggccttcccgtctccgcttccccgccccgcactaggacccctgcagatgatcaggcggcagccggggtgatttccttcctcttttggcaacatggcgggcggagaagctggagtgactctagggcagccgcatctttcgcgtcaggatctcaccaccttggatgttaccaagttgacgccactttcacacgaagttatcagcagacaagccacaattaacataggtacaattggtcatgtagctcatgggaaatccacagtcgtcaaagctatttctggagttcatactgtcaggttcaaaaatgaactagaaagaaatattacaatcaagcttggatatgctaatgctaagatttataagcttgatgacccaagttgccctcggccagaatgttatagatcttgtgggagcagtacacctgacgagtttcctacggacattccagggaccaaagggaacttcaaattagtcagacatgtttcctttgttgactgtcctggccacgatattttgatggctactatgctgaacggtgcagcagtgatggatgcagctcttctgttgatagctggtaatgaatcttgccctcagcctcagacatcggaacacctggctgctatagagatcatgaaactgaagcatattttgattctacaaaataaaattgatttggtaaaagaaagtcaggctaaagaacaatacgagcagatccttgcatttgtccaaggtacagtagcagagggagctcccattattccaatttcagctcagctgaaatacaatattgaagttgtttgtgagtacatagtaaagaaaattccagtacccccaagagactttacttcagagccccggcttattgttattagatcttttgatgtcaacaaacctggctgtgaagttgatgaccttaagggaggtgtagctggtggtagtatcctaaaaggagtattaaaggtgggccaggagatagaagtaagacctggtattgtttccaaagatagtgaaggaaaactcatgtgtaaaccaatcttttccaaaattgtatcactttttgcggagcataatgatctgcaatatgctgctccaggcggtcttattggagttggaacaaaaattgaccccactttgtgccgggctgacagaatggtggggcaagtacttggtgcagtcggagctttacctgagatattcacagaattggaaatttcctatttcctgcttagacggcttctaggtgtacgcactgaaggagacaagaaagcagcaaaggttcaaaagctgtctaagaatgaagtgctcatggtgaacataggatccctgtcaacaggagggagagttagtgctgtcaaggccgatttgggtaaaattgttttgaccaatccagtgtgcacagaggtaggagaaaaaattgcccttagccgaagagttgaaaaacactggcggtaagtttgttagtctttgccactgtctaattaaaaaaagacacagtcttgtacagaaaaaaaagcacacaatcttccttgaggacaacagttactgtggctttcagtctcaactatttatttggatgactttgaaaactatacttcggccgggtgcggtggctcacgcctgtaatcccagcactttgggaggcctaggcgggtggatcatgaggtcaggagatcaagaccatcctggctaacatggtgaaaccccgtctctactaaaaaatacaaaaaattagccgggcgtggtggcgggcgcctgtagtcccagctactcgggaggctgaggcaggagaatggcgtgaacctgggagt

SEQ ID NO: 112549 - DNA, 2509 bp, Homo sapiens
attactaattatatgtttacaggtgggccaggagatagaagtaagacctggtattgtttccaaagatagtgaaggaaaactcatgtgtaaaccaatcttttccaaaattgtatcactttttgcggagcataatgatctgcaatatgctgctccaggcggtcttattggagttggaacaaaaattgaccccactttgtgccgggctgacagaatggtggggcaagtacttggtgcagtcggagctttacctgagatattcacagaattggaaatttcctatttcctgcttagacggcttctaggtgtacgcactgaaggagacaagaaagcagcaaaggttcaaaagctgtctaagaatgaagtgctcatggtgaacataggatccctgtcaacaggagggagagttagtgctgtcaaggccgatttggtttaattggttggggtcagataagaagaggagtgacaatcaagccaacagtagatgatgactgaagaataccagttaaataatacattcggatggatttggaagttggaattcctcttaacaaccaaggggtttattttcaaagcaatattggggaattgatttcacagttcgttaccttagtaggtaacggtaaggttattcttttttttttttttttttggttatgaaaacttagggactaaaattaatataaaaattggcataatgttggattgaatctacattttggcagaagttaaacattcccacataatgtcaaaattatacatcatgcagttctgtttttttgtttgttttattttgttttgtttttgagtctggctctgtcacccaggctggagtgcagtggcgtgatctgcaacctctgccccccgggttcaagcgattctcctgcctcagcctcccgagtagctgagattacaggtgcgcgccaccacacttggctaatttttgtattattagtagagacggggtttcagcatgttggctaggccggtctctcctgacctcagggtgatcagcccacctcggcctcacaaagtgctgggattacaggcgtgagccaccttgcccagcccacatcatacagtttgaaatgaaactttgccacaaccagcctttgctgtagcacacacatatatcactgaacctgtttgaaataaagttttttttctttttcatgattcgtctttgagtacctccaggctgaaagactgttgtaccagtaaaaacttaaaggcacaaattctccttgaagaccttctcccttttatgtggccccatattttatgttgctttatctttgaaattttgcatgaaaaggaaatgaatggattcgaatgaaattgtcctttagagcatgattacttgttcccatggacaaatatttttctccccttgctcttcctggcctgaaacacgggaaaccagagtcaaaagttatctccctctccctgtgatgccttgagatttttttctgcgttgtttaatgcctgaaatccaagtcttcctccatgggaaaatactgttataccaaataattctagatgagtaacaaagatctttttaggccttcattttatgttttttcttaactgttatattatgattgtgacatagattatactactactaatttttggatgtttcaaaaggtcaagaagtaaaagatgttagaaagcaatgagtgagtccttttgatttttaacttattccccatgtccctatacttcgtgtgcttttcctttttttttttgagacggaggctcactccgtcacctaggctagagtacagtggcacgatcttggctcgctgcaacctctgcctccctgattcaagtgattctcgtgcttcagcctcccatgtagctgatattacaggcacttgccaccatacccggctaattttggtatttttagtagagatggggtttcaccatgttgcccaggctggtcttgaactcctaacctcaggtgatccgcccgcctctgccttccaaagtgctgggattacaggcgtgagccactctgcccggcttatttttctttatgtttttgcttcgtaagaggttctgttgagcagtgatttgcaactcttgctgacgttgctggggaagctttaaaaaaaaaaaagatgccccacagagattctgattttaattgttctgatttaattggcttggagtagaattcaggcattgatatctttaaaaactccccagtgttgagaaacaaatttagagagttgagaagtaggtatattaaattacagaatcttactgagttttggtagactgataatacaatttgctttgcttttcttaaatttgcattgagatgggatttgaagcatattgtgctcttgtgaatgttgaagttgcattgtagaagtttagaagctctggctatgggttgcctaaattgatgttttgaggaagcatattaatgttataaacttcgctgactttgaaggttgtgttgtagcatgaggaacacaaataaaacaattctaaatcaaac

SEQ ID NO: 112550 - DNA, 1575 bp, Homo sapiens
ggacgcgtgggtcgacccacgcgtcggggtttcagcatgttggctaggccggtctctcctgacctcagggtgatcagcccacctcggcctcacaaagtgctgggattacaggcgtgagccaccttgcccagcccacatcatacagtttgaaatgaaactttgccacaaccagcctttgctgtagcacacacatatatcactgaacctgtttgaaataaagttttttttctttttcatgattcgtctttgagtacctccaggctgaaagactgttgtaccagtaaaaacttaaaggcacaaattctccttgaagaccttctcccttttatgtggccccatattttatgttgctttatctttgaaattttgcatgaaaaggaaatgaatggattcgaatgaaattgtcctttagagcatgattacttgttcccatggacaaatatttttctccccttgctcttcctggcctgaaacacgggaaaccagagtcaaaagttatctccctctccctgtgatgccttgagatttttttctgcgttgtttaatgcctgaaatccaagtcttcctccatgggaaaatactgttataccaaataattctagatgagtaacaaagatctttttaggccttcattttatgttttttcttaactgttatattatgattgtgacatagattatactactactaatttttggatgtttcaaaaggtcaagaagtaaaagatgttagaaagcaatgagtgagtccttttgatttttaacttattccccatgtccctatacttcgtgtgcttttcctttttttttttgagacggaggctcactccgtcacctaggctagagtacagtggcacgatcttggctcgctgcaacctctgcctccctgattcaagtgattctcgtgcttcagcctcccatgtagctgatattacaggcacttgccaccatacccggctaattttggtatttttagtagagatggggtttcaccatgttgcccaggctggtcttgaactcctaacctcaggtgatccgcccgcctctgccttccaaagtgctgggattacaggcgtgagccactctgcccggcttatttttctttatgtttttgcttcgtaagaggttctgttgagcagtgatttgcaactcttgctgacgttgctggggaagctttaaaaaaaaaaaagatgccccacagagattctgattttaattgttctgatttaattggcttggagtagaattcaggcattgatatctttaaaaactccccagtgttgagaaacaaatttagagagttgagaagtaggtatattaaattacagaatcttactgagttttggtagactgataatacaatttgctttgcttttcttaaatttgcattgagatgggatttgaagcatattgtgctcttgtgaatgttgaagttgcattgtagaagtttagaagctctggctatgggttgcctaaattgatgttttgaggaagcatattaatgttataaacttcgctgactttgaaggttgtgttgtagcatgaggaacacaaataaaacaattctaaatcaaac

SEQ ID NO: 112551 - DNA, 1041 bp, Homo sapiens
  misc_feature (1018)..(1018): n is a, c, g, or t
agtattgcctgcacaaatatctaccaggtctgcgacgaatagctccagcaacttcgcaccgtgttttccactcagcctaccgacaggcactgtgcagattcaagcggagagatgtccaagcagtgaggccgctgctgcaccggccatcctgagcccctactcggccttcccgtctccgcttccccgccccgcactaggacccctgcagatgatcaggcggcagccggggtgatttccttcctcttttggcaacatggcgggcggagaagctggagtgactctagggcagccgcatctttcgcgtcaggatctcaccaccttggatgttaccaagttgacgccactttcacacgaagttatcagcagacaagccacaattaacataggtacaattggtcatgtagctcatgggaaatccacagtcgtcaaagctatttctggagttcatactgtcaggttcaaaaatgaactagaaagaaatattacaatcaagcttggatatgctaatgctaagatttataagcttgatgacccaagttgccctcggccagaatgttatagatcttgtgggagcagtacacctgacgagtttcctacggacattccagggaccaaagggaacttcaaattagtcagacatgtttcctttgttgactgtcctggccacgatattttgatggctactatgctgaacggtgcagcagtgatggatgcagctcttctgttgatagctggtaatgaatcttgccctcagcctcagacatcggaacacctggctgctatagagatcatgaaactgaagcatattttgattctacaaaataaaattgatttggtaaaagaaagtcaggctaaagaacaatacgagcagatccttgcatttgtccaaggtacagtagcagagggagctcccattattccaatttcagctcagctgaaatacaatattgaagttgtttgtgagtacatagtaaagaaaattccagtacccccaagaatttatttaaacccggtttgngttgattttgtgtcacaacgggt

SEQ ID NO: 112552 - DNA, 2760 bp, Homo sapiens
tctccataaagaaagcccacactatattcttagattctttttattcttgcttttgtgtgttttttctgagacagtctcactctgtcacccaggttggagtgcagtggtgcgatctcggctcactacaacctctgcctcctgggttcaagtgattctcctgcctcagcctcccaagtagctgggactacaggcatgagccaccacgcctgacctctttcttcttttttttggaacatttccttattttctggcacaaaatcttccagactcatcttgtaccttctctgttccagttttagaactggccatttctcttataaatgaaaagctgagtgttcaggtgtgctcatggctcttagggtgctgttgcttctaggtcttttgagagcatagagccaggaagcatacacacatttttggctcctgactttttgctctttcccaggttattgagtttgccccttgctttccattcctcgtcacctcatcacagtccataccaccatcactttacacttcacagttagtgcgaaagactcctagtttgcctcttaacttggtcaaaattagtcttcttaaaacattttcatcatgctgtgtttaataatttctagagtcttctcactactttttgatatttgggacttttctagaaacctgcttcaacccatttaagctttccttctgcattgtcttatataaaccctctaaattagactgttttgtgccctaactgtccccataattattcacatcacccctacccactatctacttccttaattatttattttatattttttagaggcagggtctctctgttgaccaggctggagtttagtggcatgatcatagctcactgcagcctcagtgtctaagtagctaggactattggctcacaccaccgtgatcagctaatttttttgttttttgtagacacttggtctcactgtgttgcccagcatgatctcaaactcctggcctcaagccatcctcccacctcagcctctcaaagtgttgggattacagacatgagccaccccgcccagccctgtttcctttattaaggcttccatgctactgtgcccacgatggtctcatcacttgtccaggagatttatctgaattattgccctgtaatttagaaagttaaatttttgttgtctcttaagtaaataattatttgtggtgacttatgcccttttgattttactgtcttttgtgattatatttttttgctattacagacacacgacttccagtgtattttgaaatagatttaagcaataaactttcagtccagccaccttgcccagcccacatcatacagtttgaaatgaaactttgccacaaccagcctttgctgtagcacacacatatatcactgaacctgtttgaaataaagttttttttctttttcatgattcgtctttgagtacctccaggctgaaagactgttgtaccagtaaaaacttaaaggcacaaattctccttgaagaccttctcccttttatgtggccccatattttatgttgctttatctttgaaattttgcatgaaaaggaaatgaatggattcgaatgaaattgtcctttagagcatgattacttgttcccatggacaaatatttttctccccttgctcttcctggcctgaaacacgggaaaccagagtcaaaagttatctccctctccctgtgatgccttgagatttttttctgcgttgtttaatgcctgaaatccaagtcttcctccatgggaaaatactgttataccaaataattctagatgagtaacaaagatctttttaggccttcattttatgttttttcttaactgttatattatgattgtgacatagattatactactactaatttttggatgtttcaaaaggtcaagaagtaaaagatgttagaaagcaatgagtgagtccttttgatttttaacttattccccatgtccctatacttcgtgtgcttttcctttttttttttgagacggaggctcactccgtcacctaggctagagtacagtggcacgatcttggctcgctgcaacctctgcctccctgattcaagtgattctcgtgcttcagcctcccatgtagctgatattacaggcacttgccaccatacccggctaattttggtatttttagtagagatggggtttcaccatgttgcccaggctggtcttgaactcctaacctcaggtgatccgcccgcctctgccttccaaagtgctgggattacaggcgtgagccactctgcccggcttatttttctttatgtttttgcttcgtaagaggttctgttgagcagtgatttgcaactcttgctgacgttgctggggaagctttaaaaaaaaaaaagatgccccacagagattctgattttaattgttctgatttaattggcttggagtagaattcaggcattgatatctttaaaaactccccagtgttgagaaacaaatttagagagttgagaagtaggtatattaaattacagaatcttactgagttttggtagactgataatacaatttgctttgcttttcttaaatttgcattgagatgggatttgaagcatattgtgctcttgtgaatgttgaagttgcattgtagaagtttagaagctctggctatgggttgcctaaattgatgttttgaggaagcatattaatgttataaacttcgctgactttgaaggttgtgttgtagcatgaggaacacaaataaaacaattctaaatcaaac

SEQ ID NO: 112553 - DNA, 2803 bp, Homo sapiens
ggtagaatgcagtggcatgatctcagctcactgcaacctctgcctcccaggttcaagcaattctcctgcctcagcctcccgagtagctgggactacaggcacacgccaccacacccggctaatttttgtattttcagtagagacggggtttcaccacgttggccagcctggtctttaacccccgacctcaggtgatccgccctccttggcctcccaaagtgctgggattacaggcatgagccaccacgcctgacctctttcttcttttttttggaacatttccttattttctggcacaaaatcttccagactcatcttgtaccttctctgttccagttttagaactggccatttctcttataaatgaaaagctgagtgttcaggtgtgctcatggctcttagggtgctgttgcttctaggtcttttgagagcatagagccaggaagcatacacacatttttggctcctgactttttgctctttcccaggttattgagtttgccccttgctttccattcctcgtcacctcatcacagtccataccaccatcactttacacttcacagttagtgcgaaagactcctagtttgcctcttaacttggtcaaaattagtcttcttaaaacattttcatcatgctgtgtttaataatttctagagtcttctcactactttttgatatttgggacttttctagaaacctgcttcaacccatttaagctttccttctgcattgtcttatataaaccctctaaattagactgttttgtgccctaactgtccccataattattcacatcacccctacccactatctacttccttaattatttattttatattttttagaggcagggtctctctgttgaccaggctggagtttagtggcatgatcatagctcactgcagcctcagtgtctaagtagctaggactattggctcacaccaccgtgatcagctaatttttttgttttttgtagacacttggtctcactgtgttgcccagcatgatctcaaactcctggcctcaagccatcctcccacctcagcctctcaaagtgttgggattacagacatgagccaccccgcccagccctgtttcctttattaaggcttccatgctactgtgcccacgatggtctcatcacttgtccaggagatttatctgaattattgccctgtaatttagaaagttaaatttttgttgtctcttaagtaaataattatttgtggtgacttatgcccttttgattttactgtcttttgtgattatatttttttgctattacagacacacgacttccagtgtattttgaaatagatttaagcaataaactttcagtccagccaccttgcccagcccacatcatacagtttgaaatgaaactttgccacaaccagcctttgctgtagcacacacatatatcactgaacctgtttgaaataaagttttttttctttttcatgattcgtctttgagtacctccaggctgaaagactgttgtaccagtaaaaacttaaaggcacaaattctccttgaagaccttctcccttttatgtggccccatattttatgttgctttatctttgaaattttgcatgaaaaggaaatgaatggattcgaatgaaattgtcctttagagcatgattacttgttcccatggacaaatatttttctccccttgctcttcctggcctgaaacacgggaaaccagagtcaaaagttatctccctctccctgtgatgccttgagatttttttctgcgttgtttaatgcctgaaatccaagtcttcctccatgggaaaatactgttataccaaataattctagatgagtaacaaagatctttttaggccttcattttatgttttttcttaactgttatattatgattgtgacatagattatactactactaatttttggatgtttcaaaaggtcaagaagtaaaagatgttagaaagcaatgagtgagtccttttgatttttaacttattccccatgtccctatacttcgtgtgcttttcctttttttttttgagacggaggctcactccgtcacctaggctagagtacagtggcacgatcttggctcgctgcaacctctgcctccctgattcaagtgattctcgtgcttcagcctcccatgtagctgatattacaggcacttgccaccatacccggctaattttggtatttttagtagagatggggtttcaccatgttgcccaggctggtcttgaactcctaacctcaggtgatccgcccgcctctgccttccaaagtgctgggattacaggcgtgagccactctgcccggcttatttttctttatgtttttgcttcgtaagaggttctgttgagcagtgatttgcaactcttgctgacgttgctggggaagctttaaaaaaaaaaaagatgccccacagagattctgattttaattgttctgatttaattggcttggagtagaattcaggcattgatatctttaaaaactccccagtgttgagaaacaaatttagagagttgagaagtaggtatattaaattacagaatcttactgagttttggtagactgataatacaatttgctttgcttttcttaaatttgcattgagatgggatttgaagcatattgtgctcttgtgaatgttgaagttgcattgtagaagtttagaagctctggctatgggttgcctaaattgatgttttgaggaagcatattaatgttataaacttcgctgactttgaaggttgtgttgtagcatgaggaacacaaataaaacaattctaaatcaaac

SEQ ID NO: 112554 - DNA, 2397 bp, Homo sapiens
gggggtgtctgaggtccgaaaacgacatagagccaggaagcatacacacatttttggctcctgactttttgctctttcccaggttattgagtttgccccttgctttccattcctcgtcacctcatcacagtccataccaccatcactttacacttcacagttagtgcgaaagactcctagtttgcctcttaacttggtcaaaattagtcttcttaaaacattttcatcatgctgtgtttaataatttctagagtcttctcactactttttgatatttgggacttttctagaaacctgcttcaacccatttaagctttccttctgcattgtcttatataaaccctctaaattagactgttttgtgccctaactgtccccataattattcacatcacccctacccactatctacttccttaattatttattttatattttttagaggcagggtctctctgttgaccaggctggagtttagtggcatgatcatagctcactgcagcctcagtgtctaagtagctaggactattggctcacaccaccgtgatcagctaatttttttgttttttgtagacacttggtctcactgtgttgcccagcatgatctcaaactcctggcctcaagccatcctcccacctcagcctctcaaagtgttgggattacagacatgagccaccccgcccagccctgtttcctttattaaggcttccatgctactgtgcccacgatggtctcatcacttgtccaggagatttatctgaattattgccctgtaatttagaaagttaaatttttgttgtctcttaagtaaataattatttgtggtgacttatgcccttttgattttactgtcttttgtgattatatttttttgctattacagacacacgacttccagtgtattttgaaatagatttaagcaataaactttcagtccagccaccttgcccagcccacatcatacagtttgaaatgaaactttgccacaaccagcctttgctgtagcacacacatatatcactgaacctgtttgaaataaagttttttttctttttcatgattcgtctttgagtacctccaggctgaaagactgttgtaccagtaaaaacttaaaggcacaaattctccttgaagaccttctcccttttatgtggccccatattttatgttgctttatctttgaaattttgcatgaaaaggaaatgaatggattcgaatgaaattgtcctttagagcatgattacttgttcccatggacaaatatttttctccccttgctcttcctggcctgaaacacgggaaaccagagtcaaaagttatctccctctccctgtgatgccttgagatttttttctgcgttgtttaatgcctgaaatccaagtcttcctccatgggaaaatactgttataccaaataattctagatgagtaacaaagatctttttaggccttcattttatgttttttcttaactgttatattatgattgtgacatagattatactactactaatttttggatgtttcaaaaggtcaagaagtaaaagatgttagaaagcaatgagtgagtccttttgatttttaacttattccccatgtccctatacttcgtgtgcttttcctttttttttttgagacggaggctcactccgtcacctaggctagagtacagtggcacgatcttggctcgctgcaacctctgcctccctgattcaagtgattctcgtgcttcagcctcccatgtagctgatattacaggcacttgccaccatacccggctaattttggtatttttagtagagatggggtttcaccatgttgcccaggctggtcttgaactcctaacctcaggtgatccgcccgcctctgccttccaaagtgctgggattacaggcgtgagccactctgcccggcttatttttctttatgtttttgcttcgtaagaggttctgttgagcagtgatttgcaactcttgctgacgttgctggggaagctttaaaaaaaaaaaagatgccccacagagattctgattttaattgttctgatttaattggcttggagtagaattcaggcattgatatctttaaaaactccccagtgttgagaaacaaatttagagagttgagaagtaggtatattaaattacagaatcttactgagttttggtagactgataatacaatttgctttgcttttcttaaatttgcattgagatgggatttgaagcatattgtgctcttgtgaatgttgaagttgcattgtagaagtttagaagctctggctatgggttgcctaaattgatgttttgaggaagcatattaatgttataaacttcgctgactttgaaggttgtgttgtagcatgaggaacacaaataaaacaattctaaatcaaac

SEQ ID NO: 112555 - DNA, 2028 bp, Homo sapiens
tgctggcccttacgcgcgtctgctggccctacccactatctacttccttaattatttattttatattttttagaggcagggtctctctgttgaccaggctggagtttagtggcatgatcatagctcactgcagcctcagtgtctaagtagctaggactattggctcacaccaccgtgatcagctaatttttttgttttttgtagacacttggtctcactgtgttgcccagcatgatctcaaactcctggcctcaagccatcctcccacctcagcctctcaaagtgttgggattacagacatgagccaccccgcccagccctgtttcctttattaaggcttccatgctactgtgcccacgatggtctcatcacttgtccaggagatttatctgaattattgccctgtaatttagaaagttaaatttttgttgtctcttaagtaaataattatttgtggtgacttatgcccttttgattttactgtcttttgtgattatatttttttgctattacagacacacgacttccagtgtattttgaaatagatttaagcaataaactttcagtccagccaccttgcccagcccacatcatacagtttgaaatgaaactttgccacaaccagcctttgctgtagcacacacatatatcactgaacctgtttgaaataaagttttttttctttttcatgattcgtctttgagtacctccaggctgaaagactgttgtaccagtaaaaacttaaaggcacaaattctccttgaagaccttctcccttttatgtggccccatattttatgttgctttatctttgaaattttgcatgaaaaggaaatgaatggattcgaatgaaattgtcctttagagcatgattacttgttcccatggacaaatatttttctccccttgctcttcctggcctgaaacacgggaaaccagagtcaaaagttatctccctctccctgtgatgccttgagatttttttctgcgttgtttaatgcctgaaatccaagtcttcctccatgggaaaatactgttataccaaataattctagatgagtaacaaagatctttttaggccttcattttatgttttttcttaactgttatattatgattgtgacatagattatactactactaatttttggatgtttcaaaaggtcaagaagtaaaagatgttagaaagcaatgagtgagtccttttgatttttaacttattccccatgtccctatacttcgtgtgcttttcctttttttttttgagacggaggctcactccgtcacctaggctagagtacagtggcacgatcttggctcgctgcaacctctgcctccctgattcaagtgattctcgtgcttcagcctcccatgtagctgatattacaggcacttgccaccatacccggctaattttggtatttttagtagagatggggtttcaccatgttgcccaggctggtcttgaactcctaacctcaggtgatccgcccgcctctgccttccaaagtgctgggattacaggcgtgagccactctgcccggcttatttttctttatgtttttgcttcgtaagaggttctgttgagcagtgatttgcaactcttgctgacgttgctggggaagctttaaaaaaaaaaaagatgccccacagagattctgattttaattgttctgatttaattggcttggagtagaattcaggcattgatatctttaaaaactccccagtgttgagaaacaaatttagagagttgagaagtaggtatattaaattacagaatcttactgagttttggtagactgataatacaatttgctttgcttttcttaaatttgcattgagatgggatttgaagcatattgtgctcttgtgaatgttgaagttgcattgtagaagtttagaagctctggctatgggttgcctaaattgatgttttgaggaagcatattaatgttataaacttcgctgactttgaaggttgtgttgtagcatgaggaacacaaataaaacaattctaaatcaaac

SEQ ID NO: 112556 - DNA, 1910 bp, Homo sapiens
cttgcagtgagccgagatggcgccactgcactccagcctgggcgacagagcgagactccgtctcagaaaaaactacaaccttgactatagtcccatattttagtccaaatactgtgattggcttctcttcctgttagacacaacctatgcaaaaccaaatgaatttgggttcggtatttctatcgtcattggctttggaaatcatttcacacttaatagaaaaattgtgagagttttacagaaaactcctctatagctttttcctagattgacaaacacacatacagatttatttacatatataagtttttttctgaaccatttgagtgtaggctatatatgttatgcttcttgatctcttaatacttcagtgtatatttcccatcaaaaaaggatattcttatgtaaccacttagaaatttaacattggcaaaatactgaaatctacagtgcatgtttcagttttattacttgtcccaataatgtactttatgttcctcctgtttagaatcttgaattgcatttaatttcatgtctctttgatctttaatctggagttttttctttttcatgattcgtctttgagtacctccaggctgaaagactgttgtaccagtaaaaacttaaaggcacaaattctccttgaagaccttctcccttttatgtggccccatattttatgttgctttatctttgaaattttgcatgaaaaggaaatgaatggattcgaatgaaattgtcctttagagcatgattacttgttcccatggacaaatatttttctccccttgctcttcctggcctgaaacacgggaaaccagagtcaaaagttatctccctctccctgtgatgccttgagatttttttctgcgttgtttaatgcctgaaatccaagtcttcctccatgggaaaatactgttataccaaataattctagatgagtaacaaagatctttttaggccttcattttatgttttttcttaactgttatattatgattgtgacatagattatactactactaatttttggatgtttcaaaaggtcaagaagtaaaagatgttagaaagcaatgagtgagtccttttgatttttaacttattccccatgtccctatacttcgtgtgcttttcctttttttttttgagacggaggctcactccgtcacctaggctagagtacagtggcacgatcttggctcgctgcaacctctgcctccctgattcaagtgattctcgtgcttcagcctcccatgtagctgatattacaggcacttgccaccatacccggctaattttggtatttttagtagagatggggtttcaccatgttgcccaggctggtcttgaactcctaacctcaggtgatccgcccgcctctgccttccaaagtgctgggattacaggcgtgagccactctgcccggcttatttttctttatgtttttgcttcgtaagaggttctgttgagcagtgatttgcaactcttgctgacgttgctggggaagctttaaaaaaaaaaaagatgccccacagagattctgattttaattgttctgatttaattggcttggagtagaattcaggcattgatatctttaaaaactccccagtgttgagaaacaaatttagagagttgagaagtaggtatattaaattacagaatcttactgagttttggtagactgataatacaatttgctttgcttttcttaaatttgcattgagatgggatttgaagcatattgtgctcttgtgaatgttgaagttgcattgtagaagtttagaagctctggctatgggttgcctaaattgatgttttgaggaagcatattaatgttataaacttcgctgactttgaaggttgtgttgtagcatgaggaacacaaataaaacaattctaaatcaaac

SEQ ID NO: 112557 - DNA, 600 bp, Homo sapiens
cttaaacccaggagttcgagacctgcctgggcaatatagcaagaccccgttctccacacaaaggaaaaaaaaagtattgttgggccaggcacggtggctcacgcctgtaatcccggcttatttttctttatgtttttgcttcgtaagaggttctgttgagcagtgatttgcaactcttgctgacgttgctggggaagctttaaaaaaaaaaaagatgccccacagagattctgattttaattgttctgatttaattggcttggagtagaattcaggcattgatatctttaaaaactccccagtgttgagaaacaaatttagagagttgagaagtaggtatattaaattacagaatcttactgagttttggtagactgataatacaatttgctttgcttttcttaaatttgcattgagatgggatttgaagcatattgtgctcttgtgaatgttgaagttgcattgtagaagtttagaagctctggctatgggttgcctaaattgatgttttgaggaagcatattaatgttataaacttcgctgactttgaaggttgtgttgtagcatgaggaacacaaataaaacaattctaaatcaaac

SEQ ID NO: 112558 - DNA, 1509 bp, Homo sapiens
agtattgcctgcacaaatatctaccaggtctgcgacgaatagctccagcaacttcgcaccgtgttttccactcagcctaccgacaggcactgtgcagattcaagcggagagatgtccaagcagtgaggccgctgctgcaccggccatcctgagcccctactcggccttcccgtctccgcttccccgccccgcactaggacccctgcagatgatcaggcggcagccggggtgatttccttcctcttttggcaacatggcgggcggagaagctggagtgactctagggcagccgcatctttcgcgtcaggatctcaccaccttggatgttaccaagttgacgccactttcacacgaagttatcagcagacaagccacaattaacataggtacaattggtcatgtagctcatgggaaatccacagtcgtcaaagctatttctggagttcatactgtcaggttcaaaaatgaactagaaagaaatattacaatcaagcttggatatgctaatgctaagatttataagcttgatgacccaagttgccctcggccagaatgttatagatcttgtgggagcagtacacctgacgagtttcctacggacattccagggaccaaagggaacttcaaattagtcagacatgtttcctttgttgactgtcctggccacgatattttgatggctactatgctgaacggtgcagcagtgatggatgcagctcttctgttgataggtaaatacctcacaattggtttggacaaatcaatgtggaacaaatccaagatgaaatatttaaaggggaactaaggcctttaaggatcatatctattacctaagggtgacatgaatgggaactaacatgtcatccaggatgactttcctacctatcagctatcacaaaatactcaaaaagatagacttggggctgatagcttgcgagaattcttgtggtagcatttgagaaaaagaaaaaaagtcaatagttcatttttctcatttaaatcacatgaggtgatttatttagttttaaatgtatgtgtaaaactatttgtgttatggttgtgtgtgtgtatgtctgaactgtctactgtggaagtatttaagatacaaatattcataatacgtgctgaagtgtaggaataagtggagtttgaagggtagcgtatgcttgtttcttatgttagctgttgagagatttcattactagggggtaaaattttttaaaagctgctggtgcggtggctcacgcctgtaatcctagcactttgggaggctgaggtcggcggatcacctgaggtcaggagtttgagaccagcctgaccaacatggagaaacccctctctactaaaaatacaaaattagccgggtgtggtggcgcatgcttgtaatcccatctactcaggagaatctcttgaaccgggaggcagaggtggcagtgagccaagattgcgccattgcactccagtctgggtaacaagagtaaaactacatctcaaaaaaaaaaaaaaaaa

SEQ ID NO: 112559 - DNA, 1289 bp, Homo sapiens
tctccataaagaaagcccacactatattcttagattctttttattcttgcttttgtgtgttttttctgagacagtctcactctgtcacccaggttggagtgcagtggtgcgatctcggctcactacaacctctgcctcctgggttcaagtgattctcctgcctcagcctcccaagtagctgggactacaggcatgagccaccacgcctgacctctttcttcttttttttggaacatttccttattttctggcacaaaatcttccagactcatcttgtaccttctctgttccagttttagaactggccatttctcttataaatgaaaagctgagtgttcaggtgtgctcatggctcttagggtgctgttgcttctaggtcttttgagagcatagagccaggaagcatacacacatttttggctcctgactttttgctctttcccaggttattgagtttgccccttgctttccattcctcgtcacctcatcacagtccataccaccatcactttacacttcacagttagtgcgaaagactcctagtttgcctcttaacttggtcaaaattagtcttcttaaaacattttcatcatgctgtgtttaataatttctagagtcttctcactactttttgatatttgggacttttctagaaacctgcttcaacccatttaagctttccttctgcattgtcttatataaaccctctaaattagactgttttgtgccctaactgtccccataattattcacatcacccctacccactatctacttccttaattatttattttatattttttagaggcagggtctctctgttgaccaggctggagtttagtggcatgatcatagctcactgcagcctcagtgtctaagtagctaggactattggctcacaccaccgtgatcagctaatttttttgttttttgtagacacttggtctcactgtgttgcccagcatgatctcaaactcctggcctcaagccatcctcccacctcagcctctcaaagtgttgggattacagacatgagccaccccgcccagccctgtttcctttattaaggcttccatgctactgtgcccacgatggtctcatcacttgtccaggagatttatctgaattattgccctgtaatttagaaagttaaatttttgttgtctcttaagtaaataattatttgtggtgacttatgcccttttgattttactgtcttttgtgattatatttttttgctattacagacacacgacttccagtgagcccactgggggatcctctgacac

SEQ ID NO: 112560 - DNA, 734 bp, Homo sapiens
agtattgcctgcacaaatatctaccaggtctgcgacgaatagctccagcaacttcgcaccgtgttttccactcagcctaccgacaggcactgtgcagattcaagcggagagatgtccaagcagtgaggccgctgctgcaccggccatcctgagcccctactcggccttcccgtctccgcttccccgccccgcactaggacccctgcagatgatcaggcggcagccggggtgatttccttcctcttttggcaacatggcgggcggagaagctggagtgactctagggcagccgcatctttcgcgtcaggatctcaccaccttggatgttaccaagttgacgccactttcacacgaagttatcagcagacaagccacaattaacataggtacaattggtcatgtagctcatgggaaatccacagtcgtcaaagctatttctggagttcatactgtcaggttcaaaaatgaactagaaagaaatattacaatcaagcttggatatgctaatgctaaggtaagctgtgtactgtggaacgagaaactaactttaattgttgtgcagataacaaatcaaaatctttttttattgaaattttagatttataagcttgatgacccaagttgccctcagcctcccgagtagctgggattacaggcgtgagcccccatgcccagctagtttttatttttatttatttatttatttatttttgagacggagtctttctgtgtcg

SEQ ID NO: 112561 - DNA, 575 bp, Homo sapiens
  misc_feature (533)..(533): n is a, c, g, or t
  misc_feature (553)..(553): n is a, c, g, or t
agtattgcctgcacaaatatctaccaggtctgcgacgaatagctccagcaacttcgcaccgtgttttccactcagcctaccgacaggcactgtgcagattcaagcggagagatgtccaagcagtgaggccgctgctgcaccggccatcctgagcccctactcggccttcccgtctccgcttccccgccccgcactaggacccctgcagatgatcaggcggcagccggggtgatttccttcctcttttggcaacatggcgggcggagaagctggagtgactctagggcagccgcatctttcgcgtcaggatctcaccaccttggatgttaccaagttgacgccactttcacacgaagttatcagcagacaagccacaattaacataggtacaattggtcatgtagctcatgggaaatccacagtcgtcaaagctatttctggagttcatactgtcaggttcaaaaatgaactagaaagaaatattacaatcaagcttggatatgctaatgctaagtgtagatgaaagaattacncgaattgatggagatatgancgccagaagaacttttagcgcc

SEQ ID NO: 112562 - DNA, 428 bp, Homo sapiens
ccgagatcgtaccaccgcactccagactgggtgacagagtgagactgtctcagaaaaaacacacaaaagcaagaataaaaaagaatctaagaatatagtgtgggctttctttatggaggagcaggctttgggaacaaatttgaattcagaagataagcaggtaaaatttatcacaagattgtgtggtaatgagagtgaagtggatgtaagatttatgatttcttttattttcattttgcagtttaattggttggggtcagataagaagaggagtgacaatcaagccaacagtagatgatgactgaagaataccagttaaataatacattcggatggatttggaagttggaattcctcttaacaaccaaggggtttattttcaaagcaatattggggaattgatttcacagttcgttaccttagtaggt

SEQ ID NO: 112563 - DNA, 432 bp, Homo sapiens
aaaaacttaaaggcacaaattctccttgaagaccttctcccttttatgtggccccatattttatgttgctttatctttgaaattttgcatgaaaaggaaatgaatggattcgaatgaaattgtcctttagagcatgattacttgttcccatggacaaatatttttctccccttgctcttcctggcctgaaacacgggaaaccagagtcaaaagttatctccctctccctgtgatgccttgagatttttttctgcgttgtttaatgcctgaaatccaagtcttcctccatgggaaaatactgttataccaaataattctagatgagtaacaaagatctttttaggccttcattttatgttttttcttaactgttatattatgattgtgacatagattatactactactaatttttggatgtttcaaaaggtca

SEQ ID NO: 112564 - DNA, 3108 bp, Homo sapiens
  misc_feature (2908)..(2908): n is a, c, g, or t
  misc_feature (2914)..(2914): n is a, c, g, or t
  misc_feature (2917)..(2917): n is a, c, g, or t
agtattgcctgcacaaatatctaccaggtctgcgacgaatagctccagcaacttcgcaccgtgttttccactcagcctaccgacaggcactgtgcagattcaagcggagagatgtccaagcagtgaggccgctgctgcaccggccatcctgagcccctactcggccttcccgtctccgcttccccgccccgcactaggacccctgcagatgatcaggcggcagccggggtgatttccttcctcttttggcaacatggcgggcggagaagctggagtgactctagggcagccgcatctttcgcgtcaggatctcaccaccttggatgttaccaagttgacgccactttcacacgaagttatcagcagacaagccacaattaacataggtacaattggtcatgtagctcatgggaaatccacagtcgtcaaagctatttctggagttcatactgtcaggttcaaaaatgaactagaaagaaatattacaatcaagcttggatatgctaatgctaagatttataagcttgatgacccaagttgccctcggccagaatgttatagatcttgtgggagcagtacacctgacgagtttcctacggacattccagggaccaaagggaacttcaaattagtcagacatgtttcctttgttgactgtcctggccacgatattttgatggctactatgctgaacggtgcagcagtgatggatgcagctcttctgttgatagctggtaatgaatcttgccctcagcctcagacatcggaacacctggctgctatagagatcatgaaactgaagcatattttgattctacaaaataaaattgatttggtaaaagaaagtcaggctaaagaacaatacgagcagatccttgcatttgtccaaggtacagtagcagagggagctcccattattccaatttcagctcagctgaaatacaatattgaagttgtttgtgagtacatagtaaagaaaattccagtacccccaagagactttacttcagagccccggcttattgttattagatcttttgatgtcaacaaacctggctgtgaagttgatgaccttaagggaggtgtagctggtggtagtatcctaaaaggagtattaaaggtgggccaggagatagaagtaagacctggtattgtttccaaagatagtgaaggaaaactcatgtgtaaaccaatcttttccaaaattgtatcactttttgcggagcataatgatctgcaatatgctgctccaggcggtcttattggagttggaacaaaaattgaccccactttgtgccgggctgacagaatggtggggcaagtacttggtgcagtcggagctttacctgagatattcacagaattggaaatttcctatttcctgcttagacggcttctaggtgtacgcactgaaggagacaagaaagcagcaaaggttcaaaagctgtctaagaatgaagtgctcatggtgaacataggatccctgtcaacaggagggagagttagtgctgtcaaggccgatttgggtaaaattgttttgaccaatccagtgtgcacagaggtaggagaaaaaattgcccttagccgaagagttgaaaaacactggcgtttaattggttggggtcagataagaagaggagtgacaatcaagccaacagtagatgatgactgaagaataccagttaaataatacattcggatggatttggaagttggaattcctcttaacaaccaaggggtttattttcaaagcaatattggggaattgatttcacagttcgttaccttagtaggtaacggtaaggttattcttttttttttttttttttggttatgaaaacttagggactaaaattaatataaaaattggcataatgttggattgaatctacattttggcagaagttaaacattcccacataatgtcaaaattatacatcatgcagttctgtttttttgtttgttttattttgttttgtttttgagtctggctctgtcacccaggctggagtgcagtggcgtgatctgcaacctctgccccccgggttcaagcgattctcctgcctcagcctcccgagtagctgagattacaggtgcgcgccaccacacttggctaatttttgtattattagtagagacggggtttcagcatgttggctaggccggtctctcctgacctcagggtgatcagcccacctcggcctcacaaagtgctgggattacaggcgtgagccaccttgcccagcccacatcatacagtttgaaatgaaactttgccacaaccagcctttgctgtagcacacacatatatcactgaacctgtttgaaataaagttttttttctttttcatgattcgtctttgagtacctccaggctgaaagactgttgtaccagtaaaaacttaaaggcacaaattctccttgaagaccttctcccttttatgtggccccatattttatgttgctttatctttgaaattttgcatgaaaaggaaatgaatggattcgaatgaaattgtcctttagagcatgattacttgttcccatggacaaatatttttctccccttgctcttcctggcctgaaacacgggaaaccagagtcaaaagttatctccctctccctgtgatgccttgagatttttttctgcgttgtttaatgcctgaaatccaagtcttcctccatgggaaaatactgttataccaaataattctagatgagtaacaaagatctttttaggccttcattttatgttttttcttaactgttatattatgattgtgacatagattatactactactaatttttggatgtttcaaaaggtcaagaagtaaaagatgttagaaagcaaaaaaaaaaaaaaaaaaaaaaaaaaaaaaaaaaaaaaaaaaaaggggaggagaganaaaaanatnaccagaaggggcccaaagagaaagcaaccacagttagtgaaaaacagggggccacttaagacgagggcacaaataagaacaaagagagaaggacaggagaaaaaaaaagtgaacgcgcgaaaaacggaaaccagtaagaactgggaaagagcacacaacaaggggggagacacataagggcacaaatacag

SEQ ID NO: 112565 - DNA, 2988 bp, Homo sapiens
  misc_feature (2788)..(2788): n is a, c, g, or t
  misc_feature (2794)..(2794): n is a, c, g, or t
  misc_feature (2797)..(2797): n is a, c, g, or t
agtattgcctgcacaaatatctaccaggtctgcgacgaatagctccagcaacttcgcaccgtgttttccactcagcctaccgacaggcactgtgcagattcaagcggagagatgtccaagcagtgaggccgctgctgcaccggccatcctgagcccctactcggccttcccgtctccgcttccccgccccgcactaggacccctgcagatgatcaggcggcagccggggtgatttccttcctcttttggcaacatggcgggcggagaagctggagtgactctagggcagccgcatctttcgcgtcaggatctcaccaccttggatgttaccaagttgacgccactttcacacgaagttatcagcagacaagccacaattaacataggtacaattggtcatgtagctcatgggaaatccacagtcgtcaaagctatttctggagttcatactgtcaggttcaaaaatgaactagaaagaaatattacaatcaagcttggatatgctaatgctaagatttataagcttgatgacccaagttgccctcggccagaatgttatagatcttgtgggagcagtacacctgacgagtttcctacggacattccagggaccaaagggaacttcaaattagtcagacatgtttcctttgttgactgtcctggccacgatattttgatggctactatgctgaacggtgcagcagtgatggatgcagctcttctgttgatagctggtaatgaatcttgccctcagcctcagacatcggaacacctggctgctatagagatcatgaaactgaagcatattttgattctacaaaataaaattgatttggtaaaagaaagtcaggctaaagaacaatacgagcagatccttgcatttgtccaaggtacagtagcagagggagctcccattattccaatttcagctcagctgaaatacaatattgaagttgtttgtgagtacatagtaaagaaaattccagtacccccaagagactttacttcagagccccggcttattgttattagatcttttgatgtcaacaaacctggctgtgaagttgatgaccttaagggaggtgtagctggtggtagtatcctaaaaggagtattaaaggtgggccaggagatagaagtaagacctggtattgtttccaaagatagtgaaggaaaactcatgtgtaaaccaatcttttccaaaattgtatcactttttgcggagcataatgatctgcaatatgctgctccaggcggtcttattggagttggaacaaaaattgaccccactttgtgccgggctgacagaatggtggggcaagtacttggtgcagtcggagctttacctgagatattcacagaattggaaatttcctatttcctgcttagacggcttctaggtgtacgcactgaaggagacaagaaagcagcaaaggttcaaaagctgtctaagaatgaagtgctcatggtgaacataggatccctgtcaacaggagggagagttagtgctgtcaaggccgatttgggtaaaattgttttgaccaatccagtgtgcacagaggtaggagaaaaaattgcccttagccgaagagttgaaaaacactggcgtttaattggttggggtcagataagaagaggagtgacaatcaagccaacagtagatgatgactgaagaataccagttaaataatacattcggatggatttggaagttggaattcctcttaacaaccaaggggtttattttcaaagcaatattggggaattgatttcacagttcgttaccttagtaggtaacggtaaggttattcttttttttttttttttttggttatgaaaacttagggactaaaattaatataaaaattggcataatgttggattgaatctacattttggcagaagttaaacattcccacataatgtcaaaattatacatcatgcagttctgtttttttgtttgttttattttgttttgtttttgagtctggctctgtcacccaggctggagtgcagtggcgtgatctgcaacctctgccccccgggttcaagcgattctcctgcctcagcctcccgagtagctgagattacaggtgcgcgccaccacacttggctaatttttgtattattagtagagacggggtttcagcatgttggctaggccggtctctcctgacctcagggtgatcagcccacctcggcctcacaaagtgctgggattacaggcgtgagccaccttgcccagcccacatcatacagtttgaaatgaaactttgccacaaccagcctttgctgtagcacacacatatatcactgaacctgtttgaaataaagttttttttctttttcatgattcgtctttgagtacctccaggctgaaagactgttgtaccagtaaaaacttaaaggcacaaattctccttgaagaccttctcccttttatgtggccccatattttatgttgctttatctttgaaattttgcatgaaaaggaaatgaatggattcgaatgaaattgtcctttagagcatgattacttgttcccatggacaaatcttcctccatgggaaaatactgttataccaaataattctagatgagtaacaaagatctttttaggccttcattttatgttttttcttaactgttatattatgattgtgacatagattatactactactaatttttggatgtttcaaaaggtcaagaagtaaaagatgttagaaagcaaaaaaaaaaaaaaaaaaaaaaaaaaaaaaaaaaaaaaaaaaaaggggaggagaganaaaaanatnaccagaaggggcccaaagagaaagcaaccacagttagtgaaaaacagggggccacttaagacgagggcacaaataagaacaaagagagaaggacaggagaaaaaaaaagtgaacgcgcgaaaaacggaaaccagtaagaactgggaaagagcacacaacaaggggggagacacataagggcacaaatacag

SEQ ID NO: 112566 - DNA, 3516 bp, Homo sapiens
agtattgcctgcacaaatatctaccaggtctgcgacgaatagctccagcaacttcgcaccgtgttttccactcagcctaccgacaggcactgtgcagattcaagcggagagatgtccaagcagtgaggccgctgctgcaccggccatcctgagcccctactcggccttcccgtctccgcttccccgccccgcactaggacccctgcagatgatcaggcggcagccggggtgatttccttcctcttttggcaacatggcgggcggagaagctggagtgactctagggcagccgcatctttcgcgtcaggatctcaccaccttggatgttaccaagttgacgccactttcacacgaagttatcagcagacaagccacaattaacataggtacaattggtcatgtagctcatgggaaatccacagtcgtcaaagctatttctggagttcatactgtcaggttcaaaaatgaactagaaagaaatattacaatcaagcttggatatgctaatgctaagatttataagcttgatgacccaagttgccctcggccagaatgttatagatcttgtgggagcagtacacctgacgagtttcctacggacattccagggaccaaagggaacttcaaattagtcagacatgtttcctttgttgactgtcctggccacgatattttgatggctactatgctgaacggtgcagcagtgatggatgcagctcttctgttgatagctggtaatgaatcttgccctcagcctcagacatcggaacacctggctgctatagagatcatgaaactgaagcatattttgattctacaaaataaaattgatttggtaaaagaaagtcaggctaaagaacaatacgagcagatccttgcatttgtccaaggtacagtagcagagggagctcccattattccaatttcagctcagctgaaatacaatattgaagttgtttgtgagtacatagtaaagaaaattccagtacccccaagagactttacttcagagccccggcttattgttattagatcttttgatgtcaacaaacctggctgtgaagttgatgaccttaagggaggtgtagctggtggtagtatcctaaaaggagtattaaaggtgggccaggagatagaagtaagacctggtattgtttccaaagatagtgaaggaaaactcatgtgtaaaccaatcttttccaaaattgtatcactttttgcggagcataatgatctgcaatatgctgctccaggcggtcttattggagttggaacaaaaattgaccccactttgtgccgggctgacagaatggtggggcaagtacttggtgcagtcggagctttacctgagatattcacagaattggaaatttcctatttcctgcttagacggcttctaggtgtacgcactgaaggagacaagaaagcagcaaagtttaattggttggggtcagataagaagaggagtgacaatcaagccaacagtagatgatgactgaagaataccagttaaataatacattcggatggatttggaagttggaattcctcttaacaaccaaggggtttattttcaaagcaatattggggaattgatttcacagttcgttaccttagtaggtaacggtaaggttattcttttttttttttttttttggttatgaaaacttagggactaaaattaatataaaaattggcataatgttggattgaatctacattttggcagaagttaaacattcccacataatgtcaaaattatacatcatgcagttctgtttttttgtttgttttattttgttttgtttttgagtctggctctgtcacccaggctggagtgcagtggcgtgatctgcaacctctgccccccgggttcaagcgattctcctgcctcagcctcccgagtagctgagattacaggtgcgcgccaccacacttggctaatttttgtattattagtagagacggggtttcagcatgttggctaggccggtctctcctgacctcagggtgatcagcccacctcggcctcacaaagtgctgggattacaggcgtgagccaccttgcccagcccacatcatacagtttgaaatgaaactttgccacaaccagcctttgctgtagcacacacatatatcactgaacctgtttgaaataaagttttttttctttttcatgattcgtctttgagtacctccaggctgaaagactgttgtaccagtaaaaacttaaaggcacaaattctccttgaagaccttctcccttttatgtggccccatattttatgttgctttatctttgaaattttgcatgaaaaggaaatgaatggattcgaatgaaattgtcctttagagcatgattacttgttcccatggacaaatatttttctccccttgctcttcctggcctgaaacacgggaaaccagagtcaaaagttatctccctctccctgtgatgccttgagatttttttctgcgttgtttaatgcctgaaatccaagtcttcctccatgggaaaatactgttataccaaataattctagatgagtaacaaagatctttttaggccttcattttatgttttttcttaactgttatattatgattgtgacatagattatactactactaatttttggatgtttcaaaaggtcaagaagtaaaagatgttagaaagcaatgagtgagtccttttgatttttaacttattccccatgtccctatacttcgtgtgcttttcctttttttttttgagacggaggctcactccgtcacctaggctagagtacagtggcacgatcttggctcgctgcaacctctgcctccctgattcaagtgattctcgtgcttcagcctcccatgtagctgatattacaggcacttgccaccatacccggctaattttggtatttttagtagagatggggtttcaccatgttgcccaggctggtcttgaactcctaacctcaggtgatccgcccgcctctgccttccaaagtgctgggattacaggcgtgagccactctgcccggcttatttttctttatgtttttgcttcgtaagaggttctgttgagcagtgatttgcaactcttgctgacgttgctggggaagctttaaaaaaaaaaaagatgccccacagagattctgattttaattgttctgatttaattggcttggagtagaattcaggcattgatatctttaaaaactccccagtgttgagaaacaaatttagagagttgagaagtaggtatattaaattacagaatcttactgagttttggtagactgataatacaatttgctttgcttttcttaaatttgcattgagatgggatttgaagcatattgtgctcttgtgaatgttgaagttgcattgtagaagtttagaagctctggctatgggttgcctaaattgatgttttgaggaagcatattaatgttataaacttcgctgactttgaaggttgtgttgtagcatgaggaacacaaataaaacaattctaaatcaaac

SEQ ID NO: 112567 - DNA, 3218 bp, Homo sapiens
agtattgcctgcacaaatatctaccaggtctgcgacgaatagctccagcaacttcgcaccgtgttttccactcagcctaccgacaggcactgtgcagattcaagcggagagatgtccaagcagtgaggccgctgctgcaccggccatcctgagcccctactcggccttcccgtctccgcttccccgccccgcactaggacccctgcagatgatcaggcggcagccggggtgatttccttcctcttttggcaacatggcgggcggagaagctggagtgactctagggcagccgcatctttcgcgtcaggatctcaccaccttggatgttaccaagttgacgccactttcacacgaagttatcagcagacaagccacaattaacataggtacaattggtcatgtagctcatgggaaatccacagtcgtcaaagctatttctggagttcatactgtcaggttcaaaaatgaactagaaagaaatattacaatcaagcttggatatgctaatgctaagatttataagcttgatgacccaagttgccctcggccagaatgttatagatcttgtgggagcagtacacctgacgagtttcctacggacattccagggaccaaagggaacttcaaattagtcagacatgtttcctttgttgactgtcctggccacgatattttgatggctactatgctgaacggtgcagcagtgatggatgcagctcttctgttgatagctggtaatgaatcttgccctcagcctcagacatcggaacacctggctgctatagagatcatgaaactgaagcatattttgattctacaaaataaaattgatttggtaaaagaaagtcaggctaaagaacaatacgagcagatccttgcatttgtccaaggtacagtagcagagggagctcccattattccaatttcagctcagctgaaatacaatattgaagttgtttgtgagtacatagtaaagaaaattccagtacccccaagagactttacttcagagccccggcttattgttattagatcttttgatgtcaacaaacctggctgtgaagttgatgaccttaagggaggtgtagctggtggtagtatcctaaaaggagtattaaaggtgggccaggagatagaagtaagacctggtattgtttccaaagatagtgaaggaaaactcatgtgtaaaccaatcttttccaaaattgtatcactttttgcggagcataatgatctgcaatatgctgctccaggcggtcttattggagttggaacaaaaattgaccccactttgtgccgggctgacagaatggtggggcaagtacttggtgcagtcggagctttacctgagatattcacagaattggaaatttcctatttcctgcttagacggcttctaggtgtacgcactgaaggagacaagaaagcagcaaaggttcaaaagctgtctaagaatgaagtgctcatggtgaacataggatccctgtcaacaggagggagagttagtgctgtcaaggccgatttgggtaaaattgttttgaccaatccagtgtgcacagaggtaggagaaaaaattgcccttagccgaagagttgaaaaacactggcggtaagtttgttagtctttgccactgtctaattaaaaaaagacacagtcttgtacagaaaaaaaagcacacaatcttccttgaggacaacagttactgtggctttcagtctcaactatttatttggatgactttgaaaactatacttcggccggccaccttgcccagcccacatcatacagtttgaaatgaaactttgccacaaccagcctttgctgtagcacacacatatatcactgaacctgtttgaaataaagttttttttctttttcatgattcgtctttgagtacctccaggctgaaagactgttgtaccagtaaaaacttaaaggcacaaattctccttgaagaccttctcccttttatgtggccccatattttatgttgctttatctttgaaattttgcatgaaaaggaaatgaatggattcgaatgaaattgtcctttagagcatgattacttgttcccatggacaaatatttttctccccttgctcttcctggcctgaaacacgggaaaccagagtcaaaagttatctccctctccctgtgatgccttgagatttttttctgcgttgtttaatgcctgaaatccaagtcttcctccatgggaaaatactgttataccaaataattctagatgagtaacaaagatctttttaggccttcattttatgttttttcttaactgttatattatgattgtgacatagattatactactactaatttttggatgtttcaaaaggtcaagaagtaaaagatgttagaaagcaatgagtgagtccttttgatttttaacttattccccatgtccctatacttcgtgtgcttttcctttttttttttgagacggaggctcactccgtcacctaggctagagtacagtggcacgatcttggctcgctgcaacctctgcctccctgattcaagtgattctcgtgcttcagcctcccatgtagctgatattacaggcacttgccaccatacccggctaattttggtatttttagtagagatggggtttcaccatgttgcccaggctggtcttgaactcctaacctcaggtgatccgcccgcctctgccttccaaagtgctgggattacaggcgtgagccactctgcccggcttatttttctttatgtttttgcttcgtaagaggttctgttgagcagtgatttgcaactcttgctgacgttgctggggaagctttaaaaaaaaaaaagatgccccacagagattctgattttaattgttctgatttaattggcttggagtagaattcaggcattgatatctttaaaaactccccagtgttgagaaacaaatttagagagttgagaagtaggtatattaaattacagaatcttactgagttttggtagactgataatacaatttgctttgcttttcttaaatttgcattgagatgggatttgaagcatattgtgctcttgtgaatgttgaagttgcattgtagaagtttagaagctctggctatgggttgcctaaattgatgttttgaggaagcatattaatgttataaacttcgctgactttgaaggttgtgttgtagcatgaggaacacaaataaaacaattctaaatcaaac

SEQ ID NO: 112568 - DNA, 2944 bp, Homo sapiens
ggacgcgtgggtcgacccacgcgtcacctggctgctatagagatcatgaaactgaagcatattttgattctacaaaataaaattgatttggtaaaagaaagtcaggctaaagaacaatacgagcagatccttgcatttgtccaaggtacagtagcagagggagctcccattattccaatttcagctcagctgaaatacaatattgaagttgtttgtgagtacatagtaaagaaaattccagtacccccaagagactttacttcagagccccggcttattgttattagatcttttgatgtcaacaaacctggctgtgaagttgatgaccttaagggaggtgtagctggtggtagtatcctaaaaggagtattaaaggtgggccaggagatagaagtaagacctggtattgtttccaaagatagtgaaggaaaactcatgtgtaaaccaatcttttccaaaattgtatcactttttgcggagcataatgatctgcaatatgctgctccaggcggtcttattggagttggaacaaaaattgaccccactttgtgccgggctgacagaatggtggggcaagtacttggtgcagtcggagctttacctgagatattcacagaattggaaatttcctatttcctgcttagacggcttctaggtgtacgcactgaaggagacaagaaagcagcaaaggttcaaaagctgtctaagaatgaagtgctcatggtgaacataggatccctgtcaacaggagggagagttagtgctgtcaaggccgatttgggtaaaattgttttgaccaatccagtgtgcacagaggtaggagaaaaaattgcccttagccgaagagttgaaaaacactggcgtttaattggttggggtcagataagaagaggagtgacaatcaagccaacagtagatgatgactgaagaataccagttaaataatacattcggatggatttggaagttggaattcctcttaacaaccaaggggtttattttcaaagcaatattggggaattgatttcacagttcgttaccttagtaggtaacggtaaggttattcttttttttttttttttttggttatgaaaacttagggactaaaattaatataaaaattggcataatgttggattgaatctacattttggcagaagttaaacattcccacataatgtcaaaattatacatcatgcagttctgtttttttgtttgttttattttgttttgtttttgagtctggctctgtcacccaggctggagtgcagtggcgtgatctgcaacctctgccccccgggttcaagcgattctcctgcctcagcctcccgagtagctgagattacaggtgcgcgccaccacacttggctaatttttgtattattagtagagacggggtttcagcatgttggctaggccggtctctcctgacctcagggtgatcagcccacctcggcctcacaaagtgctgggattacaggcgtgagccaccttgcccagcccacatcatacagtttgaaatgaaactttgccacaaccagcctttgctgtagcacacacatatatcactgaacctgtttgaaataaagttttttttctttttcatgattcgtctttgagtacctccaggctgaaagactgttgtaccagtaaaaacttaaaggcacaaattctccttgaagaccttctcccttttatgtggccccatattttatgttgctttatctttgaaattttgcatgaaaaggaaatgaatggattcgaatgaaattgtcctttagagcatgattacttgttcccatggacaaatatttttctccccttgctcttcctggcctgaaacacgggaaaccagagtcaaaagttatctccctctccctgtgatgccttgagatttttttctgcgttgtttaatgcctgaaatccaagtcttcctccatgggaaaatactgttataccaaataattctagatgagtaacaaagatctttttaggccttcattttatgttttttcttaactgttatattatgattgtgacatagattatactactactaatttttggatgtttcaaaaggtcaagaagtaaaagatgttagaaagcaatgagtgagtccttttgatttttaacttattccccatgtccctatacttcgtgtgcttttcctttttttttttgagacggaggctcactccgtcacctaggctagagtacagtggcacgatcttggctcgctgcaacctctgcctccctgattcaagtgattctcgtgcttcagcctcccatgtagctgatattacaggcacttgccaccatacccggctaattttggtatttttagtagagatggggtttcaccatgttgcccaggctggtcttgaactcctaacctcaggtgatccgcccgcctctgccttccaaagtgctgggattacaggcgtgagccactctgcccggcttatttttctttatgtttttgcttcgtaagaggttctgttgagcagtgatttgcaactcttgctgacgttgctggggaagctttaaaaaaaaaaaagatgccccacagagattctgattttaattgttctgatttaattggcttggagtagaattcaggcattgatatctttaaaaactccccagtgttgagaaacaaatttagagagttgagaagtaggtatattaaattacagaatcttactgagttttggtagactgataatacaatttgctttgcttttcttaaatttgcattgagatgggatttgaagcatattgtgctcttgtgaatgttgaagttgcattgtagaagtttagaagctctggctatgggttgcctaaattgatgttttgaggaagcatattaatgttataaacttcgctgactttgaaggttgtgttgtagcatgaggaacacaaataaaacaattctaaatcaaac

SEQ ID NO: 112569 - DNA, 2771 bp, Homo sapiens
agtattgcctgcacaaatatctaccaggtctgcgacgaatagctccagcaacttcgcaccgtgttttccactcagcctaccgacaggcactgtgcagattcaagcggagagatgtccaagcagtgaggccgctgctgcaccggccatcctgagcccctactcggccttcccgtctccgcttccccgccccgcactaggacccctgcagatgatcaggcggcagccggggtgatttccttccaaagatagtgaaggaaaactcatgtgtaaaccaatcttttccaaaattgtatcactttttgcggagcataatgatctgcaatatgctgctccaggcggtcttattggagttggaacaaaaattgaccccactttgtgccgggctgacagaatggtggggcaagtacttggtgcagtcggagctttacctgagatattcacagaattggaaatttcctatttcctgcttagacggcttctaggtgtacgcactgaaggagacaagaaagcagcaaaggttcaaaagctgtctaagaatgaagtgctcatggtgaacataggatccctgtcaacaggagggagagttagtgctgtcaaggccgatttgggtaaaattgttttgaccaatccagtgtgcacagaggtaggagaaaaaattgcccttagccgaagagttgaaaaacactggcgtttaattggttggggtcagataagaagaggagtgacaatcaagccaacagtagatgatgactgaagaataccagttaaataatacattcggatggatttggaagttggaattcctcttaacaaccaaggggtttattttcaaagcaatattggggaattgatttcacagttcgttaccttagtaggtaacggtaaggttattcttttttttttttttttttggttatgaaaacttagggactaaaattaatataaaaattggcataatgttggattgaatctacattttggcagaagttaaacattcccacataatgtcaaaattatacatcatgcagttctgtttttttgtttgttttattttgttttgtttttgagtctggctctgtcacccaggctggagtgcagtggcgtgatctgcaacctctgccccccgggttcaagcgattctcctgcctcagcctcccgagtagctgagattacaggtgcgcgccaccacacttggctaatttttgtattattagtagagacggggtttcagcatgttggctaggccggtctctcctgacctcagggtgatcagcccacctcggcctcacaaagtgctgggattacaggcgtgagccaccttgcccagcccacatcatacagtttgaaatgaaactttgccacaaccagcctttgctgtagcacacacatatatcactgaacctgtttgaaataaagttttttttctttttcatgattcgtctttgagtacctccaggctgaaagactgttgtaccagtaaaaacttaaaggcacaaattctccttgaagaccttctcccttttatgtggccccatattttatgttgctttatctttgaaattttgcatgaaaaggaaatgaatggattcgaatgaaattgtcctttagagcatgattacttgttcccatggacaaatatttttctccccttgctcttcctggcctgaaacacgggaaaccagagtcaaaagttatctccctctccctgtgatgccttgagatttttttctgcgttgtttaatgcctgaaatccaagtcttcctccatgggaaaatactgttataccaaataattctagatgagtaacaaagatctttttaggccttcattttatgttttttcttaactgttatattatgattgtgacatagattatactactactaatttttggatgtttcaaaaggtcaagaagtaaaagatgttagaaagcaatgagtgagtccttttgatttttaacttattccccatgtccctatacttcgtgtgcttttcctttttttttttgagacggaggctcactccgtcacctaggctagagtacagtggcacgatcttggctcgctgcaacctctgcctccctgattcaagtgattctcgtgcttcagcctcccatgtagctgatattacaggcacttgccaccatacccggctaattttggtatttttagtagagatggggtttcaccatgttgcccaggctggtcttgaactcctaacctcaggtgatccgcccgcctctgccttccaaagtgctgggattacaggcgtgagccactctgcccggcttatttttctttatgtttttgcttcgtaagaggttctgttgagcagtgatttgcaactcttgctgacgttgctggggaagctttaaaaaaaaaaaagatgccccacagagattctgattttaattgttctgatttaattggcttggagtagaattcaggcattgatatctttaaaaactccccagtgttgagaaacaaatttagagagttgagaagtaggtatattaaattacagaatcttactgagttttggtagactgataatacaatttgctttgcttttcttaaatttgcattgagatgggatttgaagcatattgtgctcttgtgaatgttgaagttgcattgtagaagtttagaagctctggctatgggttgcctaaattgatgttttgaggaagcatattaatgttataaacttcgctgactttgaaggttgtgttgtagcatgaggaacacaaataaaacaattctaaatcaaac

SEQ ID NO: 112570 - DNA, 1370 bp, Homo sapiens
agtattgcctgcacaaatatctaccaggtctgcgacgaatagctccagcaacttcgcaccgtgttttccactcagcctaccgacaggcactgtgcagattcaagcggagagatgtccaagcagtgaggccgctgctgcaccggccatcctgagcccctactcggccttcccgtctccgcttccccgccccgcactaggacccctgcagatgatcaggcggcagccggggtgatttccttcctcttttggcaacatggcgggcggagaagctggagtgactctagggcagccgcatctttcgcgtcaggatctcaccaccttggatgttaccaagttgacgccactttcacacgaagttatcagcagacaagccacaattaacataggtacaattggtcatgtagctcatgggaaatccacagtcgtcaaagctatttctggagttcatactgtcaggttcaaaaatgaactagaaagaaatattacaatcaagcttggatatgctaatgctaagatttataagcttgatgacccaagttgccctcggccagaatgttatagatcttgtgggagcagtacacctgacgagtttcctacggacattccagggaccaaagggaacttcaaattagtcagacatgtttcctttgttgactgtcctggccacgatattttgatggctactatgctgaacggtgcagcagtgatggatgcagctcttctgttgatagctggtaatgaatcttgccctcagcctcagacatcggaacacctggctgctatagagatcatgaaactgaagcatattttgattctacaaaataaaattgatttggtaaaagaaagtcaggctaaagaacaatacgagcagatccttgcatttgtccaaggcagaggactccaaattcactttagtgttatgggaaaagattcccgtctgctggtggaatataataggtgtacagggaggcagttgtggaggaccatgtgagcagctgggggctgggaagtccagcacggaggaaacagggagtctcatttaactattgggatgttaaggagttaccagactgtgattttattacagagggagtctcattatccacatcactgcccggaaatcactaatggagtaatcccttatcacagagaagagtaatagaaactcagcatataatccgcgcgcgcacacacacacccctcagcataaatttcctaaagctaaaattatatctaacactgtaactgacaacagcaccataacctactgaaagagatgtaaataaaagcctcccatatctgaaacataaaaatgtttttctatataactattggattgtatatacatactactctgaaagtttgtaagg

SEQ ID NO: 112571 - DNA, 1578 bp, Homo sapiens
agtattgcctgcacaaatatctaccaggtctgcgacgaatagctccagcaacttcgcaccgtgttttccactcagcctaccgacaggcactgtgcagattcaagcggagagatgtccaagcagtgaggccgctgctgcaccggccatcctgagcccctactcggccttcccgtctccgcttccccgccccgcactaggacccctgcagatgatcaggcggcagccggggtgatttccttcctcttttggcaacatggcgggcggagaagctggagtgactctagggcagccgcatctttcgcgtcaggatctcaccaccttggatgttaccaagttgacgccactttcacacgaagttatcagcagacaagccacaattaacataggtacaattggtcatgtagctcatgggaaatccacagtcgtcaaagctatttctggagttcatactgtcaggttcaaacacatgacactcagcacacagcacaatcattcaccacatcaagccttgggatcatgctcaatgctcaagcatttatcacagcttgcatgcacccaaagattgcccctcgggcccagcacatgttcatcagcatcattggtggagcagccagatcaccaccatggcacagcagctttccctcacggcaccattcacaggggtcacctaaacaggggcacactctcaacacacattcatgatccagacacccatgttctctccctctctaggtatgacaccatggtcgcgtagggcccccacagccatcatatcattgagcatcgggctacactcaattagacattgcaaaccacgaggaagcctaagaccagcgtagcaatgtcgcatagcccagcactccatcacggtagtcagggcatccagcttaggggctcacaatagcacactccatttggcccacccacgcaggcgcatcacagtcaccaaattcaagaggcaaaacgacgcattgggggattagcagtttaatccaggcaggcaatcccagtggcaaaaagttggcaaaggacaatttattagataagggcattagacagttaaccagaaaaaaattcaaaacagttacgggaatcatgaagagcatccacaaaaagacacaaaatgttcataggggcgtgcacagaaaggcagaaagaaacacttaacccagaaaaggaccacaggtacactatccccattaggggcacacatacacgggcaaccacaaaagggcagtattacaccaaggaaacagagaccacaagcaacacaggagaagagcacataccccacgaaccacattgatcaaattatgccgccacaacaaatttatgtagccaagggcctatccaagacggacctggaccaagaagagtaaccagcacagcacactcatggcaacagaggcgacgaggaagaaagggacgacacagctcaacccaacttacagagtacagcacggccacagacaactgttgcccaacgatactcacaccccaaccaagcagaaaacaaaccatcgtcaacccacagcacgacaagaaccccacagaacagataaacaggggcagacacca

SEQ ID NO: 112572 - DNA, 329 bp, Homo sapiens
gagccaaaaatagggcagtgggcaagtgtcctgtgctaccaaggttgcgggctgtccaggatggtgggtgggttatggacagttcctggaagtgggcaggctcaccacccagaccccagactccaggaggttcagtctgcctcccctcatctgcaggagtgggcactaaaccaagaaaatgggagcaatgaatcacggggttcacagccaataagaatccccaaagccgtgcgcagtggctcatgcctgtaatcccaacattttgggaggccaaagtgagaggattacttgaagccaagagtttgaggctgcagtgagctatgactgtt

SEQ ID NO: 112573 - DNA, 216 bp, Homo sapiens
cactccattcaaggaagtatcacggatgacttagatgagcagttcgaacagtcgaaaggacctgaataggctgagagcagtgactcacacctgtaatgccagcactttgggaggccaaggcaggcagatcatctgaagccagtagttcaagaccagcctgaccaacatggtgaaaccccatctctactaaaaatacaaaaattagctgggcatgga

SEQ ID NO: 112574 - DNA, 4650 bp, Homo sapiens
  misc_feature (1)..(2): n is a, c, g, or t
  misc_feature (298)..(298): n is a, c, g, or t
  misc_feature (342)..(342): n is a, c, g, or t
  misc_feature (1016)..(1016): n is a, c, g, or t
  misc_feature (1124)..(1124): n is a, c, g, or t
  misc_feature (2816)..(2816): n is a, c, g, or t
  misc_feature (2952)..(2952): n is a, c, g, or t
  misc_feature (2987)..(2987): n is a, c, g, or t
  misc_feature (3083)..(3083): n is a, c, g, or t
  misc_feature (3089)..(3089): n is a, c, g, or t
nngtctccatagtttagttttttccagaatgtcatatagttggaatcatacagtatacagcctcttcagattggcttctagtcacctggcaatgtgcatttaaatttcctctatgtcttttcatgggttgatagctcatttctttttagcactgaataatattttggttgtaccacagttcacccattcatatactaaaggacatcttagttgcttccaggttttagcaattatgaatcaagctgctataaacattcatgtgtaggtttttgtgtagacataagtttgcacctccttngggtaaaatgcaaagagtgatattgctgtatcagatggtaagantatgtttaattttatcagaaactgccagactgtcttgcaaaatggttacacctgtttgtattcccttcagcaatacgttgaagttcttgttgcatcgcatcttggccagcatttgtttttgtcagtgtttcggattgtcaccattctagtaggttttgtagtgctgtctcattttaatttgcagttccgtcaatgtaatttgcaattctatcaatggcatacgatgtaaagtttcattttaacaatcatatatctgaagaatattttcccagatattcatgggtgaagatatttaggaatgcatgtattgaggggagaaaacttgggtatatatatataaagagattgtcttatattttttaaactacccctcactaactagcagcgaataacatatattggaaattgttgtttttaattgcctgaatttcaaatgttaagttttccaagcattcactattgattaggttggaaagtttacatgctattgagttgtatcaatagaaacgtatatttttttccttttcattttaaaacgtttaaaaatttttttggagtgaggtctcattctgtcacccaggctggagtgcagtgacgcaatcataggtcaccatacctctaattcctgacctcaagggatcctcctgcgttggtcccccaaaaccctgagattncaggcactggacaccatgcctgacccttatttacttttttttttttaaagtggagtctccctctgtcgcccacgctggagtgcagtggcacgatctcagctcactgcnaactctgtctcctgatcaagtgattctcctgtctcagccttctaagtagctgggatacaggggtgcaccaccatgcccggctaactttttttttttttttttttttttgagacagagtctttctctgttgcccaggctagagagcagtggtgttatcatggctcattgcagcctccaccttctggtttcaagcgattttcctgcctcagcctcccgagtagctgggactacaggtgcccaccaccacacctggctgattttttgtgtttttaatagagatgggtttcaccatgttgaccaggctggtctcaaactcctgacctcaggtgatctgcccgcttcggcctcccaaactgcttggattacaggcttgagccaccgtgcttggccttaatttcttttgtatttttagtatttatggggtttcaccatgttggccaggctggtccctaactcctgacctcaagtgatctgcctgcctcagcctcccatagtgctgggattacaagtgtgagccaccatgtccggcccagtttacttttattagaaaagattcatttgctgatgtatattgttcagtatcttaatacttttttcatgagttaatactttcttggcaaagaggcctaatatcttgaggtttttaaaaatacccatgaatatttcatgtaagtgatttttgcttcattctttgtgtctacaatttgttatctaatatttctggctcctaacgattttcttttttgttttttttgagatgcagtcttgctgtgtcgccaagcttttcatagagatggggtttcaccatcatggccaggctggtctcgatcccctgacctcaggtgatctgcctgcctcagccccccaaagtgctgaggttacaggagtgagccaccgcgcctggccaacagttcttatttaatctttctcatgaaagtttaattggttataaccttattgttctgttatgtaaccttctttagtgaaggaaaaggtaatagaatatagtttgctcacactaaaatattttcaattgctaaatatagttttttttagggaatttatttttaggaatatttagatattcctaattgattaaaaaggctgaatcctgttgtcagaacttactatatttttctctagaattatatattttttagtggatttaaatgttctacattattttagcattttcgttttttgagacatagaacctaaatagcatgtggtgattcctggacaattcttaaagctttttttgagataaacatgagaggtctttatcaataaagaattttgactgtgacctaaaaaagagtattgattgtgcccattaagattgcattcactcaaacaagagttatattgataaagtgttagatgaatacctctcgtcattgatcattaaatggtgttccagttgacacagttaaagcagtttttatttagttcagtgagtgtatccccaagtttaggtggtcatactacactttagctttacctgagtactgtgttaagtcattcctttaaattaggttattggtaatacacacacacatatacacccacaaaatatacgtgttgagtatcccttatctaaaatgtttgggactagaagtgtattggaatttggatttttttgaattttgaaacatttgtgtattatgtaatgagatatcttggggatggganccagatccaaatatgaaattcacttatgtttcatatatgtcttatatacatagcctgaaggtaacttcatagaatttaatttttttattttttattttttatttttttgagacggagtcttgctgtatcgcccagnctggagtgcagtggcgtgatcttggctcactgcangctccgcctcccgggttcatgccattctcctgcctcagcctcccgagtagctgggactacaggtgccctccaccatgcccagctaatttttttgtntttttngtagagacggggtttcaccgtgttagctgggatggtcttgatctcttgacctcgtgatccatccgcctcagcctcccaaagtgctgggattatgtgtctgtccaaaaaaaattttttttaagagacagtgtctcactgtgtgacacaggcttgtcttgaattcctgggctcgagcaattggcatctcagcctcccaaagtgctgggattataggcatgaaccactatgcctggctcagtagaatattttaagtaattttgtgcgtgaaagttttgcctacattttgacttagacccatcacatgaggtcaagtatggaatcttccactttgggcatcgtgttggtgtttaaaaagttttggattttggagcacttggggttttggatggttatgctaaccttgtttcatgatagcccaagtactaaatattaaaggaaaaatatccatgttctgcacaaaaagtgccatgtgccagtagtggcatgtttaccatgccactttggaaaatatttgttaggttaatttaccttacttagtgcaagcttcctgttctatattttcatgaaagaaaactgactgcgattttaaaaatattgcttctcaaaccttttggcttccatatttctttaattttccatatcactattaaaaattattgagggcgccaaagtcctgctaaaggattatatcaatatttaccatattataagccaaagcgaggttttaaagaaaacgttacagagttaagagtcgctttcttgtacatttttgcaaatgtcttttaatgttccctttagtgtagtgggaagaatggtgttgttttatgttttgtaaatttgttttgctctataaaaaatggttggcttcccacgtttgcttttgcagtccatctattgcagaaagctttttaattaaaacgcatcaaagaagacctgactttatacggagaagtgataagggaggagtatgttaataacctttaaagataattgtggatttttttgatactactgtaaaacttaaaagtactcttacatcgaaattaattgggttggctgggcatggtggctcacacctgtaatcacagcactttggggggttgaggcaggtggatcacttgagctcaggagttcaagaccatcccaagtaacatggtaaaaccccatttctacaaaaaacacaaaaattatctgggcgtgatggtatctgcctatagttccagctacccttgaggctgaggcaggaggattgcttgaatctgggagtcagaggctgcatgagttgagatcacgccattgcaccccagcctgggcaacagagtgagactgacaaaggaaaaaaaaaaaaaaaaagaaatccgctgggctgctttgaattttgaatggattttttacccatgcatgattttttagtgttatgtaccaatcagaagaaaaatactgatgcattggcctaagcagattatccaaaatgctaatgtatttattttacaaaattaaaaagaagttacatgtcttcatattgatctcatagaaaatatccgccaaatactcaagccaa

SEQ ID NO: 112575 - DNA, 403 bp, Homo sapiens
tttccatccatcagagatgagacttaaataaattaaaaggtacttcgtggggcggctgggcctaatgataagcaattataggaagccaaatgaaggcagtgctttgtgcggggcctgtgaaattggttaagcaaaaagaataatggcctgtttcagtgattcatccctttgctcatttcagagggagcattatctcagttaagtgatgcaattaatatgaaaatgagggaatcattgtttaaggagatgaggagaaagtgaggagggggctggaagccacagtggggaaaactaagggccaccgagatggaaatttgcataggtcagtagcaatgtgatgcctttagcacgcactcaaagcttagctagcattgtaatacgtcgccattaaattctcattacg

SEQ ID NO: 112576 - DNA, 234 bp, Homo sapiens
gaattaatgcaagggtcctgagctgtatacagtgtaaattacaagcttactatgtaaattacaggatattgctatatgccaattgtactaaagataaaaaacaaaattctttttttttgaagttgcaagatttaatagagtgaaaacagagctcccataaaatgggaggggacccaaagggggttgccgttgctggctcgaatgcctgggtatatcccgatcattgtccctccc

SEQ ID NO: 112577 - DNA, 773 bp, Homo sapiens
gactgaggtgggagaatcacttgagcctgggaggttgaggctgcagtgagctgtgtttataccactgcactccagcctgctgggtaacagagcaagactccatctcaaaaagaaaagaaaaaatgctttgctacataatgaggccaggcaaaaaaaaaaaagtcctgtggaaatcatatagacaaacatttgcaaagctgctactgccattgtaccagtgttaaactgtgttctaccttgcatcttttactgatttttatgacagattttatattgtaaccattcgagaactctgtaagtgctatggcttccttaaactacgatttatcatatgctcccggtgtttactttgagactgaatggcaaccagagaatgtaaacaaccaaggtgcatctggttatgttttaaaataaagattaataaaagttttggtttttctctttctaaccttctttttaaactagaaatataatacctatagaaaagtaaatgttggccgggtgcggtggctcatgcctataatcccagcactttgggaggccgaggcaggcagatcacctgaggtcaagagttcgagaccagtctggccaacatggtgaaaccctgtctctactaaaaatacaaaaattagccgggcatagtggcagacacctgtaatcccagctactgggaaggctgagccagaatggcttgaacctgggaggcagaggttgcagtgagccgagatcgccccattgcactccagcttgagcaacaagagcgaaactgtctc

SEQ ID NO: 112578 - DNA, 812 bp, Homo sapiens
aggccaggttagtgaggaaggctgtgttctccagattgtggtttcctctttaagacagggtcttgctctgttgcccaggctgcagtgagctgtgtttataccactgcactccagcctgctgggtaacagagcaagactccatctcaaaaagaaaagaaaaaatgctttgctacataatgaggccaggcaaaaaaaaaaaagtcctgtggaaatcatatagacaaacatttgcaaagctgctactgccattgtaccagtgttaaactgtgttctaccttgcatcttttactgatttttatgacagattttatattgtaaccattcgagaactctgtaagtgctatggcttccttaaactacgatttatcatatgctcccggtgtttactttgagactgaatggcaaccagagaatgtaaacaaccaaggtgcatctggttatgttttaaaataaagattaataaaagttttggtttttctctttctaaccttctttttaaactagaaatataatacctatagaaaagtaaatgttggccgggtgcggtggctcatgcctataatcccagcactttgggaggccgaggcaggcagatcacctgaggtcaagagttcgagaccagtctggccaacatggtgaaaccctgtctctactaaaaatacaaaaattagccgggcatagtggcagacacctgtaatcccagctactgggaaggctgagccagaatggcttgaacctgggaggcagaggttgcagtgagccgagatcgccccattgcactccagcttgagcaacaagagcgaaactgtctc

SEQ ID NO: 112579 - DNA, 797 bp, Homo sapiens
aagaattcggcacgaggagcctcctaagtagctgggattacaggtgcgtgccaccacacccggttaattattttattttattttttttgagatggtgtccctgctgggtaacagagcaagactccatctcaaaaagaaaagaaaaaatgctttgctacataatgaggccaggcaaaaaaaaaaaagtcctgtggaaatcatatagacaaacatttgcaaagctgctactgccattgtaccagtgttaaactgtgttctaccttgcatcttttactgatttttatgacagattttatattgtaaccattcgagaactctgtaagtgctatggcttccttaaactacgatttatcatatgctcccggtgtttactttgagactgaatggcaaccagagaatgtaaacaaccaaggtgcatctggttatgttttaaaataaagattaataaaagttttggtttttctctttctaaccttctttttaaactagaaatataatacctatagaaaagtaaatgttggccgggtgcggtggctcatgcctataatcccagcactttgggaggccgaggcaggcagatcacctgaggtcaagagttcgagaccagtctggccaacatggtgaaaccctgtctctactaaaaatacaaaaattagccgggcatagtggcagacacctgtaatcccagctactgggaaggctgagccagaatggcttgaacctgggaggcagaggttgcagtgagccgagatcgccccattgcactccagcttgagcaacaagagcgaaactgtctc

SEQ ID NO: 112580 - DNA, 1398 bp, Homo sapiens
aggccaggttagtgaggaaggctgtgttctccagattgtggtttcctctttaagacagggtcttgctctgttgcccaggctgcagtgagctgtgtttataccactgcactccagcctgctgggtaacagagcaagactccatctcaaaaagaaaagaaaaaatgctttgctacataatgaggccaggcaaaaaaaaaaaagtcctgtggaaatcatatagacaaacatttgcaaagctgctactgccattgtaccagtgttaaactgtgttctaccttgcatcttttactgatttttatgacagattttatattgtaaccattcgagaactctgtaagtgctatggcttccttaaactacgatttatcatatgctcccggtgtttactttgagactgaatggcaaccagagaatgtaaacaaccaaggtgcatctggttatgttttaaaataaagattaataaaagcaatacaaaaacaaaaaaaaaaacgaaaaaaacctgtgttgggggggcatatggcaccttggaaaaaaggtttttctaagaaccaatatggttgtgggggggagggggcccccaggagggttaaccggccaaccgtgtggacccacatacgacgcgcgtccccccaagggaaaaacaccggggaacaagaaccaacagatggcgcaggagaactctccacacacagcaatgacaaaaaacagcgccacgcggcgaagcaaacaccacgcaaggcgtttctcccagacagcaacaagtcacaacacattaggaccaactacacaaggaaggagtcacaccaacaaccggcagcgaactcccttaaacaacaagacaaaaggagcagtgctccacaaaaggcggagaaacgcagcaagcaagataacgaaaagaaatggacacaacgcagccccacgagcaaaccgggggagcacagacagagagagagagaagagagaacacgacaaaacaaaagacaaacaacagacaaaacacacgagaacagaaaacacagcaaaaccacgagaaaaccaacaagaaacacaaaccaacagtagaacaagaaagagccgcaggtagaaaggaggacagaggggcagaaagaaagcaagcgagagagacgagagacacacgagagaaagaagaaggaagcgcaagccacggaaaagagaacgaaacagagagaaaagacaggaaaggcagagaaagaaacgagaaagagagaagaaagcgagagaggacgaaggaagcgagacacgaagagaacagacaacagaaggagaagagagaggcaagcgaagaacgaagctacgaacgacgcaagaagcacgaggcaagaacgaagaacgacagagaagcaagaagggagagcaaaggagagcgacaatgcaccc

SEQ ID NO: 112581 - DNA, 744 bp, Homo sapiens
gagtcccaggctcaagtgattctcccacctcagtctcctgagtagccctgctgggtaacagagcaagactccatctcaaaaagaaaagaaaaaatgctttgctacataatgaggccaggcaaaaaaaaaaaagtcctgtggaaatcatatagacaaacatttgcaaagctgctactgccattgtaccagtgttaaactgtgttctaccttgcatcttttactgatttttatgacagattttatattgtaaccattcgagaactctgtaagtgctatggcttccttaaactacgatttatcatatgctcccggtgtttactttgagactgaatggcaaccagagaatgtaaacaaccaaggtgcatctggttatgttttaaaataaagattaataaaagttttggtttttctctttctaaccttctttttaaactagaaatataatacctatagaaaagtaaatgttggccgggtgcggtggctcatgcctataatcccagcactttgggaggccgaggcaggcagatcacctgaggtcaagagttcgagaccagtctggccaacatggtgaaaccctgtctctactaaaaatacaaaaattagccgggcatagtggcagacacctgtaatcccagctactgggaaggctgagccagaatggcttgaacctgggaggcagaggttgcagtgagccgagatcgccccattgcactccagcttgagcaacaagagcgaaactgtctc

SEQ ID NO: 112582 - DNA, 872 bp, Homo sapiens
aggtaagtcctcttcccccaagacatcagtgtggagtatcctgttgagctctgttcttgtccccttagaccttgagatgacaagagaatcattgccaaatacaagaggacacctggttacatttccatttcagatcaaaaaatggatttttttaggataagtatatctcaagtactgaataggatatacttatactaaacatttattgtttatttaactgagcatcttgtatttttacttgctaaatcttgcaaccctagacaggtagagctggtcctctcttaacaggaacagaagcagagccaagagccccacatgaaagtgctgaccaaacccaaaccctcatgaagaacccaccaagcctggctattgctgtcctaaaagatttgccctatagaggttcatccacatataatttttccagaactgacctggttagctttatctactgcccccaaattagttcatatccaaacaattccatacctgtctctcagtctgtatataaacagtttgcattcaatgtatttgtacctgctgatacctttgtacatgctgtctctttctctaacagatccagattcaatacttactaaatgccaacaatgagacagagaatagtatgaggtgctgtccttatcttcacaacaaccctgtgagggaagcctcacttattattattgctgttcctgttctccagatgagaaaactgagcttcaaagattccctgtagctgggctcagtgtgtgagtctgtaattccagcttctttggaagttgaggcaggaggatcccttgagcccagaagttggagggtgcagtgagctatgattgcaccacttaactccagcctgggtgacagagcaagatatc

SEQ ID NO: 112583 - DNA, 340 bp, Homo sapiens
ccatcctcacttgattaagtaaaaagcttacaacatgcaatccagtttacgtgttagatgaggtcttctcagctagcatcacataattcaaaagcagacaacaatgcaactggaataactcaaaggcctaacaccaacatcagaaatgtgttgagggccaggcgcagtggctcacgcctgtaatcccagcactttgagaagccgaggagggcagatcacctgaggtcaggagttccagaccagcctcgccaacatggtgaaaccccgtacctactaaaaatacaaaaattagctgggcatggtggcacatgcctgtaatctcacctacttgggaggctga

SEQ ID NO: 112584 - DNA, 386 bp, Homo sapiens
gggattacaggcgtgagccactgcgcccagcctcaatattaaaaaaaaaattttttaaggccatttctactccagagttttttaaggatcaaatgatatactgtatgttaatcattcagcacaagctggtgctaaaagcaaacgctagttgttttctgttcccagactttgttcattaagttgttctccacatgtatggaaagctttctctacaccaggtcagaggatgtgaataagaacatggtagagaacagcaagtaaaacagctgtggagtagatgccagcacagtaccgtagaaatcagcacagggtgctgtgggggccttgaggaggggtttctaaccccgtcttgggggaatggtgatgtcaaggaaagtgtcccagag

SEQ ID NO: 112585 - DNA, 784 bp, Homo sapiens
ggaagatattctataaatatttgttgaataaaatggatagaagatgaatagatagatgaatgaatataatttatttgagtgtatgaaatgagtgactcatctaacttaattttcttctaatagttaatcagttgccatggcatcattggaaaaacaaatctatgttttgttcactgactgaaataccaccttcatattatctttaattcttacatatactttatttctgtatttgctcttctattttactcctgtttatttctttgaactacactgcttaaaatattttctctatataaattaactttatattggatataaaaattctactatatttatattagatatatttagagaggttaagcttccatctctgccctctctcctgtgttctgatgttttccctataggtacaaatttttattggttttccatttatcctttttttatttttttttaaatgtaagcaaacagtataggtatttgtaccccttttttttctttataaaaaagtagcaaactgtgcgtgcttatttatatcttgctttttccttttaaacttaatatatcctggtggtcaccttatagcaatatgtaaagatctttgtcattttttaaggagatggatagtactccattgtttgtatccactatatgttcaatcatttctgtatagtaggatatgtgaaatgttatcagtcttttgctacctgaattagtgcttcaacaaatagccttgtgcatatatcatttcgtatatttgtcattatgcctttgggagatc

SEQ ID NO: 112586 - DNA, 409 bp, Homo sapiens
ggtaaccagattgaccgtgataacctcttggcagtctctgacccagatggacttgtttatcttggggttcagatgtcaataatcagcccatttcctgtggaggttgggacagcttggctgctcctggagacctggattcaagactgcagatacctttgttcagccttttctcactttccccccaaatggaaatagagatgttctcagctttgcttgaactccacaaatatatctgtacctaacatgggattatacaaaccttttcatagttctttgcagacaacaaagaaaaacatggcttctgagattatgatgtgtgagacaccaatttttctgtataagtagtatttttaattataaaaggaagacataattatggcaaaaagaaattcaaagagtagagaagggc

SEQ ID NO: 112587 - DNA, 492 bp, Homo sapiens
gatttggaaggtgtttttttttttctccccctcaccccgcaagactgggatggtgttttgaagggttccttgatacctgagcttagtaaacacttgtccaccttggggatctttttacctgaggcaaaggagaagcgggttattattttgaaattagcagtctatttctgaaagtaaggaaatactagctaccctgaaaaaccagttgtttggtaattgaaactggtttaaaagcactgtgtttgggcatcgaaactagtttaaagggattgtgtttcctgcatactttgcaaagaactatgtgtttatgtggatacagccccttgcccccaaccataattggtaaatgcagcgttattttttgagattgaggaaggcattgagtttttgaacttctgatcaatttatggtggtagttgaggattacaaatccttttaaagacacactgaatttgaagaaaatttagactagggtattgttaattgaaaagc

SEQ ID NO: 112588 - DNA, 167 bp, Homo sapiens
gtttcctcacttgtaaaaggggcaggagcattaggtggcactgtggacaggacagggctgtgtaaactgtggagtgctgtctggagggagcaggcattattgctgctgcataatggatttgacaaggttttcctcctctctctattaggactcccatggcgtccctc

SEQ ID NO: 112589 - DNA, 451 bp, Homo sapiens
ggctcagaggagagatacagatagaaatttggaaatcatcaagcagaggagaacagaaagaaggccagtgcagttgaagggttttgtgaccctttatcttgggtcacaaaagagtgacccaagataaagttgaaaaggtgggagggtcaggcatggtggtgcatgcctgtggtcccagctactaggaaggctgaggaaggaggatcacttgagcccaagagttctggactgtagagcactaagctaatcagatgtccacattaagttcagcatcactatggtgacctctcgggagcgggggaccaccaggttgccaaaggaggggtgaaccggcccaggttggaaacagcagatcaaaactcctgtgctgatcagtagtgggattccacctgtgaatagcctgtgttgcccactccagcttgggcaacatagtgacaccacatctctgtta

SEQ ID NO: 112590 - DNA, 273 bp, Homo sapiens
tgggctgagggtcaacagccgccctgctggggacaaggctttgtcctcattgaggagagtaaggccattcattcattcattcattcatccacctatccgccctggtctgggcacctgtgctgtgcctggcctcctgtgcctggcctcctgggcactgaccccgctgtgtggacccggctgtggccctgggagccctgtgcacagcccccggggacgcagcttctaagcattgaggtctgaagggaaagtcagccccatcctccagccaggcgg

SEQ ID NO: 112591 - DNA, 615 bp, Homo sapiens
aatgtatgttagaagcagtgttgacagtgtttggcagctttatgggtgtgtgaagagtggataaggaggaggagatgaaaataacgtagaggttttaaaacggtgtttggggatggcactcttgacgattggaaaaataaaatggaaagccattctggaggtgggtggataagtttcgttttggttgggtcatacagtatttgaacctaagaatcccaagaaaacttttattaaaagctatatttattgaatgttaccattttcaggtactgtgcaatgtgaatcatttaagtttttggtgacccatgtagaaaggaactgatctagtctaaacatggaactatctcttaaatcaagataacagctgtaatcatatagatgcttttcctgagttagttgttttacgtcttcctttgtgtgacttaaagtttttagtttgactctgctacttttgttctatttgtgcgtggcttgatggatttttcctgtccccatctatacactcgtcacaatgaggggctactaaataaggcagtgttctctgtttgtgtagtccccacagctgtttcctatagtaaagactctggaaaacaatgacctcatagtttccacaaa

SEQ ID NO: 112592 - DNA, 442 bp, Homo sapiens
ggccaggctgccagttccatggtccagagtgagaacttatagtgctttttccaggcctgcctatggaccaatcagcgcacacttcccctcctctgaagcccataaaaaccccagactcagccagactcaggcagacaatgggataacctgcctgtggagaggagctacccaccatgggtctcctctctgctgagagctgagcagatgatgggacgacctgcctgcagagaggagctagcttcatactgctggtctcctctatgctgagagatgagtagacaatgggaggacctgactgcagagaggagctacccactgagattctcctctgagctgttctgtcacccaataaagcacctctttgccttgctcaccctctatttgtatgcatacctcattcttcctggacacaggacaacaactcagaatccactgaatggca

SEQ ID NO: 112593 - DNA, 279 bp, Homo sapiens
ccacacccgcagtgggggagacgtggaggcttattcatcactgaagtcatggaggatcagttctccatcttaattttgggtgcattagggctgggcatggtggctcaaagcctgtaatcccagtactttgggaggccaaggtgagtggatcatttgaggtcaggagttcaagaccagcctggccaacatggtaaaaccccgtctctactaaaaatacaaaaattagccaggcatggtggcgaacacctgtagtcccagctactcaggagcctgaggcaa

SEQ ID NO: 112594 - DNA, 369 bp, Homo sapiens
catatcaaaaaaaaaaaaaaaaaatccaaaaccccaagggttttatttttcatttagagccacaggatagaaacagtttcacttttaattcctaattaagataattctatagcaaatgaatgtgtacatttctaaaagtatagttttctaaggatactgagtaggattaagtagaatttcaaagtttctgataactcttctaatagatttgttcatgttaagaggtactagtgaaactcaggatttctcctattatcacagagtgtgattatgacataaatatgaatattgaggaaacattttaataagctctttaaaatgttagacttgagaaaaaatatatttctgagaagtaaagctctgggaaaa

SEQ ID NO: 112595 - DNA, 561 bp, Homo sapiens
tttttagtagagatggggtttcaccatgttggccaggttggtctcaaactcctgaccttaagtgatccaccagcctctgactcccaaagtgctgggattaccggtatgagccactgtgcctggccaataattcattttaataccttcaagggatagtgagtttgggaataagcaaagggagtagcaaattattgctgtaaaatatatgaactatatatgaactattttgccatagagaatgtattagtctggtttttgtgttgctgtaaaggaatgcctgagactgagtaatttataaagaaaagaggtttaattggcacagggttctgtaggatgtagaagcatggtaccagcatctgcttctggtgagggcctcaggaagcttactgtcatagtgaaaggcaaagggagagaggttgttgtcacatggtgagagtggcagcaagagaaaaaggagggaagtgccacactcttttaaacaaccagatttcttgtgaactcagagcgagcactcactcatttgtgggggtggcaccaagccattcatgagggatctgcctg

SEQ ID NO: 112596 - DNA, 358 bp, Homo sapiens
gagagaactagaagtacctgggggcacaggtgccacagacagaccattagccaacaatggtacaagaatatgaaagtccagctccttgcctccagtgggggacacgtgaaggcgtagtttgcatcccagagctccctgggaatcaggctgatgctgggactttgcctgtcctgcacccttgactggcttctcccttttccctgtcctgcttccctcactcccttacctgtttctcctggcaggatgttctcaataagtcaggatctgcttcctggaaatacaacttaggacatcactcatgtacacaattactcaaatgtctatctgaggccctttcaggtttagagacaatactgaa

SEQ ID NO: 112597 - DNA, 215 bp, Homo sapiens
gacaaataaatatatattaaatactttctatctgctagccactatgacagacacttgttttaaaagcacaggctgacctcaaggaattcacagtctgataggagagataagacagtgacctccttggagttagggactgccttggtttactgttatctccatagcacaatgcctggcacatggaaggcattctataatagtttgttaaatgaacg

SEQ ID NO: 112598 - DNA, 402 bp, Homo sapiens
gaactttttctgtgcgtactggtttttcatttgttttgattttgttttccaggaatgtggagttaaaaggcaataagagaatagtgtccagttgcagagtctaggtagggggtccacagtgtccgtgtttgcgtccctgaggggtctgaggagggcagttcacgctggagcctcctctgtggcagcctctgctcagccgcaggaacctgaaggtcacgcacagcccacatcctgtgcgtctcaaagaagtcaagcctcaaaatgaaaaatgaggctgggcacggtggctcactttgggaggcctaggtgggtggatcacctgaggtcaggagttcaagaccagcctggtcaacatggtagaaccccatctctactaaaaatacaaaaattagctgggcgtgg

SEQ ID NO: 112599 - DNA, 384 bp, Homo sapiens
tcccgggttcaagcgattctgctgccccagccttccaagaagctgagattacaggcgcccaccaggcccggctaatttttatatttttagtaggggagcagtcgggctctggactacatttcccggaggattctgcgggccaataccatgtctcgcgagattttggcttcctcttagccaggtggcagaatctttcgctgtgcccaattagctgctgccacgccttggagtccggagtaacttggccaggccggccccgagcggaactagagaaagctgaggatgaggaatccggctctggtccttttgtgtgtggagggctgaggagaggagtttgcgtgtgtgattgcgatggttgccgtgggtcttcgtggtctgtgactg

SEQ ID NO: 112600 - DNA, 686 bp, Homo sapiens
ggcctgcagcaacccctcccagcaggtcagatcccggccctggtcccggcaccactccaaagcctcctgggctgagttctccattctgagggaacttctggctcaagacgtgctctgtgatgtcagcaaaccctaccgtctggccacgcctgtttatgcctccctcacacctcggtcaaggcccaggccccccaaagacagtcaggcctcccctggtcgcccgtcctcggtggaggaggtaaggatcgcagcttcacccaagagcaccgggcccagaccaagcctgcgcccactgcggctggaggtgaaaagggaggtccgccggcctgccagactgcagcagcaggaggaggaagacgaggaagaagaggaggaggaagaggaagaagaaaaagaggaggaggaggagtggggcaggaaaaggccaggccgaggcctgccatggacgaagctggggaggaagctggagagctctgtgtgccccgtgcggcgttctcggagactgaaccctgagctgggcccctggctgacatttgcagatgagccgctggtcccctcggagccccaaggtgctctgccctcactgtgcctggctcccaaggcctacgacgtagagcgggagctgggcagccccacggacgaggacagtggccaagaccagcagctcctacggggaccccagatcc

SEQ ID NO: 112601 - DNA, 513 bp, Homo sapiens
aatatattgaaatttatatttgcaaaactaggatcataaaataagttgttttccctcagcaatatatagtaattacctttgtatgttattaaatattttctctatcaccatttttaattattaaatttaattaaattatagcacaactattcacagacttcattatgggaatagttgtgctataatttacctgaatactcttctgtggttgaacattaaaaggtatttttcagctgggtgcagggctcatgcccgtaatcccaacactttgggaggccaaggtgggtggagcacttgagcccaggagttcaagaccagcctgggcaacatggccaaaccctgtctctacaaaaaatacaaaaattagtgaagcttggtggtatgcacctgtggtcccagctactcaggaggctgaggtgggaggatcgattgactccagaaggtgaaggctgcagtgagctgtgatcacattgctatactccagcctgggcaacagagttagaccctgtctca

SEQ ID NO: 112602 - DNA, 410 bp, Homo sapiens
acaaaagtttttctatttgtagtagttacggatttctgttaacagtcttggatgtgcaagtgacaagttctacttaattatttgtctgtaaccaaactcaagttctattttgagtcccattcattatctcagtaaaaacttaatctgaaccaatttagaatcctcctaagataggtcccactatatacaagatccagtgggtatataaaaggtgagagtacagggtagtaattaattacctgtctggtaattaaattgtgtctataagataaatactgaaaaatccatcttgtccttgatcttagtccacacattttagtaagccatccgttttcctgtttctatgggttagttagtttaggaggccataaagggggcacagaaatgtttctgttgctgtgatgtcattc

SEQ ID NO: 112603 - DNA, 638 bp, Homo sapiens
caccccatctctcaaggtgactgcttggatgggctggcgtgactgggaaggcctttgccactttgctgtctcctggattccatatctactggatgggtgccatcttgcctctagccagggaagcaagcaggcacaccaactctttcctttccagtattcctgggcccagtggggtcttctcactcagttacaatatttgatctaagaacattcactttccaactgatcagaaagtaaaggtgactggcatggtgttgctgtgagaggtgcagcgtaacctcagaggtgaacatcagtgctgggaccatttggagcagcatgtggtaaccaccaaatgggaaccacggccttctggctcgacctagagcatgaatgtagcaaagcgaagccctgtacactttataaaaaccagtagaaagacactccagtctgagtgagcagctggaacaaaggtaccacctgaatagagggtgtgtggcaagggcaggcacgagacaggaaatcagactggaagagtaggttgggcctggtcatgcgtgccaaggcaggcagcattctctaaggagcagtggtaagccatcaaggcatttgttactaggggtgtgacaatatgagattgtattttcagaagatgactg

SEQ ID NO: 112604 - DNA, 353 bp, Homo sapiens
agcagaagggaaatgacaccagatgtaaagctggatctggaggcagaattcaaagctccactgatagtcccccctgcaaggacaccaagttaacaacaatctataccgaaaaacaaacaaaaacaccttcataagaacaaaagtcaggtgagcactcatagtacttggttttaactttatatccctgaaagaggcactgaagacatagaaaaaaaaagtcctgaattgctgacaacactcctcccccgccagctcacccccagcccagcagcagcttcagggtgtggagagcatctctgagtactgggggagggagaacagagcaattgggaggaattgaactcagtgctgcc

SEQ ID NO: 112605 - DNA, 664 bp, Homo sapiens
cagttcctatgcttgtagttatgaagttggaattttctaattcgcttcctattttctggtctcctgattggccagtgcaagaggagtgaaagtgatttatgccatatggggatctgacgctaaattttctcacagaaaccctcatgtcactttttacccacccatgcagctggaaggaaaggacctcgaggccttaccgtatggagtagtcacatgacaaaatacacagactactgagtctcaatgtagactagatagcaaagaaacctggattcctgagacaccacataaagcacagcagctctggagagatgccagactaggaacattcgtattacactgtagatctgtaaaaataagcttctttaaaaagacactgagattttttgaattttgatgacagtctgttttatataatactaatattattgctaaaacgatttctcattccacttgccaaatattgttaggagtggtctgatttagtaatctacttaagcgatatattttggtggtattttttgtttctgaatttatacaggttctctattgttaccttcccaatattggtgagattcaccatttgtttggtttcttaacaaaaactccctaatttggggtctcagtcttcttttctggaatgctgccacaagatcctaagtga

SEQ ID NO: 112606 - DNA, 704 bp, Homo sapiens
gatgctgttttaggtcaatttctcatgtaggtgatatgttgtgctaggaattagttgttgagggtgcatgctgtaaagttgctctggctaggtatggtagcttggtggtacaacacttactgcctgacttgactaaatcatgttaaatgttggtaagactgatagtcccaggttcatgtaacttatgaggattgaatgaggtgatgtatttatattgcttagcattgtccttggcaagcagtgtttgataaaagcttagttgccatcatcattttcatttttaagtttgcttatcatcacctaagtctaatttatctcaccatagtatacttgtcaagaatacagaccatgataatcattaataattgtgactatctgctctgccatcaagtgtgaatgaattataaagttgcttagcaagctactatatttgaatttgctgtataaatagagctattttccatttccatggaacctctgttgttattgcaccctaccttaaaagatggaaggttagtggttttgagctctgaacatatttatacatatagtatttatatgtaatttgcctgtgctgtcactttgctgttatattgagatagaactttagtcttgcagttttaaaaaatacttttgacccatcttgtctcctgttcttctgatacatcaaaacaaggtagcattgaggttttagagtaaaagat

SEQ ID NO: 112607 - DNA, 1302 bp, Homo sapiens
ggatgggagtaaaaataaacagtaagaattcaaaggcttttaataccctcagcttctcgcctcttctctcccagctgcccgtcagtccccagctggctcagaggaatgataagggacagagaggcgggaggggaccttgcttccacagtctgagtgctgccccgaatcactgggaacacttctcagcagggtgccgctgacatttcagactgggtgcgtttctgctggagggctgtctgcacattgcagaagctgagaggcattcctggcctccacccactagatgccagtagcagcccccctccagttgtgacaatcgaatcgaatatatcttctgacgttgccatgtgtcccgtaggggacaaaattgccaggtcgagagcactgctttaaagaagcagctgacacgtactctggcttactctgtgccttgcaccattggcaactctcaggtaagtgaatcattcagtcttcgccacacacgtccctacagggctttacaaatgggcatgccatggtgcacagaggtgacataactcacctgtcatggcccagctagtccacatcggagcaggatggaacccagattgttcaaggtctcaaccgctctgccctgttgctctccagtatacaagtacctgggtaaaaagtcactctgagccagcgagggggacggggggcagaggcctgccgcagctcctgctagagtcccacacaaggtagcacctcaggtcctctagcgacatcaaaaaagggagtgccagagggaatttccacacgctccactctcagtaattaaactgcaacaacctcccagactctcaggcctcaggagcaaccgccttaattaatatattccacgttgcagcctcctccatccacagccacgctcggtattcccgaaccgcactccaccagcagagctaggacaaaacaggcctcctagtgaggcatggcatttgcaggccacagccccattcttaggggataagcctgggatggggaatgtgtcttgaggtcaccaaccccaattcaaacctgatgcaaagctccttcctgctccctgaagccaggtgatgctaccgaagaataattactgttgtcaccacagcattttctaagtccaggcacagagtggcagagtcagtcagccctcacaagcctgcaaggtaggaattattcccattttatggatgacaaaactgaggctcagagaaggtaagtaacctgcctgaggccatggagtaataagtggtaagcctggatccaaggccatgctttccctctctcctaacagcccct

SEQ ID NO: 112608 - DNA, 504 bp, Homo sapiens
gaaaaatggggattaaaaattgtacctagcttcaagggtggctgtgagggccaagtgagatcatggatgtaaaactcttggcatgttgcctgcccactgataagccctcaataaaggctggcaataattaccaaagttcttattcaaagaactatagtccgatacggtataagtgtgtcaaaagaagtatgatcaaagggccatggggcacagcagagggaacatcagttctatactgggtgggtagtcagggagaagaatcctttttatgtgggattgtaatctggagcctagatccagatgtggtctacaaaatatgtttgggggctactgttgtgttttaaagattttgaaattcaactcctttagacaggcagtcacccctaccacaacttaatggaccaaactggtttgttagggacattaatgttgcttgagttctgtgccccacgatggaaggtgacctttgacctggaacttaaaggttggctttgaattagccag

SEQ ID NO: 112609 - DNA, 444 bp, Homo sapiens
tggataattttgagtaaaggtggagaggaaggtcaaggaggataagggctgcacctcacagggaccctgctggtcagcatgacaacactggggcagaggagccctgggtggaccctgcatagcaattcctaagcatgcttctcattctcaacctcatgcctccaattcagaaaactatgtgaaaaatgtctgcatggccaggcgtggtggctgacacctgcaatcccactactttgggaggctgaggtgggcagatcacgaggtcaggagttcaagaccagcctggccaacatagtgaaaacctgtctctactaaaaatacaaaaactagccgggagtggtggcacccacctatagtcccagctacttgggaggctgaggtgggagaatcgcttgaaccgggaggcaaaggttgcagtgagccaagaccatgccattgtactcc

SEQ ID NO: 112610 - DNA, 265 bp, Homo sapiens
aggattggacagtaaattgcagtcaattttggtcagtttcagctcctagaactgtagcagctaaccaatccctagcctcatggcgggcaactatgcacatgctccaggatcagcttacacaaagcctgtgggatgaggatcccgtcctccaaaaatctggggatctgtgctttgatcaatggttgctgttctgatcttggagatacaaacacataggcaggcagccattgttgcaaccctcttagcacagttacaaacccctccc

SEQ ID NO: 112611 - DNA, 1408 bp, Homo sapiens
  misc_feature (399)..(399): n is a, c, g, or t
  misc_feature (644)..(644): n is a, c, g, or t
cagtgaactgcctgctagatgccaggcaagtttaaaggaaaggtcaatgagaaataaagtgctcaagggcagattcaaggaaaacatggggagcattgcagagcaaccaggtcttaaaagagaagttaaggagaacagcaagaagcaagcacacaggagcaggcagaggcacactggttgagaaagtaggatgcccagcagcctggtctgattaaatcagaaattccctctgtaggagggacaagcaaagcatattatcataggctgggcagaattccaaaggtcatttcatccaacactcctcagacgctgaaactcaaggtttcgaaggcaaaagtggaagtgtagacaattgctacagaattgaagcccaacattctgtcctttgcctttcataanttgagacaaaattaaaaccatctgaaatatctcccttggctgcttttttcaaactttaatttccctgcaagtatatgataattgagtttctttagagcacaaggctggatatattggaccttaatgtgcacaagttcatcctagaaattgtctttagagtaccaagtctttcctccccaagagttccaaaactaattcaatatttagaatgctcccctggacctcccagttccagtggctgaatntcagggctcaggcattagaggattctttttgttctttggccctcttggggactaaatgccatgtatgtcaccatgtcagtgactacagccttggtttcatcccctgatgacccacaaccatcatctcccttatgctgaacatctctctgaatcttggaattttcagatgactctaactttgccaaattagaatcatgcctgattctttttttgtttgattgtttgctttatgtttgtttactttgctcagtgccaagcacaggatttagcataagaaaagttccactagaggttgtttattcaagtaagtaattattatagccatccgtatatgaatgctttacaaaattttggctgatggtcctcgcaggtctgttttattagtcaatttataaactcaagtttatgtcttcaacttgaccatctcctttgacttccagattcgcctcttcccacaaaactgactctccacttggacatctaacaggcatcttaaatttaatgcatccactttggggggctgaggtgggcagatcacgagatcaggagatcaagaccatcctggctggcacggtgaaaccccgtctctgctgaaaatacaaaaaattggccaggcgtggtggcaggcgcctgtggtcccggctactcgggaggctgaggcaggaaaatggcatgaacccaggaggcgtagcttgcagtgagctgagatcgtgccactgcactccagcctgggcgacagagcaagactccttctcaaaaagaaa

SEQ ID NO: 112612 - DNA, 270 bp, Homo sapiens
aagatggagggcgcttgactttgcgacacgcacattctgccgtcttgggaagggggaaagaggggcatctagctgggcgctgcgtgtagcctgcccggcggggccggggtgtggcaggaccgaagcctgctcctcgtgtggggcccggcgcgaaaacagcttgtgcagccgctgagtgactgaggaccgtgtcccagtgtagtgtcatttcctcgtacatgtggagtttaaagaattataggtaccttgagctactggcaggtaaaagac

SEQ ID NO: 112613 - DNA, 372 bp, Homo sapiens
gcatggagagacagggcaggaggtagagactgagagagagaaggatggaggggacagggattgtgagacataaacaaatggggagtggccgggcacggtggctcacacctgtaatcctagcactttgggaggccgagacgggtggatcacttgaggtcagcagttcgagaccagtctggccaacatggcaaaaccccgtctctactaaaaatacaaaacttagccgggcgtggtggtgcacctctgtaatcccagctcctcaggaggctgaggcaggagaatcatttgaacctgggaggcagaggttgcagcgagccgagatcacactactgcactccagcctgggcgacagagcgagacaccgtttcagaa

SEQ ID NO: 112614 - DNA, 100 bp, Homo sapiens
gagcaagtcactgtctcaaaaaaataataataatttgaaagttggaggcttgcccagagtctagtggggagatggatatacaagcagatgtggtgaatac

SEQ ID NO: 112615 - DNA, 263 bp, Homo sapiens
  misc_feature (31)..(31): n is a, c, g, or t
agtgcaattaaaaattcaaaatgtcattttncagtgcaattcggcctgaaatcaacctgttttatggtaattatgggctctggcaccagaacatagcagagctttagaaacattgaatgagtgattgagtccaacctccataaatgtgaaacatatgaaatgatttgggtaaagtaaaaaccagagagcgttgtcaccctccctaccttgagctatgcataaagctgcgttaatgtagtggagtagtcatatcagaatgaggg

SEQ ID NO: 112616 - DNA, 407 bp, Homo sapiens
ctggcaatccacgcatggatggcaatcatggctggggttcatgggtagaagaagtcaggtgtctgaatttggataggaaaaaaagttttatcttttctctgtctggtagctgaaatatagcatttcctttcatcatgaatgtgaagcaggaaaatagggtctggaggcagggaacataaggctgattcacactaaagctatgacaggaaatatcctctccacagggcgtaggccaagtaaatgacttgtaacttcacgtcatcctttccatttacacagggtataccccaagtaaccaatggaatcctctaggggatatttaaactcccaaaaattctctaacagggtgttttgagctcctatgctgtggagtgtagtttcgttttcaataaatccctttgtccctt

SEQ ID NO: 112617 - DNA, 836 bp, Homo sapiens
acaaaaataaaaaaaatagacaaatgggatcatgtcaaactaaaaacttgtgcacaacgaagaaaacattaaatagagtgaaaacacaacttactcaatgggaggaaatatatgcaaactgtatatctaataaggtgttgatatcaaaaacacatgagaaacgtgaacaactcaatggaaagaaaacaaataacctgattaaataatgggccaaaaacctgaatgaacatttcttaaaagaagacatacaaatagccaatatgtgtgtgataaaaatgctcaacatcacttatcatcagggaactgcaatgagatgttacctcatacctgttagaatggcaattatcaaaaacaaaagataacacatgctattgtggatgtggagaaagggaaattcttatacattgttgggaaagtaaagtagtacattcattatggaaaaacagtatagagtttcctcaaaaattaaaaacagaactaccatataatccagcaatccaactactgggtatatatacaaagaaaatgaaatcagtgtgttgaaaaggtatctgcactgccatgtttattgaagcattattcacaataataaagacataaaatcaaacttattgtccatcaatggataaatggatgaagaaaatgtgatatattcaatgaaatactattcagccataaaaagaaagaaatcctgtcattggcaagaacataattgaagctggaggacattatgttaaatgaaataagccgtaggcacagaaagactagcacatcatgagcttgctcacatgtagaatctaaaaatgtttatcccataaaagtagagagtagaatgg

SEQ ID NO: 112618 - DNA, 302 bp, Homo sapiens
attttttccacgttttaaatacttcctgatttttgactagatatcaagctttgttaatttcacaactttgggtgccaaaaatttttacattcctatcaatattcttgagctttgttccagtacgttgttattttacatggaaaccatttcatactttcaaagcttgcatttatttgttaggtgggaccagaacaagggctaatgttgtcccactatggaagcaatactttctgagtagtctccctgatacttcatgaattatgaagttttctagtcggattttggggaactgaaaccatttt

SEQ ID NO: 112619 - DNA, 471 bp, Homo sapiens
aatggaatcagcaaggtctagagaagggcagctaaaatcatcaaaagacagaaaagtcgtcttcctaacgataaattaaataaattaggagtctgcaagacaaataaaaatgttaggaggagacaatgtcaatgttttcaaagccttgaagagaaaaaatggatttgtaaaccatattccagataacagactgaggtatcatcccttgaatcttaaaacagacaaatttagggcagttagaaattactaataacaacaaaactggtgatatcaagagccagtaaggactaaaaacgtaaatttaaggaggatgtagataaagtcatgaaaaaaatctacgtaagaaccttaagaggaaactgaacatctctaacctctggagacaggctcaactcccgaatcgcgtggcatgttgactaccaacagctaagctctactcactgcaggactttgagagttgcttgtttcctt

SEQ ID NO: 112620 - DNA, 1355 bp, Homo sapiens
agcagtttgaaccagtggaaatcaaggtagtgaagaaatcagaagagcgacctatgaccgcagaagaacttagggagcgagaattccttgaacgaaagcataggagaaaaaaacttgagacagatggaaaactacctccaactgtgtccaaaaaggcaccctctcagaaagaaagtgtgggcacaaaacttagcaaaggttctggagacaggcatccttcttccaaaggaatgccccttcctcatgctgagaagaaatcaagacccagcatggccaatgagaaacacctcgctttgtcttcatccaaatccatgccaggagagaggatcaaggcaggatctggcaatagctcccaaccctcacttcgtgagggccacgacaaacctgtttttaatggagctggaaagcctcattccagcacctcttcaccaagtgtcccaaagacttctgctagcaggactcagaaatctgctgttgagcacaaagccaaaaaatctctgtcccatcctagccattccaggcctgggcccatggtcaccccacacaataaggctaagagtccaggtgtcaggcagccaggcagcagctctagctcagcccctgggcagcccagcacaggggttgctcgacccacagttagttctggccctgtgcctaggcgccagaatggcagctccagctcaggacctgagcgatcaatcagtgggtccaagaagccaaccaatgactcaaatccctctaggcggacagtcagtggtacatgtggccctggacaacctgcaagcagctcaggtggccctgggcgacccatcagtggttcagttagttctgcaagacccttgggcagctctcgtggccctggcgggcctgtgagcagtccacatgaacttcgacgaccagtgagtggcttgggccccccggggcggtctgtcagtggccctgggagatccataagtggctcaattccagctggacggactgtcagtaattcagtcccaggaagaccagtgagcagcttgggacctgggcaaacagttagtagctcaggtcccactataaagcctaagtgcactgttgtctccgaaacaatttcttccaagaatatcattagccggtccagcaatggacagatgaatggaatgaagcctcccctatctggctacagagctgcccaaggtcctcaaaggcttcccttccctactggttacaaaaggcagcgagaatatgaagaggaagatgacgatgatgatgaatacgactctgaaatggaagattttattgaagatgaaggagagcctcaggaagaaatatccaagcacattagagaaatctttggttatgaccgaaaaaagtaa

SEQ ID NO: 112621 - DNA, 676 bp, Homo sapiens
cgagaccagcctggccaacatggtgaaaacttgtctccacaaaaaatacaaaaattagccaggcatggtggcacatgcctgtaatcccagctactcaggctgaggcacaagaattgcttgaacttgggaggcggaagctgcagtgagctgagatcgcaccactgcactccagcctgggtgacagagtgaaaccctgtctcaaaaataaaaataaaaaaaataaaattatagttataataagctgaagatgaacagacatgtcaagatctctgaacttttcaaaatcactttccagaacctctttgctgcatggaggcagtgtgagtcgaagtcgaaatagcacgtctctttgctgttctagattctctgcctaaatcactcccttgacagctggagcatcagtgtctattgaccctgtaacctgtactcagatgggaactctttggtaactgctctcctaagagaggtaagggaaaacaatatggttagtttccaaaatatctggggctgtcgtccaccttgttcaagaaatcgtaactctgacatttggatttggggaattcatcagttctgactgggagcaaagtgacacacctattccagacactgagatgggaggtctctctgaatcttccctcagtctccctcccaggccgttgccaccttcccgaagggt

SEQ ID NO: 112622 - DNA, 418 bp, Homo sapiens
catagtggtatttctgcagggatgaaagataagttcatttctacctaaatataaatacaattgtctgattaatcataagaccactgaaaaccttattctaggaattaatattttttatcttaagaatttcatgtcattaccaattgtgataggaattctaggcagtatttctcaaactttaggccagagttatttcagaaaatccaaaaatctccatgtgcactaagcattatttgtgggtgctgttgtgatttagtaaaatatgaaatcattggaccagcttcatggtaactttttgttacacagttttataaccaatagctatttgaacagatcatcgaacgttttagaccatactcaccaatagaaatgtaatatgagctacatataaatttaaatgttcttgataccacattat

SEQ ID NO: 112623 - DNA, 151 bp, Homo sapiens
ttctttctcaacactctccaaagtgattatgcctaattgagttactttaataaccatctatatgtgattattgctagatttttagactgctcttctctcttaagtcatgtcctatttttcctactgcctgctggtcaattccatgtgggca

SEQ ID NO: 112624 - DNA, 891 bp, Homo sapiens
gtactgggaagatcttataaccacctaccactaggacagaagtggcattggagtgaatgtcaggagcaaattgtgcagagatgaagcggggtgaggtcagcgatagaggtatcggacagcaagatttaaagctgccggtttagaggaggagggggatgacctggaagcaatgttgagaagcaagaaggaaacctatctcacctccaggcactaagaagctgaaggttgaaaacacagttgccggaagtagttctgtcctgtggggttcggcatcatgcaagttccccctgggctgttctctgatacagggcacttgctccacactctgggaacccagattaaccagtctgccctgtcacatagttgaaggagttgcatttatctttctggctcccaattcctttaaaattacatttgttgcagaacctccacaaggctaaataaaataaaattacatttgtgaccatcagagaactgaagaactattaactggctgttctggttttgctgagatcgggctgttgacagttcctggttgtcccacagctacccatgtcagttatctccactaacatttccaagaatctttgtaggacaatttctccacctgcaaggtctttcaagtaagaactcttctttcctttaaggcaattagcccattgccaaaaggttttactgtcttaaagctggaactatctgagatctaattccaaggacttttctacagctaagtgagatgcctcacaccagtattaggtgattcttcgtgaggacagaacagagcattttcatcttgtgtttaaagcaatttgttggcttcggctcctcaccactttctataccagtctcccattcacgtccctagtaatgcctatgccaaaaaaaaagaaa

SEQ ID NO: 112625 - DNA, 794 bp, Homo sapiens
taacaacctatctataacaaccacacagccaacataatactggattggagaaaagttgaaaatattccctctgaaaactggaactagaaaaggatgcccactctcaccacttctgatcaacatagtactggaagtcctagccagagcaatcagacaagagaaagaaagagcatccaaattggtaaagaggatgtcaaattgttgctgtttgctgatgatatgattgtatacctagaaaaccctaaagactcctccaaaaagctcctagaactgataaaagaattcagcaaagtttcaggatacaaaattaatgtacacaaatcagtagctctcctgtacaccagcagcgaccaagctgagaattaaatcaagaactcaactccttctacaatagccagaaaaaaaaaaaaggtacttaggaatatacctaaccaaggacgtgaaagctctctacaaggaaaactacaaaacactcctgaaagaaatcgtagatgacacaaataaatggaaacacatcccatgctcatgggtgggtagaatcaatattgtgaaaatggccatactgccaaaagcaatctacaaattcagtgcaattcctatcaaaataccaccatcattcttcacagaactagagaaaaacagtcctaaaattcatatggaatgaaaaaagagcctgcatagccaaagcaagactaagccaaaagaacaaatcaggaggcatcacattacctgatttcaagttgtactatcaggccatagtcaccaaaacagcatggtactggtatgaaaatagg

SEQ ID NO: 112626 - DNA, 596 bp, Homo sapiens
tggaccttgtctaagagtcaacatttaccaacatttatcccaaaatttgactctttgtgatgtttaaaatatcccatgaaccatttaaaagcttgattttttttgtttatgaagctttttttaaaaaattaatttatttactttaagttctgggatacatgtgctggtttgtgacataggtatacatttgccatggtggtttgctgcacctgtcagtccatcatctaggttttaagccccacgtgcattaggtatttgtcctaatgctctccctcccctttcctcccactcctcgacaggctctggtatgtgatgttcccctccctgtgtccatgtgttctcattgttcagctcccacttatgagtgagaacccgtggtgtttggttttctgttcctgtgttagttttttatatgtgtataccaagcatataatgatataacaaaattcaggagctagtctacgttattttgttgtgtagaatattgtaaatgaaacacttctatagcttaggaatttttttgttactgaaacactatttgtatgtttattttgttgttagtttgtttttatctttttggtttttaaatagattaa

SEQ ID NO: 112627 - DNA, 336 bp, Homo sapiens
tctaggagtgacctgaaacctcctaggttcggttctgcgccttcgcctctggaaggaggctgggcttgggccctgctgggaagaaaaaccccttagatagaatgtttaggcggatcacgaggtcgggagatcgagaccatcccggctaaaacggtgaaaccccgtctctactaaaaatacaaaaaattagccgggcgtagtggcgggcgcctgtagtcccagctacttgggaagctgaggcaggagaatggtgtgaacccgggaggcggagcttgcagtgagccgagatcccgccactgcactccagcctgggcgacagagcgagactccatctca

SEQ ID NO: 112628 - DNA, 350 bp, Homo sapiens
cctgcagctcttaacccaggctggaggggagtgttcagggaagacttcctggagggagtggctcttctaaactgagacctgaagaaccagatggtgctaggcaggtaaatgagaggagaagaaaagcattccagacagaaagaaagcactgcaaagaaagctgggaggacagaggcaagcttggggctttcgggaagctaaatagttcagcacagttagagcatggggtggaggtgagggctgttcttccttgcactagtgccacaagctacttacagtgagatgccctaatgtaaatcagagcctggctgggttagattacacatgtcagtcctaagtatttcagatgt

SEQ ID NO: 112629 - DNA, 393 bp, Homo sapiens
tccaggcccctccacctggaagcctctcctggcagtcattctaaggaaattctcagccaggtgccctaaataagtactatttggggtagtaaaagatggaaaccatctatacattcaaaaccaggggattaattagaaccgtaatgctggtgcttcctgttaaaatgataacggagaaataactttcatatgacatgaacaaggcagcccgtaaagcagtatgtgttgaacaagatcccattttcgtaaaggatctgtaaggacaggaagtgttcaacggttgattctaggtggagggagaagaggtgttgtttatgccattcagtatattctgagatttttactaaagaacactgcttttccacaaactctaagggcagattttattcccag

SEQ ID NO: 112630 - DNA, 946 bp, Homo sapiens
  misc_feature (23)..(23): n is a, c, g, or t
  misc_feature (599)..(599): n is a, c, g, or t
  misc_feature (661)..(661): n is a, c, g, or t
  misc_feature (860)..(860): n is a, c, g, or t
  misc_feature (863)..(863): n is a, c, g, or t
tctgttcctgtggcccaccctgngcctccaccggccagcagcccgaccccggctctggggagcgcgacgggggagcaaacaaatgatgcagtggcacaaagagcgagcatgtgctcccgagcccaccagtcagaccccaccagcatccccactttccaaactgagcaggccctacttggtagagctgctgtctcgccgagcggggaggccggacccagagccaagtgagccgtccaaggaggaccaggagagcagtgaccgccggccaccctcgcccccaggccccgaggaaaggaagggacagaagagggacgaggaggaagaggcgacagagaggaaacctgcttccccacctctgcctgccactcagcaagagaaaccttctcaaacacccgaggccgggaggaagacctcatcagcccaacatcaaagacaccatcggaacagcagcgcccgcagcacccaccccgcaccggcgactccatcttcatggccaccccctgcggtggacggttgaccaccagccaccacatcatcccagagctgagctcctccagcgggatgacgccgtccccaccacctccctcttcttctttttnatccttctgtctctttgtttctgagctttcctgtctttccttttttctgagagattcaaagnctccacgactctgtttcccccgtcccttctgaatttaatttgcactaagtcatttgcactggttggagttgtggagacggccttgagtctcagtacgagtgtgcgtgagtgtgagccaccttggcaagtgcctgtgcagggcccggccgtcctccatctgggccgggtgactgggcgccggctgtgtgccccgagcctnaancttgccttggctaatctggaagctccgaccgacatcaccgagcagccttcagcattccattacgccccatcttggctctgggc

SEQ ID NO: 112631 - DNA, 493 bp, Homo sapiens
  misc_feature (23)..(23): n is a, c, g, or t
tctgttcctgtggcccaccctgngcctccaccggccagcagcccgaccccggctctggggagcgcgacgggggagcaaacaaatgatgcagtggcacaaagagcgagcatgtgctcccgagcccaccagtcagaccccaccagcatccccactttccaaactgagcaggccctacttggtagagctgctgtctcgccgagcggggaggccggacccagagccaagtgagccgtccaaggaggaccaggagagcagtgaccgccggccaccctcgcccccaggccccgaggaaaggaagggacagaagagggacgaggaggaagaggcgacagagaggaaacctgcttccccacctctgcctgccactcagcaagagaaaccttctcaaacacccgaggccgggaggaaagaagccgatgcttcagagcagacactccttaggtggctccaaacttacagagaaagtggaaactgctcacgcgctgctggaaat

SEQ ID NO: 112632 - DNA, 777 bp, Homo sapiens
gtctgccctctaggagcctccagtcttgtcagactagaggagatattcaggtaaacactggcagtggtatatgctgattcgagtaattaggagttcgtgggaacagagggtaagaaaaacccctttatagttagagatgtagatggatcaagagaaacttacctaaagagtcctaattcttgaagcacaattaggaattaaacagattggctaggcacaggtagcattcaatgtggaggataaaccatgtttaaaagaaaagagctataagggaacatgtatccttagagaccttacttacagtcagaaaaatgtacctatatctgtagaaaaccacatagtgtgtggaactagaatcacctaggagctttcaaaaaatactgccacttaccagagattctgacgagtgaggagtggccagggcattcacggtttaaaagtcctccggatgattttaatggacacctggttcattgtgtgaaaaccactttatcacaaccacttggaatcagacatacctgtggtcacatcctaggcctttgattcactcatttgtgtctatagacacataatctttgtgatcctttttccttatctgcaaaaatggggctaatacccacttcagaaggctgcaattcactcattcattcattcactcaagtactaattcaacaggtatttattgagcgcctactgtgtgccaggcattgttccaggctctggagatttagtagggaactaaacagatctcttctgatctgtacccctcaaaaaaca

SEQ ID NO: 112633 - DNA, 233 bp, Homo sapiens
aaattcggtaaatcatgaaacttgtcaagatgattctgaagttaatatggaagccttaataatgaatggtttaaaccatagtatattcatgctatggaatacaatggattagttaaggataatgaggtaaatttgtacatatgagaatggctacacctccaagatacgtttttgtgtggtgaaaagagaaaattgctaaacagtacatataatatgatatcatttttttaaaa

SEQ ID NO: 112634 - DNA, 141 bp, Homo sapiens
tccgagaccaacctgggcaaaacagtgagacctcctctgtatttttaaaaacagaagaagaagaagaaaacaacaacaataacaaggcccagatctaataaatcagagcctgccttttaccaagatcccggatgtttcctg

SEQ ID NO: 112635 - DNA, 280 bp, Homo sapiens
cagaaatgaagagttctgaggattaacgattaggctgccttgagaaactcagagcagaaacctatgttgggtattaccctcaggaacagagttagggataaacaattcatggttctctgactggggtcaggccatttattcacacaattttgtacaagggttgctgttactgtagaccatggctcaaagatcatttccaaaagaatgtttattgggtgtttactaggtagcagtgctggggttacaaaaataaatatgatccagccaggcgcagtggctc

SEQ ID NO: 112636 - DNA, 212 bp, Homo sapiens
tgacaaagagcaggctttagatggaaggcatttctaagagacagaattgctatggtacacacagccttctgatggtctatctagggatcaatttaggagttggaaacacatgatactgtgtttaagatattcttcaaatatcttaaacattacgtatctcttcctcaaattcaaggtgtaggccaggcatggtggctcacgcctgtaatccc

SEQ ID NO: 112637 - DNA, 381 bp, Homo sapiens
tccgggggtgctggagctttgtgaccatgggccttgcctcctcggctgcctctgctatgaagcctcatgcggttggaggaggatgtggatgagatgaccaagcggggtgcccgctagcaccaggtggtgggtaggcgtcggcagactaggagagcctcagagcctttgtttaacttgtgctgagaaggagtgtgactccaggagagttgggtggagagcctcaccttggcacacactatgctgtgtccagactggaccccatggtgtctgagcattattctctctagggtcaccttcccctgcactgtgaccttgcggagcttcaaacagtggtttcctaaggtaacagagcaggtggtggtgtggtgcgtgtgcgtgtgt

SEQ ID NO: 112638 - DNA, 282 bp, Homo sapiens
cagtagcacagcatagcacctgcttgggtctggggaaatggtaaataataacccagtgtgaatccacagtccagtgcactgccctcaggggtctccaaattgcggtccatgctattttcaggatttgggaggacagaggagctttcccactgtaaggatcttggcagttcacagcaagaatgaggactatcaaaatacttcaacttaccctttccctgaacactgagttcctctggactcctaaccaatgtcagctgcattggcctctagctttcttttctt

SEQ ID NO: 112639 - DNA, 318 bp, Homo sapiens
acaccacgtctggccctcattcttaaataagaacaggttgcctaagctccctccccattcacttattcaacaaagagttacctccccattcacttattcaacaaagagttacctccccattcacttattcaacaaagaggcaggcactttcccttctctctagatactcagtgacaaaacacagaacaatccccaccctcaaggagcttaccttccagaaaggggaaactacaaacaagggagaggcagtggagagtatgacagacagagactggtgctgtggaaactgaaggagagaaggcaatgaagaatagaggg

SEQ ID NO: 112640 - DNA, 605 bp, Homo sapiens
gaataactgagttggattttgaagaaagaataggatttctccaacagtatagtcagaaaggactttgtaagcctggtaaagagcaaggcatggaggagatgtgagacagtatggcatgtgtgaggatgagcaagtcttcaggcgttgctgctgtggaacatttggagctgtcggggaaagtcttgaagagagaaactggagatgaagacatgaggcagatcagggagaaccctggcctataattagggaatctggctagtcctcttgggcagtggaaatgcagtgaatagttttatgcaaggggattaggtgacttgatttgttttactacataattttggaagtcatagaatagactaggagaggaaggaacagcagtttaaaaggttttggggtaatgcaatgagcctaaattaagatgatgacagaggggatggagaggaagagaagacatatttaagaaatattttaagatctagaattgacaggagtttgtgattctttggctttttagggtgaagaggaagggtctaaaccaggggtatccaatcgtttggtttccctgggtcacgttggaagaagaaaaattgtcttgggccacacat

SEQ ID NO: 112641 - DNA, 258 bp, Homo sapiens
tggcctggagctgtgtgggagccagcccctgcacatgaggcatgcgctcagcagctcctcaccctgcccactccatactcagcccactccatagctacccgacctttggatgcacctgaatttgtgacccttgacaaaggctatggtactttcttagacctctgagtccgaaaacccagctccacattctggttcctcctcttactggctgagggactttggacaggtgcttttacttctaaagccccagtttattaa

SEQ ID NO: 112642 - DNA, 263 bp, Homo sapiens
atctgcccacctcggcctcccaaagttctgagattacaggtgtgagccaccacacctggcctacttttcaattttgaagagcttctgtgataccgtggatgaggcacatgactgggttgcatgtcacagtggaaggcaatgttcgtcacagagggctactggaacctttaagagggagatcctaaagtgacgaggtttaagatgccgccttaagcaatagggctatatgtgaggtcaggattcagaaatcaatttcacatcca

SEQ ID NO: 112643 - DNA, 434 bp, Homo sapiens
gggtgattcatcgaacaatttcccatttccctattgactgctttacaacgggatacaatgaaacataggtgaagtttctctatatacgtgtgggtccctttaggggctccctgttctcttcctttagtctgtctatccctaaaccattactatggcatctcaattactatagctaagaaatttacattaagtagggtgagttttaattttgatgaagtccaatacaccaattgtttttcttttacggtaaatgaactttgcgttatatctaagcaatctttgcctaacaggcattcacgaaggcattctattttctctcctaaagcatcacagttttagctttcatatgaatgtgtataattgaataaaaaaagtaatttttgtgtatgacaaaagttagggttgaggttcattttttttcaccatgtgaatat

SEQ ID NO: 112644 - DNA, 198 bp, Homo sapiens
agcctcccaaagtgctgggattacaggcgtgagccagcacccctggccagaacataagttttttgtgaaggcggaagttgtgtcatattcacacacactgcttggcacatagatgcttggtaactgtcacagaattgaaaggaacctctagcacttaagtctctgcctctgcatcccccttatcttctctgcctgtct

SEQ ID NO: 112645 - DNA, 406 bp, Homo sapiens
tggctttcttctgtttgggttcctaaagtcaaaataaatctgctctattccatttcatttattactatctaatatattacttatctacttaggttagtttacttaatgtttaccccactaaaatataagctttctgagagtaagaatttttgtttactgctatatgtactaagcctagaacagaacagaacagaacacatgataggtgatcagtaaatacttattgactgacagactgagtgaataaatgttgctcaaccagcagagactcaacatttaattccctgactaggtagaatctagatggaaaattttcacccataaatggctacaaaattgtggcagggaagataactaggatgctattttcttttctatttaatcaaatatacgttttttaaaggac

SEQ ID NO: 112646 - DNA, 528 bp, Homo sapiens
gggacgttgcccagtccccccagtcggaagggccagtgggtggagttgggctcactggcctctggagggtccctagcaggccaccccacctcagttaagtcgggactggggagccccatcctgggtactctgtgcaggaaagggggtcccacccacaacccacactcaccctggaaggcagagcctcttctcccataaagcctggcccagcctggagctgaagcccggggccgccacctgagagggcttggttctgtctgtagagcaggggtctgaatagcctggtgccctggaccaggtgacccggctctgtgcactgcacctgctcctatcactgaactctcccacaaggcggggacagacgaagaaactgaggcttgatgagtgaccccactgcagagccccaccgtgggtagggtgccccgacctgcactctggctgctgggctccacggcccagctgtgtgccctgagtggtatcctggggacgatgccacacaaagcctgcggagccgtaccgtgcctgaca

SEQ ID NO: 112647 - DNA, 426 bp, Homo sapiens
agtgggagagtaaatatggatttgagcaaagtgtgatccttggaccagcagcaccagtatcatctgagaatgtgttagaaatgcacattcttgggatccatcccagacagacatactgaatcagaaactctgggggtgagggcggacagtctgtattttaacaagctattctgatgtacagaaaagtttgagagtcactggattagggagatgagtataatgcactaaggatccatccgagcttagtggtcttaaatttgatgtgaaagcagtcagtagattgtgttgaagcaaaaaagggttgagagaagtgaatgtgtacaaaggattattttaaatgatataccataaaatctaagctacataaagaagtgaggagagggcatcaaaatttgtgggatatagctaaagtagtactttggggaa

SEQ ID NO: 112648 - DNA, 674 bp, Homo sapiens
tgctctgggttttcttgaacttctattgttgtatctctttgtcaattacatattgatacattttcttaatttcagttttatgatttcagctttttaattggactttaagataactatctaatagaattggaagggtgaggtatatttaagggaatacaaatgtttttgtttgacgtttttaccattttgcatgtttctgtagtggcatctcaactattgcaatggaaaatatgtccttggcaagactcttagaaacacagcctcaaaggtcattggattgtgcaagcttcttgactatttacaaggtcacctacctgaatgaatagaaatgctccctgcccttaaggaatttgcaattttatgaagagagatgagtgagaactactttgtggattattcttggagaatgttgaatcccagatgagcttttagtcccctgatgttcattgtttttatctatgccatcagatcactgtgcccaaataatttgaattcatgttaataatagcttacgaaaaatgcagtaagagagcttgctggaaaagtgacagcatgcattttaaattacttctagttgacctggctttcattacccaaatatccacaggcccttccatgaatatggataattgagttgatatttagcaaataccattgaagaggttagatgtgtc

SEQ ID NO: 112649 - DNA, 530 bp, Homo sapiens
ttttttttttaaatcccattttacagaggtgacactgaagcttgaaagggatgagtcttgcatatggtcacatagccagcatgtggctgagcagggggcccaaagcaaagtcagcctgactttttggcatctgcttctggacaagtgtaggctgagacttctgagaaaggagccctaagaagccttttatgcactccagggagcaccctctgactgcggcagggttgttgggggtgccagtgttattttgcaccgagggtcatgcagagctgagactgttctggagagactcagagattgggggtttgcagcatcttcctcttagctggaggagagcatgggggcaggcctgcgtgggggcagcaggatggctgagttggcctgcctgagctttggacactccaggtttcttggccacgcacttttgttcctgagctcagaggccctggccacaggcttctggctatgggtctttggcgactcctgggggagaggggccccacctgtgtgactgaagaagacaaggaccc

SEQ ID NO: 112650 - DNA, 401 bp, Homo sapiens
ttgtgattcagatcaagcggtgagatgactacaggtaacagacccttgctatcatttgggtgttctcacaaggaacaggagccaggtagtgaaccatgtgcctaccctttgggcagggaatgggtggctctaagagatgacagatgctgtcatccggaatcagttctcatcttggtcaattggatgagtcagagagattttggaaacatcttcaggctaacccaatttacattatagttatattttaattgccttttaaagtctaaatgcagttgattgtgaaaactgtgtcacatcatttaagggaactagagctttctttttatggaaacgcaaaaggacctagcaggaaaataccacattgcctaagcagtaaagaaatatgtccggccgggcgcggt

SEQ ID NO: 112651 - DNA, 222 bp, Homo sapiens
ccacctctcccctctgtttgtaactgtcctgtctttgatatttaaaagctagttggccacttctggccatgccttatctggtacctgttagccaaccatgacagtgatgccatacccaggactgtctgcttcttgttctcaggcaggtaggtgctctcagcactgatgtctcttgctttccaagtcagcttttacatctggcctgctaggaactggagagca

SEQ ID NO: 112652 - DNA, 650 bp, Homo sapiens
tacaaaaagaattaaaaaaaaaattagccaggcacagtggctcctgcctgtagtcctagtgctttggaaggctgaagtaggaggattacttgagttgtgaacctttcagaatttaagcagagttttgaggaccacgtaaaggacgttgtgagactccgaaagtgtcatacaatggtgtccttaaggacctgaaaaacttaacagttcaccctatgtacaaatagcttataattacagagctatggcttcttagcagtcaatccctaaagaacaaatgctttttgggacagagtgtgatagtttacacctctttatgttcaagatgcctatttcttttctgatgttaaatgaagaatgaaaaacactgaattgtaactgttgatttttcttttttcttttttttgaggcagggtctcaacaaaaaacagacaccaacacacaaacacaaaaaaactttgttggggccgcccttgggcgctcttgaaaaaagtttttcttgacaaccccattctcgtttgggggcgcgccggggccccccgtttgtgttttatgtgtctgacaccctgtggcgccaatagagctgggttcccaaaagggagaaaacccggggccccgtcgacacactagtggccggggatttccctccccaa

SEQ ID NO: 112653 - DNA, 228 bp, Homo sapiens
tcctacgagcgcaggggagttacaaaaatatgtgaataaactgaatgcagaggctgaggcaggtggataatgagggtaatgatgtctaggggcccagactttaatgtgtaccggagcactcttagattgaaaagtagaggatttcctgagagattctagagacaaagttaacatggtaacatggaggaggttataaaagaaagtgtatgtatattaagagttaagagt

SEQ ID NO: 112654 - DNA, 192 bp, Homo sapiens
ctaggaaatttgggatactttatttaaataatatatcctttgccattttccaagacaaagctctcattttggcaaaaagagaaactatcttggattctggaggctactcaatgtttcatccttatagttactcaggtatccattgctgagtgagtaattctactcagcctttcatccacctgtaatttttca

SEQ ID NO: 112655 - DNA, 565 bp, Homo sapiens
ctggggattctcacagcatggtgaccgggttctatgtgcaagcagtccaagagagaggattccaacgggcacaggcagaagacacaaggcttttcatgacctagcctctgaagtcccagaaagttacagtctattggttaagcaagtcactaaagccagcccagattcaaggggacaagggaaatagactccaccactgaatagcaagaagggaagaaattggtggcggccactttggatacaagctaccacagaccaccctctggccccaacaaggccctcccacatgcaaaatacactcaccctcttctaagaccttcaaaagtctcatttcattatggcatcagcttgatgtccagaatctcgatatctaaatcaggtccagatgtggttgaggctcctcagatgcagttcctcaggtacagctactgcagtatagttcctcctgatctgaattaaagaaacaaattatctgctcccacacacccaacatacaaacatacaatagtgagactgacttaagataagcacaatagacactctcattcaaaatgtgaggaaaaag

SEQ ID NO: 112656 - DNA, 339 bp, Homo sapiens
gaggttgcagtgaggtgagatcatgccactgtacctcagcctgggtgacagagtaggactttatattgtactgccataacattttaattcaaatagaatataactgaattgtaagggtaatccctaatatttagctttgaattgttgtagaaatataaaatggtagagctgaaaaggttttgtagtctaataacctcctgtttctattgaagcagaaattgggccaggcgcagtggcttgtacctgtaatcccagcactttgggaggccaaggcaggtggatcatttgaggtcaggagttcgagaccagcctggccaacacagtgaaaccctgtctcta

SEQ ID NO: 112657 - DNA, 284 bp, Homo sapiens
ttctcattatttttccctttattctttagaattaaatacagaatagcaagattttagttggttgcctgatgattatctgactccactgaaagttgtcagttttgtgggcattgttggaaacatgcagctattccctgcttcattatttcgtttgagagattatattgtcattgaatgtatcaattagagtagggttctgcagcaaataacagaaacccctttgcagtggcttaagcaagtcagggattcctcatggaacagcaagtccagctgcacacagtcct

SEQ ID NO: 112658 - DNA, 810 bp, Homo sapiens
atcctgaattgtttcactgagttctttgtattggttttcagatttctcttgcacctcactgaccatatttaaaaatcagtattttgagttccttatctgagactttaagaatttcattctggttatgatctattagtggagaactgttgtgttcattctggggtgtcatacttccttgtttttcatgtttcctgtgagactctgaatttctatcaagtttccagttgatgccaataatgctgattccacacagcctttctcaaccagcattcattatctgaaccatggaacacagagaatgttttgagaagctcttttctcaattctcccaaggatggtacctaaccagaaccattctagatacaaatcaggacactgattccttacatgcaattagtgcctttggtttagggcttaatttttttgaggaaacttggttgagaaagctgtctttgtaaagctgctaaagagaaaggctcagactctgaaaaagctagctttatagagaaaactacaccattaccacctttaattctaaccggtcttttgtatcaataatatcatatcgatgataatgaaataattggactaatagtgttttggtctacgaaatatcatctattaattcagtaattatttgtggagtacctgctattgcttagcactgtgatgctgaaaacatttgaagaataaatgatgaaataattattcataacttttaagcaccttcttcctgttgttcatcattaaacttaagtgaaatatctgtacatgactcagatactttagaaaaatattctcagcaaaaaa

SEQ ID NO: 112659 - DNA, 486 bp, Homo sapiens
ctgtaggtgcccactttactgatgagaaaactgaggctcagggagatgaaatgaccttttaaagagctaggattctgatccttgcctgtccaatttgcaagtccattctcttaacttctactgtatactacttctccaggtttaagacctggggagctaggaaggagcaagaaagagttagatcattgtaaaaagagaggcagagaagaagcctgtcctctctcctttgcattgtaacttgtttgctccctccttgtcactttctccctcagattccatttcctagaactttggagtcatcttagaatccccaggggtaatcagagaggctaattaagctatagaggccccattagccataagactattagtattcattaggtctgttggcagcagaagttggactatggtcattgaaaagtgccagatgggtagagtcctttctctaggatgtcagtatcccagaaccctcttctgagtgttccc

SEQ ID NO: 112660 - DNA, 317 bp, Homo sapiens
tgtatttttagtagagacagggtttcaccataatggccaggctggtctcaaactcctgacctcagatgatcgcccgcctcggcctccgaaagtgctgggattacaagcgtgagccaccgcgcccagcctttaattcatctttaaatgaattgtccccattttctaggagttattatcttttctaaaaataacataacttttttggattaaatttagatatcctatttatatcttcagcattgaatcaatattttattaaatatacattaagggagcttcagtgatactaaaagagtgtgatgctgttgtaaatttgc

SEQ ID NO: 112661 - DNA, 405 bp, Homo sapiens
gcggccgcctactactactaaattttcggccggtcgatttttttttttttttttgagatggagtcttgctctgttgcccaggctggagtgcagtggcacaatcttggctcaccacaacctctgcctcccgggttccagcaattctcctgcctcagcctcctgagtagctgggactacagacgtgtgccaccacacccggctaatttttgtatttttagtagagacggagtttcactatgttggccaggctggtctcgaactcctgacagcaggtgatctgcccgcctcagcctctcaaagtgatgggattacaggtgtgagcctccacgcccagcctgaacccgcttttaatatccactccttaagaagactactagggttctaatgaaaaggttaaaagccact

SEQ ID NO: 112662 - DNA, 834 bp, Homo sapiens
gcccatctctgggattcccagcccagatgaatcaccaaaaagggccctcgccttcctttggggtccagccttgtggtccccatgactctgcccggggtgggatgatcccacatcctcagtcccggggacccttcccaacttgccagctgaagtctgagctggacatgctggttggcaagtgccgggaggaacccttggaaggtgatatgtccagccccaactccacaggcatacaggatcccctgttggggatgctggatgggcgggaggacctcgagagagaggagaagcgtgagcctgaatctgtgtatgaaactgactgccgttgggatggctgcagccaggaatttgactcccaagagcagctggtgcaccacatcaacagcgagcacatccacggggagcggaaggagttcgtgtgccactgggggggctgctccagggagctgaggcccttcaaagcccagtacatgctggtggttcacatgcgcagacacactggcgagaagccacacaagtgcacgtattgaagggtgccggaagtcatactcacgcctcgaacacctgaagacgcacctgaggtcaacacacagggtgagaagcccatacatgtgtgagcacgagggctgacagtaaagccttcagcacatgcccagtgaactgagccaagacaccaagaatcggaacccattcccacatgaggaaggccgtatgtatgtaagctccctgggttgccccacacgctatacagatcctagctcgattcgacaacatgtcacgaacgtgatggtactgacgcccatgtgaccaaaaggaacgggggaatgcccctga

SEQ ID NO: 112663 - DNA, 805 bp, Homo sapiens
cgcccgccaccgcgcccggctaattttttgtatttttagtagagacggggtttcaccttgttagccaggatggtctcgatctcctgacctcatgatccacccgcctcggcctcccaaagtgctgggattacaggcgtgagccaccgcgcccggccaaattcactcttaactataaaaaataactagaaatcgggtgtattctttactgacaatttctcccaatgtaatacctcataaaattatagtaaatagttcattacattttacttgttataatagtaattaaaaataacaaattattcataaatgttccctttttcctggaatcaggattcataatttgaaaagcctaactcttaggggttcttatcaagatgctatgttacttcatcctgtgatttatctgtgtgtcacccaggatactcatttgcaagtcaaacaggaaattggttggaaagacattggggcatctcatttatctgtgagagggcccacattgcttgtgggattaagaaacagccagaatcacaaactctaaggcctctaagaggttttttatctttgcctctcatttgcttatcggcctcattctgttagctggcttcttccacatggtgagtcataagcattgtactaaaactcacagaaattgtttctagataggattgtctagtttttcattttaagacaagatgaagaagaaagaaaaagaaaaaaagaaaggtaggagaggctctgattggcccagctaaggtcacttaaagacgcttgaccaattacccaaggttaaagggacagaatatgt

SEQ ID NO: 112664 - DNA, 696 bp, Homo sapiens
gaagaaattattgtaactcaagtatagtactagtactgtctgactgaaatgaaataaaacccatgactgattgaattcctggccacttcaaagcaggtatgaaagtgattcatacccaaacatcacaggttcatttgagagttaagagattgaatagatcatgagtaactgcagttaatttaaaccatgtatgcagaatatttggaggtgatgatcaaagcgagcattgataataatattcataatgttaattcataatgttaatgctttgaggaaataagacagcagtaaccctgtcttctttagaggacctctggatttatatccatttagaacattcatattgttaaattaataaaacttctttaggagattgattattttacccaagtatgctttccatattaatgtaaacattaatatcaataactttatatgttcctcagagtgagggaaaagtcaaccttaacatagagtcaaaaataaacacaagaacctgaagactttaaccaaaagtttttactaacctgttccctaaaacttgagaaatataaagatagtgaaagtggtttcctcccaatacatttattgagcattttaagtttatggaactgtgtggtggattttccagcatatcagggaagcaaaagcgatgtctcttgtcttcacaagcttaaaatgtcattggggagacaa

SEQ ID NO: 112665 - DNA, 188 bp, Homo sapiens
aggaacaagatatagtaggtaccttctgcagatgttcccaaccataaagaaagtaaaggagcactcatctacccattaattcaacaaatattgagtgaatacctactatgggccaagtaaaaatcctaggtacttggttactttagtaaacaaacaaacacaacaattcctttcttggtggagcttaa

SEQ ID NO: 112666 - DNA, 618 bp, Homo sapiens
cgaggactctgcttacttaacccagtgtgatgttttaatctatgtatataccatagaaagataaaatcaacctaagtaacatatccatcatctcagctacttatttttttgtggtgagaaatacattcttttttagcaattttgaagtacgtattgtttttctgacacgttacaacatgggtgaaccttgaggacattagctatgtaaaagacggacacagaaagacaaatgttgcatgatttcacttatatgaggtacctagaatgggcaaattcttagagacagaaaggagaacagaggttatcaggggctggagaaaaggaagttcagtttgggtgatgacaaagttctggaaataatagtggtgatggttacgtaactctgtgagtgttgtgatggtactgaatgctactgaatgctgtccctaaaatttactattttaaccatttttacgttatgtatataggaaaagaaaggggaaggaaaggagaaaagaaaaccaataacaaaatgatcattcctgattctttaacaactgaaattctaccaaattctactagaatcactctaacactgagtgatttgggacaatcggcccctttccattttttaatcgc

SEQ ID NO: 112667 - DNA, 576 bp, Homo sapiens
gaataaaaagtttgagactgataactatatatagcattgcattctaacacaatttattttcccatatacctaatgatggacattctggttgcttccaatagttgactattatgattagtgctgctatgaacattcctgtacatttcttttggtggaaataattactcttttctgttaggtatgcacatcagagtgaaattgctgcatcataggatataaatttcttcagctgtagttgacattatgcaacaattttctaatttaggccaggtgtggtggttcacgcttgtaatctcagcactttgggaggctgagataggcatatcacttgaggtcagtagtttgagacctgcctggccaacatggttaaaccctgtctctactaaaaatacaaaaattagctgggtgtggtggtgggtgcctgtaatcccagctacttgggaggctgaggcgggcggatcacctgacatcaggagtttgagaccagcctggccaacgtggtgaaaccccgtctctattaaaaacacaaaacaaaattaaccaggtatggtggcaggtgcctgtaatcccagctac

SEQ ID NO: 112668 - DNA, 263 bp, Homo sapiens
attgcactccagtccgggcaacaagagcataactccgtctcaaaaaaaaagaaagaaaatagggaatgaaaaaatgatgaagtaatagaaaataatagggaaacaatatcagttgtctggagagatgcattgaaacagagaactgaaggatgggaaggaaccagccatatagggattggtttcagtcagaggttgggaaggaggcatgatgctctaagaaaataacaggtgtggcatgtttgaggaactgaaaagatgttagt

SEQ ID NO: 112669 - DNA, 993 bp, Homo sapiens
tgacgtcagcatggccgcggcccctgactacccagctcccttctatccctcgagcggcaggaatccgtccccacgcccttttcctttaaagggcaacgggccgaaggtggggcgggcggcgcggctcccgcgatccattcaggtcaaaagggagagtgatcaaacaggagagccgaggggacctatattcagagacttaaccggacacctggacagaccattacaacttgggacttttcaggagaatgagggaaatgtagttattgcacctgagcctcactccagctctgaggtcctcttcacttctctttggaagaaaattggatatcttttcctagttgaaagagtagagatctgatttctccaaggatcatcgctttttgacacgggattattagaagcattcattcatctatcaaggagttttgggatacttgccataagccaagccctctgataggtgctggaaacatcaagctctgtgcccaggaagttcatccttggactgcacgcatgaacgagtttgctgtcttcccattggattcagccagtccgcggtcctggaagcaagaaatactttcccagacaaataaaagctgaggccatatccatcaacatcagaaccctgtctgtacaacccaatgcttacagggaggtccttcatcccaaaagaaccagatgtcacggagcacacactcactccttcctgcaggtgccacaactgtcctggtacatggcaagttacaaggaaaaaaccaggaaatatttcattaaccatgggaagctgacattgcgtgtagagtgtggctaacgtaccgcccataatggttcagcataacaatgacgtaagatattaatgtaattgacactgacgtaattgtcacgagaagtgttacaagaagcttagacgtggcgcacaaggaaatagacacagggagtagcaccgagcacggtgtcacaaaaggcagcgttagaacaggtaacggggtatag

SEQ ID NO: 112670 - DNA, 297 bp, Homo sapiens
aatgctgcggactcggcaggcaggggcaggtgtttgcctgtgcttccaggcctccttagcaccaggctctgccgtgccgcccccctcatgccctctactggcccgtatctccaggtgggtggggcacctgtgggtctgctgccccgctcctgccccatccccccaacacacgccgcttcccagccaccgatcagctcctgtgggcggcactatttctgaatcccagtgagttaggacgggacagccagagcaggtctgtctggaggtggtgtgggtgggtgccgagtccgctgcatt

SEQ ID NO: 112671 - DNA, 566 bp, Homo sapiens
atgaaatgagttgatgagatgatgagatgaaatgatgagatgaaaagagatgaaatgagatgaaattagatgaaatgaaattagatgaaatgtaatgagatgaaatgaaatgacataatgaaatgaaataatgaaatgaggtgaaattaaatgagatgatgaaattaaatgatgaaatgaaataatgaaatggaaatggaaatgatgagatgagatgaaatgatgagatgaatgatgagatgcaatgatgagatgaaatgatgagatgagatgagatgtaatgatgagatgtaatgaaatgagatgaaatgaatgagatgaaatgaaataatgaaggaaattgaaatgagatgaaatgagataaaatgagatgaaataagaaatgatgagatgaaatgatgaaatgctgaggtgagatgaggtgaaaggagatgaaatgaaaggatgagatgaaatgatgagatgagatgaaatgagatgaggtgagatgagatgaaatgagatgaaatgatgaaatgctgaggtgagatgaggtgaaaggagatgaaatgaaaggatgagatgaa

SEQ ID NO: 112672 - DNA, 439 bp, Homo sapiens
tatatttcatggagcctgtgttccctttttcagtgtatttctgtcatgttctgatccccagacacaaagtagaagccatcaaagcctccactaatacaggcaggaggacagaggttgatgctaacactgtgtgaatgtatggataactttatcatatttacatgtgagtgattatgtatcccttttgcttttcagtgtcttctcggaaaaaaccagccttgaagtgtcttctccgaaacaaccagcattgaaggctatctgtgacaaggaagattctgttccgaatatggccacggaaaaaaaggatgaacaaatatctgggacaggtaattttgcaaacacatttaatatgatgttcggtcagggtagaagagaacttctcttcaccaaataaaacagcaggatgatgaattcgcgcaacaggatgaaaaattcgcgc

SEQ ID NO: 112673 - DNA, 352 bp, Homo sapiens
gttgcagacattatatccctttacccctaaatacttcaatgcatatttcctaaaaacaaggctattctgtttaataactacagtataattatcagacctagaaaattaacactgatgccttgttagcactattaccttatctgcaggctgtattcgatgccccactaatgtcctttatagcaaatgaagaattttttagtccagaatctgatccaagatcacatactatatttaggtggatctatttcctcagaaaacattctttttttttttttttttttgagatggagtatcactctgtcacccaggttggagtgcagtggcacaatcttggctcactgcaacctctgcc

SEQ ID NO: 112674 - DNA, 647 bp, Homo sapiens
ttttgttgttgttgttgttgaattgttagtagagacaatgtttctccattttggtcaggctggtcttgaactcctgacctcaggtgatccggccgcttccgcctcccaaagtactgggattacacgcatgagggaccgcgcccagccaccacttagcatttacattttgcaattgttgaagttatagatttatacacacatcaattgctgctttgttatacacttgcatatacataagatgggaaatagaaaagaataaaatgggcacggtatccctgaagtttcacattctgagactttaaaaatatttgctctttagaaatttgtttcaataaagaaactgtggtatacacacccaatgaagtattattcagcctaaagaggaagaaaatcctctctgctgcagacaaaatggatgtgattgcaggtctgtatattaaatgaaataagccaggcacagaatgtcaaatatttcatgtcctcacttctacgtaggaagaaaaaaggaaaccttgaccaggcgtggtggctcagacctgtaatcccagcactctgggaggccgagtcgcacggatcaattgagtccaggggttcgagacccgcttggccaacatggtgaaaccccgtctctacggaaaaaacaaaca

SEQ ID NO: 112675 - DNA, 767 bp, Homo sapiens
gtagctgggaatacaggtgtgtgccaccacacccggctaatttttgtattttttagtagagacagggtttcaccatgttagtcaggctggcctcatactgctgaccttgtgatccgcccgccttgacctcccaaagtgctgggatttcaggcatgagccaccgtgcccagcctgtaggatgtctttaaatattcttgatattaatactttgtcagttgtgtgaatttcagatacctgctgccagtttgcaaattgcttgattattaatcccttgtcagatgggtggttggcaaattattttctcccattctccaggttgtcccttcactttgttggttgtatcctttgatgtacagtagctttttaatttgatgtgatcccatttgtccatttttgcttagcttgcctgtgcttttgaagtcttactccagaaatttttgcccagaccaacgtcctggtatgtttccccaatgttttcttgtagtagtttcatagtttgcggtcttagatttaagtctttaattcacttagattgtattttttgtatatggcaagaggtaggggtctcattcttctgcatatggatatccagttttgcttgggctgatttctaaaaattgaaactggtaacatttgagtagtgagattatgggaaatgggggaggagagactttgttttctaccattctttatggtttaaatacatatgtatttctgtatgtgtctatagcaggtgtggagattttaattatatgtgtcattgtata

SEQ ID NO: 112676 - DNA, 142 bp, Homo sapiens
agcatcacctgagaacttcagtcccagacccactggaaaagaatctgtattttaataagatccccagatggtttgcttacacattaagtgtgagccatgctgcttcagagttattgcctgaggagtggctgtccgaccaagt

SEQ ID NO: 112677 - DNA, 320 bp, Homo sapiens
actattgtttggtaatttgattcagtttgtgaatatggggagaggaattgggcaacaggagttattgaaatgtgaggattggtaaggtggaaatcacagaggaacagaaaggagggagaattcgtgggttgtaagtgcattagtgacctgattaattttgtgagtcttggcagagggaagaggaagggtgtggttcagagttgagaagagcacattagtaaactactggagatcacgatagaattgatagatcacaaagaaaggaagacatggaaaagcaagacgttgcttcctcaaccagagcaagacgttgcttccct

SEQ ID NO: 112678 - DNA, 90 bp, Homo sapiens
  misc_feature (85)..(85): n is a, c, g, or t
  misc_feature (87)..(89): n is a, c, g, or t
tggattggtccaggattggggttttgctagtccatagcaattcgaagggcagtgggctagtgttatgagaatattggcaaaaaanannna

SEQ ID NO: 112679 - DNA, 725 bp, Homo sapiens
ataaacaaagtgaataatagaacataatctaactgtatgctgcctacaagaaactcacttcaaattctatgattagttaagttgaaagtaaaagggtggaaaaacatatatcatacaaatattaatttttaaaaaaacaggagtgcttatactagtatctgataaaagtggactttggaacaaagaaaatatctggaaacaagaaggaacattatataatgataaaagaatggatccacctggaagacaaaatgatcttatgtacataccaaataacagagcctcaaaatacacaaagcaaaaactgatagaactgaaagagaaacaaataaatcatcaattatatttcaggacttcaatgtcctctctcaacaacaaatagaactactatacagaaaatcatcaagaatatagaagattgcgccatcacaatcagcaaatagaatctaattgaaatatatagaatactccatccaacaacagcagaatatactttttatctcaagcaaccgaagaacattcaccaaaatagatcatatcataggccataaaaaatgcttagcaaatttttacagaatgtgttatccataacaaaaaaatagcagaaaaatctctaaaacatgaaaatttataacacacttctaagttatcaacaggtcaaagagtaagtctttaaaggcctcacatcaataacctaagttcctattttgagaaacgagaaaaat

SEQ ID NO: 112680 - DNA, 566 bp, Homo sapiens
agagctatagatgtatgtaggctaaaatattttattctgaatttaaccatattctgtaatacattaagaaaaccctagtgatttcttggttagaaattggtcaaaccaggaatcttagtctagaaacttttaaacttatacactgtatgtacattacttaagtactttaaaatctttaaaacatgaagtattctatttctttgacattcagtgggacacataatgaggccatcatagatttgatggtgacctaaatagccactacctctggccttgggttacttggcttcctggcccggcaacaacagattctgttacagacacctaactatctgtaatgctaccgatactaggtgagaacatgtagactttttgagggagggagaggccattcttaggatactgaggtaggaacagctagctaccatttgtattgtggttacaatgataaataaactacttcatcaaagcaattgggatttttttgttagaggatttttcagcctctttttatcctacttcattatatttattgttggggtatagttaggtaagcaaaaaagaaa

SEQ ID NO: 112681 - DNA, 554 bp, Homo sapiens
aacactgggatgggaacctgaggctatttgactccagagtatacgtttttaatgactattttcatacctataagttaggtaaatgaataaaaagaaggaaaaaggaacaaagagaagaaataaagattatcaggaagaatttttcatgagagctaagattagctctgatgaagcttttctctccccaaagagaaaatgcttttctagcaactggggtgttgatgctttctgggttcagtgtctctcttcgtggggagcattgcaccgctctgtcaattttctttctctttatacttcccatggtaaaggaacccctctgctttggtgctctatgttcttcctggagatatgataatatgctgatttggctacagtcaagtcttgacctatcctgggagccgtgctgtttctatggtgattgcccatatatcagctgtcagctgttattcattgattttcttggtcaaaagctcagattactgagggcactatttatggttgccagaaagccctgtatcctgcccatatatttcttctcttctattctcttcctc

SEQ ID NO: 112682 - DNA, 244 bp, Homo sapiens
agctaacagcctcccccaaaccaaaagcaaatgcaaaagaacagaaaaaggaaaacagaagctgtaatacgcatcatctcttttccaagctaaatgttctctgagtctaagccactaattctgatttggaaaactaatattcccatccaaaatgaggaaagcaaccttctcttagaggcaaccttcctctaacggacagcattccagccttcccaaggtaggggcacctggggctgccagagcc

SEQ ID NO: 112683 - DNA, 275 bp, Homo sapiens
ctagtgacaacacataacaaagtaattttttataaagtgtatactctatcttgggccctggatataattaaagcttaaagtttttgtctgtttgcagtaaatatactaattttaaaatacatcttttaaagtagccattttaagatcagcttgtatggattcagggcattttaaaacaggaatttattatttggcttcatgaaagatgcatgtgaggagaaagtgaaatgctttgtccacatgacacagctggatgttttgggcatgcagatggg

SEQ ID NO: 112684 - DNA, 1710 bp, Homo sapiens
cccagagggagagtagcaaagggttaaaatccttttgattgacgttgtagcctccggtgccctgggctcaggcgcgcgccattggccgccagaccttgtgcctggcggccaatgggggggcgcggtccacgagcggtgccgcgtgtctcctcctcccattggctgaaagttactgtgggaaagaaagtttgggaagtttcacacgagccgttcgcgtgcagtcccagatatatatagaggccgccagggcctagggatcacacaggatccggagctggtgctgataacagcggaatcccccgtctacctctctccttggtcctggaacagcgctactgatcaccaagtagccacaaaatataataaaccctcagcacttgctcagtagttttgtgaaagtctcaagtaaaagagacacaaacaaaaaattctttttcgtgaagaactccaaaaataaaattctctagagataaaaaaaaaaaaaaaaaggaaaatgccagctgatataatggagaaaaattcctcgtccccggtggctgctaccccagccagtgtcaacacgacaccggataaaccaaagacagcatctgagcacagaaagtcatcaaagcctattatggagaaaagacgaagagcaagaataaatgaaagtctgagccagctgaaaacactgattttggatgctctgaagaaagatagctcgcggcattccaagctggagaaggcggacattctggaaatgacagtgaagcacctccggaacctgcagcgggcgcagatgacggctgcgctgagcacagacccaagtgtgctggggaagtaccgagccggcttcagcgagtgcatgaacgaggtgacccgcttcctgtccacgtgcgagggcgttaataccgaggtgcgcactcggctgctcggccacctggccaactgcatgacccagatcaatgccatgacctaccccgggcagccgcaccccgccttgcaggcgccgccaccgcccccaccgggacccggcggcccccagcacgcgccgttcgcgccgccgccgccactcgtgcccatccccgggggcgcggcgccccctcccggcggcgccccctgcaagctgggcagccaggctggagaggcggctaaggtgtttggaggcttccaggtggtaccggctcccgatggccagtttgctttcctcattcccaacggggccttcgcgcacagcggccctgtcatccccgtctacaccagcaacagcggcacctccgtgggccccaacgcagtgtcaccttccagcggcccctcgcttacggcggactccatgtggaggccgtggcggaactgagggggctcaggccacccctcctcctaaactccccaacccacctctcttccctccggactctaaacaggaacttgaatactgggagagaagaggacttttttgattaagtggttactttgtgtttttttaatttctaagaagttactttttgtagagagagctgtattaagtgactgaccatgcactatatttgtatatattttatatgttcatattggattgcgcctttgtattataaaagctcagatgacatttcgttttttacacgagatttcttttttatgtgatgccaaagatgtttgaaaatgctcttaaaatatcttcctttggggaagtttatttgagaaaatataataaaagaaaaaagtaaaggc

SEQ ID NO: 112685 - DNA, 699 bp, Homo sapiens
aattcgcggccgcgtcgacgcgaaagacgacagaaggggacacaggatccggagctggtgctgataacagcggaatcccccgtctacctctctccttggtcctggaacagcgctactgatcaccaagtagccacaaaatataataaaccctcagcacttgctcagtagttttgtgaaagtctcaagtaaaagagacacaaacaaaaaattctttttcgtgaagaactccaaaaataaaaaaaaaaaaaaaaaaaaaaatttggggggggccggggcccggaaaaagtttttaacccttggttggggcggcgggggcgccacgtaaggtgataaggtagacattgtgggctaataaacgtgtgttccctagaggagaagaactctcgggggccatagagactataggtcgcttgggagttctcctcacccaatatataaaaaaagccgccggggggggcaccccgagacgagtttctggaaaacaaaactcccagagagagggggagttctggagagagggctcaattagcggggagatctcatctctaaccggggagagttccacagggagaagcactccgaaaatattaaaattatagccccccgcgcggcggagtttaacacacgaagacggagagaagagaaaagaagaacaagagaaagaaaccgccgagaagacgaaaaggagagagagaaggg

SEQ ID NO: 112686 - DNA, 1490 bp, Homo sapiens
aattcgcggccgcgtcgacgcgaaagacgacagaaggggacacaggatccggagctggtgctgataacagcggaatcccccgtctacctctctccttggtcctggaacagcgctactgatcaccaagtagccacaaaatataataaaccctcagcacttgctcagtagttttgtgaaagtctcaagtaaaagagacacaaacaaaaaattctttttcgtgaagaactccaaaaataaaattctctagagataaaaaaaaaaaaaaaaaggaaaatgccagctgatataatggagaaaaattcctcgtccccggtggctgctaccccagccagtgtcaacacgacaccggataaaccaaagacagcatctgagcacagaaagtcatcaaagcctattatggagaaaagacgaagagcaagaataaatgaaagtctgagccagctgaaaacactgattttggatgctctgaagaaagatagctcgcggcattccaagctggagaaggcggacattctggaaatgacagtgaagcacctccggaacctgcagcgggcgcagatgacggctgcgctgagcacagacccaagtgtgctggggaagtaccgagccggcttcagcgagtgcatgaacgaggtgacccgcttcctgtccacgtgcgagggcgttaataccgaggtgcgcactcggctgctcggccacctggccaactgcatgacccagatcaatgccatgacctaccccgggcagccgcaccccgccttgcaggcgccgccaccgcccccaccgggacccggcggcccccagcacgcgccgttcgcgccgccgccgccactcgtgcccatccccgggggcgcggcgccccctcccggcggcgccccctgcaagctgggcagccaggctggagaggcggctaaggtgtttggaggcttccaggtggtaccggctcccgatggccagtttgctttcctcattcccaacggggccttcgcgcacagcggccctgtcatccccgtctacaccagcaacagcggcacctccgtgggccccaacgcagtgtcaccttccagcggcccctcgcttacggcggactccatgtggaggccgtggcggaactgagggggctcaggccacccctcctcctaaactccccaacccacctctcttccctccggactctaaacaggaacttgaatactgggagagaagaggacttttttgattaagtggttactttgtgtttttttaatttctaagaagttactttttgtagagagagctgtattaagtgactgaccatgcactatatttgtatatattttatatgttcatattggattgcgcctttgtattataaaagctcagatgacatttcgttttttacacgagatttcttttttatgtgatgccaaagatgtttgaaaatgctcttaaaatatcttcctttggggaagtttatttgagaaaatataataaaagaaaaaagtaaaggc

SEQ ID NO: 112687 - DNA, 1835 bp, Homo sapiens
cccagagggagagtagcaaagggttaaaatccttttgattgacgttgtagcctccggtgccctgggctcaggcgcgcgccattggccgccagaccttgtgcctggcggccaatgggggggcgcggtccacgagcggtgccgcgtgtctcctcctcccattggctgaaagttactgtgggaaagaaagtttgggaagtttcacacgagccgttcgcgtgcagtcccagatatatatagaggccgccagggcctagggatcacacaggatccggagctggtgctgataacagcggaatcccccgtctacctctctccttggtcctggaacagcgctactgatcaccaagtagccacaaaatataataaaccctcagcacttgctcagtagttttgtgaaagtctcaagtaaaagagacacaaacaaaaaattctttttcgtgaagaactccaaaaataaaattctctagagataaaaaaaaaaaaaaaaaggaaaatgccagctgatataatggagaaaaattcctcgtccccggtggctgctaccccagccagtgtcaacacgacaccggataaaccaaagacagcatctgagcacagaaagtcatcaaagcctattatggagaaaagacgaagagcaagaataaatgaaagtctgagccagctgaaaacactgattttggatgctctgaagaaagatagctcgcggcattccaagctggagaaggcggacattctggaaatgacagtgaagcacctccggaacctgcagcgggcgcagatgacggctgcgctgagcacagacccaagtgtgctggggaagtaccgagccggcttcagcgagtgcatgaacgaggtgacccgcttcctgtccacgtgcgagggcgttaataccgaggtgcgcactcggctgctcggccacctggccaactgcatgacccagatcaatgccatgacctaccccgggcagccgcaccccgccttgcaggcgccgccaccgcccccaccgggacccggcggcccccagcacgcgccgttcgcgccgccgccgccactcgtgcccatccccgggggcgcggcgccccctcccggcggcgccccctgcaagctgggcagccaggctggagaggcggctaaggtgtttggaggcttccaggtggtaccggctcccgatggccagtttgctttcctcattcccaacggggccttcgcgcacagcggccctgtcatccccgtctacaccagcaacagcggcacctccgtgggccccaacgcagtgtcaccttccagcggcccctcgcttacggcggactccatgtggaggccgtggcggaactgagggggctcaggccacccctcctcctaaactccccaacccacctctcttccctccggactctaaacaggaacttgaatactgggagagaagaggacttttttgattaagtggttactttgtgtttttttaatttctaagaagttactttttgtagagagagctgtattaagtgactgaccatgcactatatttgtatatattttatatgttcatattggattgcgcctttgtattataaaagctcagatgacatttcgttttttacacgagatttcttttttatgtgatgccaaagatgtttgaaaatgctcttaaaatatcttcctttggggaagtttatttgagaaaatataataaaagaaaaaagtaaaggcttttatgtcttcgaactgattcttccagaatatgtaaaaaggcttttggtggaatttgaattacatgtaattggtaattcaggaattgactcttttgttattaaaagaacatttgtaaaaatcca

SEQ ID NO: 112688 - DNA, 1456 bp, Homo sapiens
cccagagggagagtagcaaagggttaaaatccttttgattgacgttgtagcctccggtgccctgggctcaggcgcgcgccattggccgccagaccttgtgcctggcggccaatgggggggcgcggtccacgagcggtgccgcgtgtctcctcctcccattggctgaaagttactgtgggaaagaaagtttgggaagtttcacacgagccgttcgcgtgcagtcccagatatatatagaggccgccagggcctagggatcacacaggatccggagctggtgctgataacagcggaatcccccgtctacctctctccttggtcctggaacagcgctactgatcaccaagtagccacaaaatataataaaccctcagcacttgctcagtagttttgtgaaagtctcaagtaaaagagacacaaacaaaaaattctttttcgtgaagaactccaaaaataaaattctctagagataaaaaaaaaaaaaaaaaggaaaatgccagctgatataatggagaaaaattcctcgtccccggtggctgctaccccagccagtgtcaacacgacaccggataaaccaaagacagcatctgagcacagaaagtcatcaaagcctattatggagaaaagacgaagagcaagaataaatgaaagtctgagccagctgaaaacactgattttggatgctctgaagaaagatagctcgcggcattccaagctggagaaggcggacattctggaaatgacagtgaagcacctccggaacctgcagcgggcgcagatgacggctgcgctgagcacagacccaagtgtgctggggaagtaccgagccggcttcagcgagtgcatgaacgaggtgacccgcttcctgtccacgtgcgagggcgttaataccgaggtgcgcactcggctgctcggccacctggccaactgcatgacccagatcaatgccatgacctaccccgggcagccgcaccccgccttgcaggcgccgccaccgcccccaccgggacccggcggcccccagcacgcgccgttcgcgccgccgccgccactcgtgcccatccccgggggcgcggcgccccctcccggcggcgccccctgcaagctgggcagccaggctggagaggcggctaaggtgtttggaggcttccaggtggtaccggctcccgatggccagtttgctttcctcattcccaacggggccttcgcgcacagcggccctgtcatccccgtctacaccagcaacagcggcacctccgtgggccccaacgcagtgtcaccttccagcggcccctcgcttacggcggactccatgtggaggccgtggcggaactgagggggctcaggccacccctcctcctaaactccccaacccacctctcttccctccggactctaaacaggaacttgaatactggatgaaagcactcgacatgaagggatcctctagatagcc

SEQ ID NO: 112689 - DNA, 816 bp, Homo sapiens
cccagagggagagtagcaaagggttaaaatccttttgattgacgttgtagcctccggtgccctgggctcaggcgcgcgccattggccgccagaccttgtgcctggcggccaatgggggggcgcggtccacgagcggtgccgcgtgtctcctcctcccattggctgaaagttactgtgggaaagaaagtttgggaagtttcacacgagccgttcgcgtgcagtcccagatatatatagaggccgccagggcctagggatcacacaggatccggagctggtgctgataacagcggaatcccccgtctacctctctccttggtcctggaacagcgctactgatcaccaagtagccacaaaatataataaaccctcagcacttgctcagtagttttgtgaaagtctcaagtaaaagagacacaaacaaaaaattctttttcgtgaagaactccaaaaataaaattctctagagataaaaaaaaaaaaaaaaaggaaaatgccagctgatataatggagaaaaattcctcgtccccggtggctgctaccccagccagtgtcaacacgacaccggataaaccaaagacagcatctgagcacagaaagtcatcaaagcctattatggagaaaagacgaagagcaagaataaatgaaagtctgagccagctgatattttggttctcaaaaactgcattattaataatattttagtatacagagctattctacagtttttacattgtaaacatgactgtggttttgtatttgctaaatataggggttggactaaaatataataaatctgtaccttatcaaaaaaa

SEQ ID NO: 112690 - DNA, 315 bp, Homo sapiens
agttttgtgaaagtctcaagtaaaagagacacaaacaaaaaattctttttcgtgaagaactccaaaaataaaattctctagagataaaaaaaaaaaaaaaaaggaaaatgccagctgatataatggagaaaaattcctcgtccccggtggctgctaccccagccagtgtcaacacgacaccggataaaccaaagacagcatctgagcacagaaaggtaagggcggtacctgtatctctttgcagcccctcaaaattaagtaggggttggggggcttctttctgtcttgaaaccccgggatggcagattccatggg

SEQ ID NO: 112691 - DNA, 2112 bp, Homo sapiens
cccagagggagagtagcaaagggttaaaatccttttgattgacgttgtagcctccggtgccctgggctcaggcgcgcgccattggccgccagaccttgtgcctggcggccaatgggggggcgcggtccacgagcggtgccgcgtgtctcctcctcccattggctgaaagttactgtgggaaagaaagtttgggaagtttcacacgagccgttcgcgtgcagtcccagatatatatagaggccgccagggcctagggatcacacaggatccggagctggtgctgataacagcggaatcccccgtctacctctctccttggtcctggaacagcgctactgatcaccaagtagccacaaaatataataaaccctcagcacttgctcagtagttttgtgaaagtctcaagtaaaagagacacaaacaaaaaattctttttcgtgaagaactccaaaaataaaattctctagagataaaaaaaaaaaaaaaaaggaaaatgccagctgatataatggagaaaaattcctcgtccccggtggctgctaccccagccagtgtcaacacgacaccggataaaccaaagacagcatctgagcacagaaagtcatcaaagcctattatggagaaaagacgaagagcaagaataaatgaaagtctgagccagctgaaaacactgattttggatgctctgaagaaagataagctggagaaggcggacattctggaaatgacagtgaagcacctccggaacctgcagcgggcgcagatgacggctgcgctgagcacagacccaagtgtgctggggaagtaccgagccggcttcagcgagtgcatgaacgaggtgacccgcttcctgtccacgggaaatgctgctcgctcttttaattaaaaaacaaacactttctcagctactaagagtgaaaccccccgccctgcggggtctggcactcgctggtactgcgttctcccaggcgggagggcccggccttattcgctggggtccagagataatgcttgcgctccgtggccgggaggagggacccccagcactctgaagcagctgacacggggctcactttcctttcttgcctactctatgcagagctcgcggcattccaagctggagaaggcggacattctggaaatgacagtgaagcacctccggaacctgcagcgggcgcagatgacggctgcgctgagcacagacccaagtgtgctggggaagtaccgagccggcttcagcgagtgcatgaacgaggtgacccgcttcctgtccacgtgcgagggcgttaataccgaggtgcgcactcggctgctcggccacctggccaactgcatgacccagatcaatgccatgacctaccccgggcagccgcaccccgccttgcaggcgccgccaccgcccccaccgggacccggcggcccccagcacgcgccgttcgcgccgccgccgccactcgtgcccatccccgggggcgcggcgccccctcccggcggcgccccctgcaagctgggcagccaggctggagaggcggctaaggtgtttggaggcttccaggtggtaccggctcccgatggccagtttgctttcctcattcccaacggggccttcgcgcacagcggccctgtcatccccgtctacaccagcaacagcggcacctccgtgggccccaacgcagtgtcaccttccagcggcccctcgcttacggcggactccatgtggaggccgtggcggaactgagggggctcaggccacccctcctcctaaactccccaacccacctctcttccctccggactctaaacaggaacttgaatactgggagagaagaggacttttttgattaagtggttactttgtgtttttttaatttctaagaagttactttttgtagagagagctgtattaagtgactgaccatgcactatatttgtatatattttatatgttcatattggattgcgcctttgtattataaaagctcagatgacatttcgttttttacacgagatttcttttttatgtgatgccaaagatgtttgaaaatgctcttaaaatatcttcctttggggaagtttatttgagaaaatataataaaagaaaaaagtaaaggc

SEQ ID NO: 112692 - DNA, 862 bp, Homo sapiens
cccagagggagagtagcaaagggttaaaatccttttgattgacgttgtagcctccggtgccctgggctcaggcgcgcgccattggccgccagaccttgtgcctggcggccaatgggggggcgcggtccacgagcggtgccgcgtgtctcctcctcccattggctgaaagttactgtgggaaagaaagtttgggaagtttcacacgagccgttcgcgtgcagtcccagatatatatagaggccgccagggcctagggatcacacaggatccggagctggtgctgataacagcggaatcccccgtctacctctctccttggtcctggaacagcgctactgatcaccaagtagccacaaaatataataaaccctcagcacttgctcagtagttttgtgaaagtctcaagtaaaagagacacaaacaaaaaattctttttcgtgaagaactccaaaaataaaattctctagagataaaaaaaaaaaaaaaaaggaaaatgccagctgatataatggagaaaaattcctcgtccccggtggctgctaccccagccagtgtcaacacgacaccggataaaccaaagacagcatctgagcacagaaagtcatcaaagcctattatggagaaaagacgaagagcaagaataaatgaaagtctgagccagctgaaaacactgattttggatgctctgaagaaagatagctcgcggcattccaagctggagaaggcggacattctggaaatgacagtgaagcacctccggaacctgcagcgggcgcagatgacgggtgagggcggctcgccgcgtccccctgtgcgggcgtcccgctcgcctcgcggtgatttcttccagacttccgcccgt

SEQ ID NO: 112693 - DNA, 1264 bp, Homo sapiens
cccagagggagagtagcaaagggttaaaatccttttgattgacgttgtagcctccggtgccctgggctcaggcgcgcgccattggccgccagaccttgtgcctggcggccaatgggggggcgcggtccacgagcggtgccgcgtgtctcctcctcccattggctgaaagttactgtgggaaagaaagtttgggaagtttcacacgagccgttcgcgtgcagtcccagatatatatagaggccgccagggcctagggatcacacaggatccggagctggtgctgataacagcggaatcccccgtctacctctctccttggtcctggaacagcgctactgatcaccaagtagccacaaaatataataaaccctcagcacttgctcagtagttttgtgaaagtctcaagtaaaagagacacaaacaaaaaattctttttcgtgaagaactccaaaaataaaattctctagagataaaaaaaaaaaaaaaaaggaaaatgccagctgatataatggagaaaaattcctcgtccccggtggctgctaccccagccagtgtcaacacgacaccggataaaccaaagacagcatctgagcacagaaagtcatcaaagcctattatggagaaaagacgaagagcaagaataaatgaaagtctgagccagctgaaaacactgattttggatgctctgaagaaagataagctggagaaggcggacattctggaaatgacagtgaagcacctccggaacctgcagcgggcgcagatgacggctgcgctgagcacagacccaagtgtgctggggaagtaccgagccggcttcagcgagtgcatgaacgaggtgacccgcttcctgtccacgggaaatgctgctcgctcttttaattaaaaaacaaacactttctcagctactaagagtgaaaccccccgccctgcggggtctggcactcgctggtactgcgttctcccaggcgggagggcccggccttattcgctggggtccagagataatgcttgcgctccgtggccgggaggagggacccccagcactctgaagcagctgacacggggctcactttcctttcttgcctactctatgcagagctcgcggcattccaagctggagaaggcggacattctggaaatgacagtgaagcacctccggaacctgcagcgggcgcagatgacgggtgagggcggctcgccgcgtccccctgtgcgggcgtcccgctcgcctcgcggtgatttcttccagacttccgcccgt

SEQ ID NO: 112694 - DNA, 1778 bp, Homo sapiens
aggaaccggggggttgtcggtctataagcctcgcccgttccgctccctggggcttccccgagcgccgtcggtggtcatggctgccccagcctcccggcaggtccgacgcagagcccgggcagcgccgcggccccgctcggccgaggactggtggtgggaccggctggcgccgaggggctcggggtaccacctgctgcagtccgacagcatgctgctggtgctgtccgaacccggccccgcccggccccgcgcacagcggcgcgcttcccgccgcactccccggcagccgccccggggccccagcgccgcggccaagcccaaggccgggctcaggtccgaggcggcggccgcgcccgcacccgcaccggcacccacgcccacgcccgaggaagggcccgacgcgggctggggagaccgcattcccttggaaatcctggtgcagattttcgggttgttggtggcggcggacggccccatgcccttcctgggcagggctgcgcgcgtgtgccgccgctggcaggaggccgcttcccaacccgcgctctggcacaccgtgaccctgtcgtccccgctggtcggccggcctgccaagggcggggtcaaggcggagaagaagctccttgcttccctggagtggcttatgcccaatcggttttcacagctccagaggctgaccctcatccactggaagtctcagctggtaggtgagtgctgtcctcggctcactttcctcaagctctccggctgccacggtgtgactgctgacgctctggtcatgctagccaaagcctgctgccagctccatagcctggacctacagcactccatggtggagtccacagctgtggtgagcttcttggaggaggcagggtcccgaatgcgcaagttgtggctgacctacagctcccagacgacagccatcctgggcgcactgctgggcagctgctgcccccagctccaggtcctggaggtgagcaccggcatcaaccgtaatagcattccccttcagctgcctgtcgaggctctgcagaaaggctgccctcagctccaggtgctgcggctgttgaacctgatgtggctgcccaagcctccgggacgaggggtggctcccggaccaggcttccctagcctagaggagctctgcctggcgagctcaacctgcaactttgtgagcaacgaggtcctgggccgcctactccacggctctcccaacctgcgcttactggatcttcgtggctgtgcgcgcatcacgccggctggccttcaggatctgccatgtcgggagctggagcagcttcatctgggcctgtatggcacgtcagaccggctgactctagccaaggagggcagcccctttttgacccagaagtggtgccatacactgcgagaactggacttgagtggccaggggttcagtgagaaggacctggagcaggccctggctgccttcttaagcacccctgggggctcacacccagccctgtgctctcttaacctcaggggcacccgggtcacaccaagcactgtcagctctgtgatcagcagctgcccgggcctgctctacctcaacctggagtcctgccgctgccttccccggggtctgaagcgggcctaccggggcctggaggaagtccagtggtgtctggagcagctgctcaccagcccctcacccagctaggcagccacagacctgggacacctcagccagcttgcccaccctccacctttgcccaatttcagatatttgagcattttgttaaaataaaacatttttagga

SEQ ID NO: 112695 - DNA, 1796 bp, Homo sapiens
aggaaccggggggttgtcggtctataagcctcgcccgttccgctccctggggcttccccgagcgccgtcggtggtcatggctgccccagcctcccggcaggtccgacgcagagcccgggcagcgccgcggccccgctcggccgaggactggtggtgggaccggctggcgccgaggggctcggggtaccacctgctgcagtccgacagcatgctgctggtgctgtccgaacccggccccgcccggccccgcgcacagcggcgcgcttcccgccgcactccccggcagccgccccggggccccagcgccgcggccaagcccaaggccgggctcaggtccgaggcggcggccgcgcccgcacccgcaccggcacccacgcccacgcccgaggaagggcccgacgcgggctggggagaccgcattcccttggaaatcctggtgcagattttcgggttgttggtggcggcggacggccccatgcccttcctgggcagggctgcgcgcgtgtgccgccgctggcaggaggccgcttcccaacccgcgctctggcacaccgtgaccctgtcgtccccgctggtcggccggcctgccaagggcggggtcaaggcggagaagaagctccttgcttccctggagtggcttatgcccaatcggttttcacagctccagaggctgaccctcatccactggaagtctcaggtacaccccgtgttgaagctggtaggtgagtgctgtcctcggctcactttcctcaagctctccggctgccacggtgtgactgctgacgctctggtcatgctagccaaagcctgctgccagctccatagcctggacctacagcactccatggtggagtccacagctgtggtgagcttcttggaggaggcagggtcccgaatgcgcaagttgtggctgacctacagctcccagacgacagccatcctgggcgcactgctgggcagctgctgcccccagctccaggtcctggaggtgagcaccggcatcaaccgtaatagcattccccttcagctgcctgtcgaggctctgcagaaaggctgccctcagctccaggtgctgcggctgttgaacctgatgtggctgcccaagcctccgggacgaggggtggctcccggaccaggcttccctagcctagaggagctctgcctggcgagctcaacctgcaactttgtgagcaacgaggtcctgggccgcctactccacggctctcccaacctgcgcttactggatcttcgtggctgtgcgcgcatcacgccggctggccttcaggatctgccatgtcgggagctggagcagcttcatctgggcctgtatggcacgtcagaccggctgactctagccaaggagggcagcccctttttgacccagaagtggtgccatacactgcgagaactggacttgagtggccaggggttcagtgagaaggacctggagcaggccctggctgccttcttaagcacccctgggggctcacacccagccctgtgctctcttaacctcaggggcacccgggtcacaccaagcactgtcagctctgtgatcagcagctgcccgggcctgctctacctcaacctggagtcctgccgctgccttccccggggtctgaagcgggcctaccggggcctggaggaagtccagtggtgtctggagcagctgctcaccagcccctcacccagctaggcagccacagacctgggacacctcagccagcttgcccaccctccacctttgcccaatttcagatatttgagcattttgttaaaataaaacatttttagga

SEQ ID NO: 112696 - DNA, 2239 bp, Homo sapiens
aggaaccggggggttgtcggtctataagcctcgcccgttccgctccctggggcttccccgagcgccgtcggtggtcatggctgccccagcctcccggcaggtccgacgcagagcccgggcagcgccgcggccccgctcggccgaggactggtggtgggaccggctggcgccgaggggctcggggtaccacctgctgcagtccgacagcatgctgctggtgctgtccgaacccggccccgcccggccccgcgcacagcggcgcgcttcccgccgcactccccggcagccgccccggggccccagcgccgcggccaagcccaaggccgggctcaggtccgaggcggcggccgcgcccgcacccgcaccggcacccacgcccacgcccgaggaagggcccgacgcgggctggggagaccgcattcccttggaaatcctggtgcagattttcgggttgttggtggcggcggacggccccatgcccttcctgggcagggctgcgcgcgtgtgccgccgctggcaggaggccgcttcccaacccgcgctctggcacaccgtgaccctgtcgtccccgctggtcggccggcctgccaagggcggggtcaaggcggagaagaagctccttgcttccctggagtggcttatgcccaatcggtgaggggttccctctcttccttacccctggctccaggctccttccgtctccctgcaccaaggtgttgggtgggaaggactcgtgtgggaacattagtgcagctctgcctccgctgtcggcccaggttttcacagctccagaggctgaccctcatccactggaagtctcaggtacaccccgtgttgaaggtgagagctccaggctgtcctgcacatcagctgtgacactctgggactgttcagtactctaggaagtgggtcaggcaccttgggggcccaacgctgctccgtggggatgtctgcttgcctgcctggttctcttttcctgctgtttcctccagcagggaggtatcagaggcggggacacccaagtaggcctggcatgggcagaaaggaggtcacagctaaggcggtagagtggggttggcaccagccactttgtctgtttcccttgtggatcttagcctgtcgtctcccaaccccagctgcccctctgtctccccgcagctggtaggtgagtgctgtcctcggctcactttcctcaagctctccggctgccacggtgtgactgctgacgctctggtcatgctagccaaagcctgctgccagctccatagcctggacctacagcactccatggtggagtccacagctgtggtgagcttcttggaggaggcagggtcccgaatgcgcaagttgtggctgacctacagctcccagacgacagccatcctgggcgcactgctgggcagctgctgcccccagctccaggtcctggaggtgagcaccggcatcaaccgtaatagcattccccttcagctgcctgtcgaggctctgcagaaaggctgccctcagctccaggtgctgcggctgttgaacctgatgtggctgcccaagcctccgggacgaggggtggctcccggaccaggcttccctagcctagaggagctctgcctggcgagctcaacctgcaactttgtgagcaacgaggtcctgggccgcctactccacggctctcccaacctgcgcttactggatcttcgtggctgtgcgcgcatcacgccggctggccttcaggatctgccatgtcgggagctggagcagcttcatctgggcctgtatggcacgtcagaccggctgactctagccaaggagggcagcccctttttgacccagaagtggtgccatacactgcgagaactggacttgagtggccaggggttcagtgagaaggacctggagcaggccctggctgccttcttaagcacccctgggggctcacacccagccctgtgctctcttaacctcaggggcacccgggtcacaccaagcactgtcagctctgtgatcagcagctgcccgggcctgctctacctcaacctggagtcctgccgctgccttccccggggtctgaagcgggcctaccggggcctggaggaagtccagtggtgtctggagcagctgctcaccagcccctcacccagctaggcagccacagacctgggacacctcagccagcttgcccaccctccacctttgcccaatttcagatatttgagcattttgttaaaataaaacatttttagga

SEQ ID NO: 112697 - DNA, 2085 bp, Homo sapiens
aggaaccggggggttgtcggtctataagcctcgcccgttccgctccctggggcttccccgagcgccgtcggtggtcatggctgccccagcctcccggcaggtccgacgcagagcccgggcagcgccgcggccccgctcggccgaggactggtggtgggaccggctggcgccgaggggctcggggtaccacctgctgcagtccgacagcatgctgctggtgctgtccgaacccggccccgcccggccccgcgcacagcggcgcgcttcccgccgcactccccggcagccgccccggggccccagcgccgcggccaagcccaaggccgggctcaggtccgaggcggcggccgcgcccgcacccgcaccggcacccacgcccacgcccgaggaagggcccgacgcgggctggggagaccgcattcccttggaaatcctggtgcagattttcgggttgttggtggcggcggacggccccatgcccttcctgggcagggctgcgcgcgtgtgccgccgctggcaggaggccgcttcccaacccgcgctctggcacaccgtgaccctgtcgtccccgctggtcggccggcctgccaagggcggggtcaaggcggagaagaagctccttgcttccctggagtggcttatgcccaatcggttttcacagctccagaggctgaccctcatccactggaagtctcaggtacaccccgtgttgaagctggtaggtgagtgctgtcctcggctcactttcctcaagctctccggctgccacggtgtgactgctgacgctctggtcatgctagccaaagcctgctgccagctccatagcctggacctacagcactccatggtggagtccacagctgtggtgagcttcttggaggaggcagggtcccgaatgcgcaagttgtggctgacctacagctcccagacgacagccatcctgggcgcactgctgggcagctgctgcccccagctccaggtcctggaggtgagcaccggcatcaaccgtaatagcattccccttcagctgcctgtcgaggctctgcagaaaggctgccctcagctccaggtgctgcggctgttgaacctgatgtggctgcccaagcctccgggacgaggggtggctcccggaccaggcttccctagcctagaggagctctgcctggcgagctcaacctgcaactttgtgagcaacgaggtcctgggccgcctactccacggctctcccaacctgcgcttactggatcttcgtggctgtgcgcgcatcacgccggctggccttcaggatctgccatgtcgggagctggagcagcttcatctgggcctgtatggcacgtcagaccggctgactctagccaaggagggcagcccctttttgacccagaagtggtgccatacactgcgagaactggacttgagtggccaggggttcagtgagaaggacctggagcaggccctggctgccttcttaagcacccctgggggctcacacccagccctgtgctctcttaacctcaggggcacccgggtcacaccaagcactgtcaggtcagcatcccctaccccagtccctggagccagtgtggctgtcactgtgtctgcctggggcctggaagttgtgtcctgcctggcctgagacctccaggggtcagaggggcatgcatactgtccaagcccctgcgtggggtgggcctgaggacaccaggggaactgggcttggccttggtggctatgggtggcagagccaggtgtcgaacaccagcaggcacagctccctagcctggcccagcccttctgaggcaacagctcaacttcctgtggtctgccctccccacagctctgtgatcagcagctgcccgggcctgctctacctcaacctggagtcctgccgctgccttccccggggtctgaagcgggcctaccggggcctggaggaagtccagtggtgtctggagcagctgctcaccagcccctcacccagctaggcagccacagacctgggacacctcagccagcttgcccaccctccacctttgcccaatttcagatatttgagcattttgttaaaataaaacatttttagga

SEQ ID NO: 112698 - DNA, 2484 bp, Homo sapiens
aggaaccggggggttgtcggtctataagcctcgcccgttccgctccctggggcttccccgagcgccgtcggtggtcatggctgccccagcctcccggcaggtccgacgcagagcccgggcagcgccgcggccccgctcggccgaggactggtggtgggaccggctggcgccgaggggctcggggtaccacctgctgcagtccgacagcatgctgctggtgctgtccgaacccggccccgcccggccccgcgcacagcggcgcgcttcccgccgcactccccggcagccgccccggggccccagcgccgcggccaagcccaaggccgggctcaggtccgaggcggcggccgcgcccgcacccgcaccggcacccacgcccacgcccgaggaagggcccgacgcgggctggggagaccgcattcccttggaaatcctggtgcagattttcgggttgttggtggcggcggacggccccatgcccttcctgggcaggtaacgctggtgccgggcccgccgccgagcgtagcggcttgggccagacgtggtccgagcggtggcccgggcgggggcggagggcgaaagcatcggagcgcgcaccgctcagtccgagagcgcagccccttaggcgcccagttggagtcccaggagcccggctttgagccggggtgtctactgcgctgcgagaggggggcatcgcctacggaggggccggcaccctcagcacgctgtcctcccagggctgcgcgcgtgtgccgccgctggcaggaggccgcttcccaacccgcgctctggcacaccgtgaccctgtcgtccccgctggtcggccggcctgccaagggcggggtcaaggcggagaagaagctccttgcttccctggagtggcttatgcccaatcggtgaggggttccctctcttccttacccctggctccaggctccttccgtctccctgcaccaaggtgttgggtgggaaggactcgtgtgggaacattagtgcagctctgcctccgctgtcggcccaggttttcacagctccagaggctgaccctcatccactggaagtctcaggtacaccccgtgttgaaggtgagagctccaggctgtcctgcacatcagctgtgacactctgggactgttcagtactctaggaagtgggtcaggcaccttgggggcccaacgctgctccgtggggatgtctgcttgcctgcctggttctcttttcctgctgtttcctccagcagggaggtatcagaggcggggacacccaagtaggcctggcatgggcagaaaggaggtcacagctaaggcggtagagtggggttggcaccagccactttgtctgtttcccttgtggatcttagcctgtcgtctcccaaccccagctgcccctctgtctccccgcagctggtaggtgagtgctgtcctcggctcactttcctcaagctctccggctgccacggtgtgactgctgacgctctggtcatgctagccaaagcctgctgccagctccatagcctggacctacagcactccatggtggagtccacagctgtggtgagcttcttggaggaggcagggtcccgaatgcgcaagttgtggctgacctacagctcccagacgacagccatcctgggcgcactgctgggcagctgctgcccccagctccaggtcctggaggtgagcaccggcatcaaccgtaatagcattccccttcagctgcctgtcgaggctctgcagaaaggctgccctcagctccaggtgctgcggctgttgaacctgatgtggctgcccaagcctccgggacgaggggtggctcccggaccaggcttccctagcctagaggagctctgcctggcgagctcaacctgcaactttgtgagcaacgaggtcctgggccgcctactccacggctctcccaacctgcgcttactggatcttcgtggctgtgcgcgcatcacgccggctggccttcaggatctgccatgtcgggagctggagcagcttcatctgggcctgtatggcacgtcagaccggctgactctagccaaggagggcagcccctttttgacccagaagtggtgccatacactgcgagaactggacttgagtggccaggggttcagtgagaaggacctggagcaggccctggctgccttcttaagcacccctgggggctcacacccagccctgtgctctcttaacctcaggggcacccgggtcacaccaagcactgtcagctctgtgatcagcagctgcccgggcctgctctacctcaacctggagtcctgccgctgccttccccggggtctgaagcgggcctaccggggcctggaggaagtccagtggtgtctggagcagctgctcaccagcccctcacccagctaggcagccacagacctgggacacctcagccagcttgcccaccctccacctttgcccaatttcagatatttgagcattttgttaaaataaaacatttttagga

SEQ ID NO: 112699 - DNA, 1549 bp, Homo sapiens
aggaaccggggggttgtcggtctataagcctcgcccgttccgctccctggggcttccccgagcgccgtcggtggtcatggctgccccagcctcccggcaggtccgacgcagagcccgggcagcgccgcggccccgctcggccgaggactggtggtgggaccggctggcgccgaggggctcggggtaccacctgctgcagtccgacagcatgctgctggtgctgtccgaacccggccccgcccggccccgcgcacagcggcgcgcttcccgccgcactccccggcagccgccccggggccccagcgccgcggccaagcccaaggccgggctcaggtccgaggcggcggccgcgcccgcacccgcaccggcacccacgcccacgcccgaggaagggcccgacgcgggctggggagaccgcattcccttggaaatcctggtgcagattttcgggttgttggtggcggcggacggccccatgcccttcctgggcagggctgcgcgcgtgtgccgccgctggcaggaggccgcttcccaacccgcgctctggcacaccgtgaccctgtcgtccccgctggtcggccggcctgccaagggcggggtcaaggcggagaagaagctccttgcttccctggagtggcttatgcccaatcggttttcacagctccagaggctgaccctcatccactggaagtctcaggtacaccccgtgttgaagctggtaggtgagtgctgtcctcggctcactttcctcaagctctccggctgccacggtgtgactgctgacgctctggtcatgctagccaaagcctgctgccagctccatagcctggacctacagcactccatggtggagtccacagctgtggtgagcttcttggaggaggcagggtcccgaatgcgcaagttgtggctgacctacagctcccagacgacagccatcctgggcgcactgctgggcagctgctgcccccagctccaggtcctggaggtgagcaccggcatcaaccgtaatagcattccccttcagctgcctgtcgaggctctgcagaaaggctgccctcagctccaggtgctgcggctgttgaacctgatgtggctgcccaagcctccgggacgaggggtggctcccggaccaggcttccctagcctagaggagctctgcctggcgagctcaacctgcaactttgtgagcaacgaggtcctgggccgcctactccacggctctcccaacctgcgcttactggatcttcgtggctgtgcgcgcatcacgccggctggccttcaggatctgccatgtcgggctctgtgatcagcagctgcccgggcctgctctacctcaacctggagtcctgccgctgccttccccggggtctgaagcgggcctaccggggcctggaggaagtccagtggtgtctggagcagctgctcaccagcccctcacccagctaggcagccacagacctgggacacctcagccagcttgcccaccctccacctttgcccaatttcagatatttgagcattttgttaaaataaaacatttttagga

SEQ ID NO: 112700 - DNA, 1790 bp, Homo sapiens
aggaaccggggggttgtcggtctataagcctcgcccgttccgctccctggggcttccccgagcgccgtcggtggtcatggctgccccagcctcccggcaggtccgacgcagagcccgggcagcgccgcggccccgctcggccgaggactggtggtgggaccggctggcgccgaggggctcggggtaccacctgctgcagtccgacagcatgctgctggtgctgtccgaacccggccccgcccggccccgcgcacagcggcgcgcttcccgccgcactccccggcagccgccccggggccccagcgccgcggccaagcccaaggccgggctcaggtccgaggcggcggccgcgcccgcacccgcaccggcacccacgcccacgcccgaggaagggcccgacgcgggctggggagaccgcattcccttggaaatcctggtgcagattttcgggttgttggtggcggcggacggccccatgcccttcctgggcaggtaacgctggtgccgggcccgccgccgagcgtagcggcttgggccagacgtggtccgagcggtggcccgggcgggggcggagggcgaaagcatcggagcgcgcaccgctcagtccgagagcgcagccccttaggcgcccagttggagtcccaggagcccggctttgagccggggtgtctactgcgctgcgagaggggggcatcgcctacggaggggccggcaccctcagcacgctgtcctcccagggctgcgcgcgtgtgccgccgctggcaggaggccgcttcccaacccgcgctctggcacaccgtgaccctgtcgtccccgctggtcggccggcctgccaagggcggggtcaaggcggagaagaagctccttgcttccctggagtggcttatgcccaatcggtgaggggttccctctcttccttacccctggctccaggctccttccgtctccctgcaccaaggtgttgggtgggaaggactcgtgtgggaacattagtgcagctctgcctccgctgtcggcccaggttttcacagctccagaggctgaccctcatccactggaagtctcaggtacaccccgtgttgaaggtgagagctccaggctgtcctgcacatcagctgtgacactctgggactgttcagtactctaggaagtgggtcaggcaccttgggggcccaacgctgctccgtggggatgtctgcttgcctgcctggttctcttttcctgctgtttcctccagcagggaggtatcagaggcggggacacccaagtaggcctggcatgggcagaaaggaggtcacagctaaggcggtagagtggggttggcaccagccactttgtctgtttcccttgtggatcttagcctgtcgtctcccaaccccagctgcccctctgtctccccgcagctggtaggtgagtgctgtcctcggctcactttcctcaagctctccggctgccacggtgtgactgctgacgctctggtcatgctagccaaagcctgctgccagctccatagcctggacctacagcactccatggtggagtccacagctgtggtgagcttcttggaggaggcagggtcccgaatgcgcaagttgtggctgacctacagctcccagacgacagccatcctgggcgcactgctgggcagctgctgcccccagctccaggtcctggaggtgagcaccggcatcaaccgtaatagcattccccttcagctgcctgtcgaggctctgcagaaaggctgccctcagctccaggtacctggcgccctgcctctcccacctgtcaca

SEQ ID NO: 112701 - DNA, 577 bp, Homo sapiens
taccttctaacatttacatgtgtgttaagttactgaatgggtatgattatgtctccttttaaaagtatactggaggcaaaactttttttggcaagttaacttagatggagagagacctttaggagattttctcttttcctctgaggttattattggtggctgaattggaggttttagcactgtgttgtgttaaagatggctacactgttagggctttggatagttagactacccagaagcaaggaaagtgttgaggtgtggcctttcccatttaggccaggggactctgaatataatcaggaaacaccgcctgcctagtttggagtagattgcacttggtgttggaggaagggacttagaactaaaaaggatccattacctctaaagaaagacctgttagaataaaaactctccctcaagagaaacataactgtttctaaagatcaaaatcatttcggaaacttcgattattatcagtgcttcaacaatcaattcttcaactatatatagttcttaagtttcaattttgttaccaatccttcagtgtctgatctctccctaatacttcataggggcc

SEQ ID NO: 112702 - DNA, 579 bp, Homo sapiens
cgctgtttgtcaaattcattcatctgacccagatttagtcagcacctaccaggcactgttctaggagtgggggtacagtattgaacaaggtagacgagcttcctgcttttgtggagcccatgttccacagaataaacaagtagacatataaatacatgattttagacagttgtataatcagtgaagaaaatagagcaaagtaaatgacatgagaagaactgtaggtaccagaaggaagatctgaaggtgatttttgattgggtggcaggaaaggcctccctgaggaggtgacatttgtttcataggaaggagccagccattgtagtggctgagaaaagagctatccaatgtggaaacgaagcagctttggtacaagcccagcacgcaggcttttgtggctggagaagagtgaacaggagggaatgtcgggtcctggagttagtggataggcagggcgccatcgggttaggtttacgtgatcagaactgtcatgggagggttttcagcagggaaaccacaaaagctgctatgtagacggaccaaaacagaagggggcagccaggaacagacccaaggggg

SEQ ID NO: 112703 - DNA, 727 bp, Homo sapiens
attgtgtttgagacattgtacattttggttcttttcaccctcttcagcttcccaaagtgctgggattacaggcaagagcctgtagaagagtcatttgcctacttcattacattacctaggattagttagattcacttccctgctggggaaagcacttcatccaaaaacatttctgtgattttcttctcttttattgatagttgctaagtctgtctctgtagcacacatctcccatcaatatttctatttagttcgtttcaaactcaagtaccctgaaatattttaagtttaacatcccactccagtgcccaccagccttgtcctaataaaattaagttggtatcattaaacaaaacaaaaaaaaaaaaaaaaaaacaaaaaaaaaaaaaaaaaaaacaaaaaaaaaaaaaaaaaaaaaaaaaaacaaacaaaacaaaaaaaagacacaaaaaacaacaagaaagaagaaaaaaaaaacagtggggggggggggcgcgccgcgagagaggagacacgacacacggggggggggggggcaccaacgagaggggcgcagacgcccgccccacgctcactacaaagagacagtggttaagagcagaggagggagagactaccaacaaaaaaaaaaccgccggcggaacaacatgactggctcaaaaccccacggagtagtggagggcaacacggaggacataaaagaggcaccagcgcgcgaaaaaaagcg

SEQ ID NO: 112704 - DNA, 350 bp, Homo sapiens
attgtgtttgagacattgtacattttggttcttttcaccctcttcagcttcccaaagtgctgggattacaggcaagagcctgtagaagagtcatttgcctacttcattacattacctaggattagttagattcacttccctgctggggaaagcacttcatccaaaaacatttctgtgattttcttctcttttattgatagttgctaagtctgtctctgtagcacacatctcccatcaatatttctatttagttcgtttcaaactcaagtaccctgaaatattttaagtttaacatcccactcctatctttaattgtaccatatttcaagttgtcattaagaacccccaaa

SEQ ID NO: 112705 - DNA, 453 bp, Homo sapiens
actccagctgagtcgaccctgtctcaaaaaaacaagaagactgaggaagtcgtggagttgggggcaaagttgctgtaaaccaaaggatgagaaacagacaggctgctgggctaactggagaaagaaaatggctcaggtgaccacacaaatcgattcactcattctcccattggtcatcagtcacctcccacagcatcaccgtggaccctgctgacagccagaaccactccagctctaaaactctaactcccacacctcgccagctgcccacagcctctcctcttcccactcaccaactgcatgaatccctccgcttgtgctctctgacgacacaggcccctccagccactggccctctactttcttccagcccatcaccctcttcttcctcatgtccttccttatcacagctcagcgtggaggtgcagtgtctcagtaacggtcttttcaatg

SEQ ID NO: 112706 - DNA, 744 bp, Homo sapiens
ggtttaaaactagccacagattggtcatttttttaactttccactttaaagttagataaaatgtttaaatatgtttaacaaaggggacactacccaggagcctccagtgtttgcacagttgcaaatctgtctttattcttgacatagtaaaaataagtttaagcggattccttccaggaacatatttcaacatgtaagtcctaaaactgtataccattggttaatttttcttattgtagataaagaaaaatcgtaggttgtggtaacttggcatttttcataagaatatgtgcctaattcagagcacttgtgtaactacaggtgatttctttcttctactccaaaaactagtcttcgtaactatgaatgtttatagaaggtactcagtcttctgccaaggttggggaagggatgaatcagggcaggggctgcagagaaattgctgagaggcatattgagtttgtagaggggaagggaagggtttttcaggccgaggcattgaggctgagagaacagtggttctggggaagtgtaagtagattggtagtagcttaagaaactatgaaataattacaagaaataaagccaaaatggtagcccaggggtctttatgagtagtctcattctaagttaggatatttggaccttgagtcacatggcttcgagccattgaaaggtttacatgatgaagttaagattgacagatattcaaaggggagagtacaggtaaaggcagataggggg

SEQ ID NO: 112707 - DNA, 470 bp, Homo sapiens
atatttttgattaataactttaagatttgtaaaatattttgctaataaaccatgaaagatacagactattaactttagagtcttgtttttgtgctttctaaacaaatttatcagaacttaatacatccaaatcactgcaaagtagtcatatcaaaaaggtgatattcatggccaggcacagtggcgcatgcctgctatcccagcactttaggaggctgaggcaggcagatggcttgagcccaggagtttgagaccagcctgggcaacatggcacagccccgtctctctacagaaagtacaaaaatgaacgggcatggtggcacccacctgtagtcccagctactcaggaggctgagatgggagaatctcttgagtgtgggaggtggaggttgcagtgagccaagtttgcgccactgcactccagcctgggcaacagagccagaccctgtctttaaaaaaaaaaaaaaaaa

SEQ ID NO: 112708 - DNA, 360 bp, Homo sapiens
ccagggcagctgggctctggagctgggggtagagggagaggtgtgtgggacctgctttgccactcttctctcacccaatagaagatgaaaggacaacccctcactaccctgcccttcgactcccgtgcgagttcccactctttgtagtgggcagggaaaacatttatctgtgctcacaaatctcaatcaggggggcagccaggcgcagcggccctccttgggaataccttcccctttgaaaggtttatcaatccatctgccgcttggtcagccccagacaggaccatgattaattattcctgtctttcccaagttgactttgatggttgcttgttgaaacaagtcgtctgaattcaggaa

SEQ ID NO: 112709 - DNA, 1016 bp, Homo sapiens
taataattctaagcatgttgcttccagagtctgccatttcttccatttttggtatttttctaacagtggttttgtgctctcacctgtgaggattaagagcctgggataaaactcattttcagtctaaagatttaaactcatttgaattgagtagatgcttttgtgatgtctgcatctctcctgacttaatagttcccttcttcacattacttaatctgtccttttggttagaagatcatgctcttacctaaagatagaaggaagcaaaatgaacatggaactacattgccctgccttttctcctgtcaaatatggcatcaggctgagcagtggcttttcctgatattccccttattcaaaacatagctttgtcttgctttcagcatttttcactttcctcagatcattatggattctgactttaatccgtaagaattatacttttatatacaagtaggttatatacctctacccatcttttctaagctttctttgcaaatctagtcccatcagattctccctgtgtaacaaccaacttctttagatttcctctaattttcttttctttatagatttatttattattgcatagtcaaaatgtcatgttttagcatcttctgtggcctgtgaatcactgctctctataaccatgggaccactcccacccatccttttcccgatctttttttggatagttgttttcttaaaaaatctggaagcaggctgggtgcggtggctcacgcctgtaatcccagcactttgggaggctgaggctggtggatcacgaggtcaggcattcaagaccagcctgaccaacatggtaaaaccctgtctctactaaaaatacaaaaattagccgggtgtgatggtgtgtgcctgtaatcccagctatttgggaaactgagataggagaatcgcttgaacttgggaggcagaggttgcagtgagccgaggtcgcaccattgccctccaggctgaagcgacgcagcgagactccgtctccaaaaaaaaaaaaa

SEQ ID NO: 112710 - DNA, 739 bp, Homo sapiens
gagtcaattatctgttcaggcagtgggcagtgagggagtggggagaggtggaaggatttgtttctctttttttttttaattcctaaacatttccaccagagacataaaattatccaaaacaaataaatgcattattttgccctccatgttgctggttgctagggcacccatgcctaatttaaaatatatacatcttttgaatgtagcattttaagttttcagatttatgcaaggtatggagaggaagggagactgttagcatgttttaaaacaaggttaactccatatggagccctgccttctcaagcaatgaattttccaggattaattataaccgaagcaagatttagtcatggactaaaagtagctgcattatcatagaattcttaagtgttattcatataagttttgtatataggatgaacaaattataggtttctaactagaactgcaatgtcattccagaaactatgcaagggtattaaaatgcttattttacagttgttcctggcatttctataattaactaatgatttagtacatctggtgatttggaccaggaatgtgagcaaatcagaatatattaactagtagaggaggtagaatgtttcctattttgtagtgttaagaaagtagacagttaactgactcttaccctgaagaaaatgacaaagggtcagccaggtgcccttccttatcagagatcgtaagtttctatagtccttttgtatggaagtga

SEQ ID NO: 112711 - DNA, 173 bp, Homo sapiens
gactgttaatattccatttaagttttattttataggtagttctattgtctgtatgttttactttagaagcttgagtgtaaatttcttgttacattgttgatactggggatggaaatacaaaaaatacagaatttcatttgataacctgtattttgaatttggagacaagccca

SEQ ID NO: 112712 - DNA, 664 bp, Homo sapiens
ggtcccatgacaatagcattcactaaaaacttagctggtttttatctattgatttctgtggctccatacgccagtagctgcaccctaattattttgagacataaatatcttaaacccattctaattttgtggaagaatcacacctttattctcatttagttaagctactatgtctaacctaaatgatttattgagtgctaccttattcaaaggttttaacttcaaaggtatcagggctaagatattgtgatcttgttccaaggcttatttttttaacttctcttttgaaaaatttcaaatatacacaaaagtagtaagaatggtgtaattcccatatattcttttccttttcaccaattaataatatttttccacatttacattctctccctccttttagatttttctctttctttctggctttctttagacacacacacacacacacacacacacacacattgattgttgctgaaccattcaacagtaagttatcgtgattatattaaatcctaaatatttcagcatgtgatgaggacatgcttttatataaccacattatcataatcaaattcaaataatttaacattgatataacattcttatctaacatataggccatattaaaatgtattcaattaacccaatagtgctatttattttc

SEQ ID NO: 112713 - DNA, 184 bp, Homo sapiens
aaggtggccttctgcaacccaaggagagaggcctcaggagaaaccaaacctgctgacaccttgatcttggacttctaggtcctgaactgtgaggaaataaatctctgctgtttaagtagaacagtttgagttactttgttacagcagacccagcaaacttatccacacatcatgagtttgtggg

SEQ ID NO: 112714 - DNA, 487 bp, Homo sapiens
acatcttgaattttattatcttgatgatgtgtttatggcagttcattatgccactgtttctactattgtatatgtctgattttttccacaaaatgagttctaagatcatacattgtttaggtgtggcttaactcatttattaatcatgattgagtgaactttaactctaatattgagagaatttttaaagtattacaatttgtagtcagacactgtggctcatgcctgtaattccagcattttgagaggccaaggtggaggattgcttgagcccaggcattggagaccagcctgggtaacatggccaaactctgtccctacaaaaaatacagaaattagcaaggtgtggtggcatgcaccgtagtcccagctacttgagaggctgaggtgggaggatagctgagcccagaagatcaaggctgcagtgaaccatgatcgtgatcatgccaccgcactccattctgggtgacaggccaagaccctgtct

SEQ ID NO: 112715 - DNA, 628 bp, Homo sapiens
  misc_feature (545)..(545): n is a, c, g, or t
cttagcaacatagagggtgcaggggatcttagctagaactgttttattggactaatgggagtagcaacatgactgtagtagtagaggcaagattcaaagttgaagaggacaatatgaatgtaaatggaacggggaaggatggttactgaaaggctgctgtgtgttactgcatactcacttgctctcttcctctctctctcaagataggagaggagagagactaagaatatctttcagtgttgatgggagggatccagtagagactgagaggctgaagacacaagggaaaaggggatactcaatgacaaaatatttttctgagaagctggggtaggtgggtgaaggattagcttttgataagggaagaagacttccctgctcagttgtcaggaaggaaggagttaagtagggggtggtgagtacagaataggttcgtttgtagttttcatgatgggaggttgggggcattgcctaggggtggattccattttcttagggaggtctaggatagttgagaggttaatgtgcatgtatgataggctcantctgctctgctgagtcatgttctctaataaggcttagctgccagatccacattccaagaagcctagtggccaggctcactcaa

SEQ ID NO: 112716 - DNA, 399 bp, Homo sapiens
  misc_feature (121)..(121): n is a, c, g, or t
  misc_feature (147)..(148): n is a, c, g, or t
  misc_feature (193)..(193): n is a, c, g, or t
aatcaccacagatagccactgagaccctctctcaacttcatctgcatgtgtgagaggccagtttgaggtgtgagagtacttctccaatttggacttgcctttgtcatgtttcctgcctatntgagagagaccctgtgaaacccaggnngaagggaggcagtaaggttaatggcccagccatcttttgctgacncccatctctggggtctcaggtatgattctatcacccaaagacacctaaacaaatcaccagactacattccaatccccatgggacctgattattgcacacagcttctttcagcaatgagtcagaagagcagtttttcagaaccaactcacagtctgaaaaagcaacctcctttttcatatatacacttaacatcaaaaaaaaaaagc

SEQ ID NO: 112717 - DNA, 204 bp, Homo sapiens
cacttagggcctcgaactcctcacctgtgaatgagggacctgaccatggtcatccctgaagtcccagcatttaactcgtaacatgacaaaaagcaaaccagggctgggcacagaggctcacacctgtaatcccagcactttcagaggccgaggtgggtggatagcttgagatcaggagttcgagaccagcttggccaatatgat

SEQ ID NO: 112718 - DNA, 177 bp, Homo sapiens
ggactgggaaattaaaacatgattaagatactctttccatgcacaaaattgacagaaattgaaaagattgttaatattcagggttaggaatgtgaactggtagtgattctgaaagacaatttggcagtttaatatgtgccaacatttaattttaactttttttggtttgttttgttt

SEQ ID NO: 112719 - DNA, 355 bp, Homo sapiens
acttatccatcgtagggtgtgtttgtgttcttttgtctttgttatagatggagcctcattctgttgccctcgatcgtaatatacccggtattaaatttagtaagagaaaattgcactaacagctgaattttaggcttaactttgtgacactctctttcttgtatggaattgatcagctcaaactgagagctcatgactgggaaaatgacacagtctgttcttgcctcgttctaaattttaatggtaccaggcccactctgacactaattttacagtcactgtgccctctgattgtctagcaagaaccagcattcttcctttgcttccctgtgagcaaggcagctgtaggaccaag

SEQ ID NO: 112720 - DNA, 427 bp, Homo sapiens
attcaggttagagttcagtggaatgatcatagctcactgcacccataaactcgtggtcttaagcaatcctcctacctcagtctcccacatagctgggacattagccaccaagcctggctaatttaaaaaaaattcttagtagaggccgggtgcagtggctcacacctgtaatcccagcactttgggaggccgaggcaggcggatcatgaggtcaggagatcgcgaccatcctggctaacacggtgaaaccccgtctctactaaaatacaaaaaaaaaattaaccgggcttggtggtgggcacctgtagtcccagctactggggaggctgaggcaggagaatggcgtgaacccgggaggcggagcttgcagtgagccgagatcgcaccactgcactccagcctgggtggcagaacgagactccatctc

SEQ ID NO: 112721 - DNA, 393 bp, Homo sapiens
ctcttcctgtcaccgacgcttcgtcagtgtccacaggtcacgccacctctcttcctgtcaccgacgcttcctcagtgttcacaggtcacgccacctcgcttcctgtcaccatcccttcctcagcatcctcaggtcacaccacccctcttcctgtcaccgacgcttcctcagtgtccacaggtcacgccacctctcttcctgtcaccgacgcttcctcagtgtccacaggtcacgccacccctcttcctgtcaccgacgcttcctcagtgtccacaggtcacgctacccctcttcctgtcaccgacacttcctcagtatccacaggtcacgccacccctcttcctctcaccagcctttcctcagtatccacaggtgacaccacgcctcttcctg

SEQ ID NO: 112722 - DNA, 532 bp, Homo sapiens
taaaagttccaggacccttcctacatcccgagacattctaattctctgccgtttgtgtagcaattctttgaactgttgaaagatctcctgacaaattgttactgatattgtgttaagcaataatcttaaccttcccagtaaatgaactggaatgcccaattttaagtttctctatttatgaagaaacaaaatacaggggtcatagtcaggatactgcctatggtacattttaaaatttctgggtctactaggatataatctttcttaacctcttttgagatttgatgtcagttcaagggaagcattccattgatgtcaggaaggcagctatttgttgactgaaattctggtactctggcataagctcgttctaaaaatccacaaatatgttgttaatagaatgggaccatacttttcacttgggggcctacccgctagaggtgagatgtcatccttgagatgtttggaagactttgtgagatttttttttcttttgcaaactagacgtgcgccagcttctctgacctaaatg

SEQ ID NO: 112723 - DNA, 386 bp, Homo sapiens
catatataactttccaccttaacagaaagcaataaaggacccctggttttaagcccacaaggtctgaattttctttcctcttagaatcatagcatcttagatctggaagaaactttgatagtaagttgcttcaatttctgtactgttaaaaagaaactgagatattggcagactaatgccctcccacaatagagactagcatgttttacataactcaatagcacctcttttgaatgttttaagaaaggacatgggtttgtttcatggaacagaatgctatttgatcttttggtaattgcatgttatctaaaactgaaattgcctaatttcattatttcaataagcatttcttgagcaccaactgtgcagtggcaagtgctagggta

SEQ ID NO: 112724 - DNA, 232 bp, Homo sapiens
ccgcgcccggcctgtctataaatattttaaaaagcaaaaaaaaatcttagcttgataaccatatgagaataggcaatgactgcctttgtgttgcgtgctgttatcgcccctgttctaaccattgttccttttttcctgttgtctctgggaaccatgccatcccctttctatggttcctaaaggccagtatttatgtaatggataacagtcatattctcaaccttttcaaatg

SEQ ID NO: 112725 - DNA, 337 bp, Homo sapiens
atagagacataacctaccagtatccaggtttctgcaggggcctggaaggcatatacagtggctgcataaaccagatcaggggatcgaaggacaagcttagtccactggtccagagggaatcagtacagcttagtcttctcaaaaccccctttgctcagtttcttttttttttttgatatactattttatttaactttcaaaaagattttattaaagtaacaggatttgagagtcataacttcacacaatttgtgcgtatgagtattacaatttgtaatcaagtatatctgactccaaatcctatgtattttccactacatcttaatgccacaatgtt

SEQ ID NO: 112726 - DNA, 338 bp, Homo sapiens
cttacgtgttactacactccccattttagagatgaggaaactgtgacacacaaggctgttcatggtcaaggtcaggatggtgaggccaggtgtgggcttcaaggcccatgctcttcagcccacccatcactgccccataatagatgccttaaatataatgcatctgggtgcttggcaagggtaacatcatcactgtcagccacataaaggtcagccaaataaaataagaaaagccagtgacaaaataagaaaatctattgtttcttgagcacctaacatgagaggcagtgatgattaagagtgtgtgactttatgaaccatgtgaccttgaacaagtt

SEQ ID NO: 112727 - DNA, 367 bp, Homo sapiens
atgtgtgaagtacactctgtgatgctcgcacggtgatgacatctcctaatgatgcatttctcagaacatgctcctgtggtaaggaagcctgactgcagtctgagctcggactccctagaaccctcccctgccacaccgtggctattcccgatgtgcaggtagtggcttcattacattaaacacggcagtgagagctcctgccatgaaagttctgggtggagggtgggaccacccacatgtaagagaggttggcggtgagtggggcagctgaatgggaggccccttgcccatgctgggacccacttaattcctctgatttttagcagaatcagggcaaacttctaattattttggtactctgaagaaa

SEQ ID NO: 112728 - DNA, 776 bp, Homo sapiens
ttaaaatgtataatatgaagcagtggaacttccctgatagcacaatttaaatatttcctttttgacaaacgtgcatagttaaataaattaagtgaccaccaggtgtgactgaagagtggccagtgtctattcctagccccgaaggagcacagggatattgactgtgtcccttaaaaaaaacaaaacaaaacgtagggctttctttgtattggtttgaacatttctctttatcttgtgacctggccaactctggctatggctgcctcctgtctctcggtacattttctgtggcggtcaagaggagttattttaagccaccaatgggaaagtttaaagacataatccttggctgtaattgcgggagacgggaggctgagagtctgtgctgacttgccacctgtttccacggcagcaaggtgattgtgcatttcctgctgctggctgaggggccagcaaattttcatgtcgttgtgtcatggggaagttttcctgtctcaatgagagcacaccgtgcttgtggtcttgttcctgtgaccaggacatggagaactatggggagattgttctgggtgtgaagggaaattgctggccagtgcttagtgcacgggctttggagtcagagccaacttctccacctcctacctgtgtgaccttgggcctatccttctaatgcttggagtctcttctgtcctcatctgtatgatggggataacaagaatacctactttataggattgctgtggaggattaaatggatctgcatgacaaatgcttag

SEQ ID NO: 112729 - DNA, 1218 bp, Homo sapiens
agccaacaaggtagctacaaactcttgagaagccttgagacagaggtactcaatagagccattcctatgagaaacgtaagtatctgctgttttacaccgctaaggttttagctaatgtattatgccataatagataagttatatacaacctttatcaaataataaaagtaaccatcatcagtaatgagacaaatcaaaaaccatggcccacccaatagaacataatgaggagagtacagaattgcttctgggatatttctgacaaagatgtatatgcttcattcatacatgaggaaacatcacacatactcaagatgggagagccattctaaaaaataactaggcagaaatcttcaaaaatattaaagtcacggaaaccaagaaaaaatatgaacctgttccagattaaaggaaactaaacagacctaacattttaatacaatgtttgattttgaacttgaactttttgttatataagacactattgagacaagtgctaatgcttgaatagggctgaaggattagattataataatacattaatgcaaatttcctgattttaaacattgtagtttgattgcacaaggagaatgtctttatgtgtggaaaataaatagtcaacattctgtcttcaagcttctgaaaaaactctgcttttagggcatagatagaagtggatgataattcacctgttcctctgctactaattgagctgctctctgtttccatggctggctcatgggatgagagaatatatctagttttttatgtttcaatttgtctctctatggcatttttgtgaaaataaggaagtgtggagacttatatatgtttctaaattgtaatagttcattaatgtaaagtacagacacagtcttcacttttccttcttagaccgtttaaatatggccacgaaacaagtagtctctggttggctgggcactgtggctcatgtccttaacaccaacactttgggaggccgaggcaggcaaatcacttgaggtcaggagttcgagaccagcctggccaatgtggcaaaaccccatctcttctaaaaatacaaaaattagctgagtgcggtggtgcacaccggtaatcccagttactcgagaagctgaggcaggagaatcacttgaacctggaaggcagaggttgcagtgagccaagaccgcaccactacactccagcctgggcaatagagcaagactccatctcaaa

SEQ ID NO: 112730 - DNA, 558 bp, Homo sapiens
atcattagataatagtctggttcaatcctcttgttttacttgtgaggaaactgagaagcacagtaacttgtccatgtcaccgagttggttgggagacctgtgttctaatctcagttctgctggttgcttgttccattatgccttgcaatttctcagctgatggtggttctctcctctgggaaggagggggatggttgtgaaataggaaaaaagtgcttgagaatgtacagattacactcacattactgatctgctgcaactttctgctctaccaatcagatattttactttttcttagagatggagtttcactcttgttgcccaggctggagtgcagtggcgcaatctcgtctcaccgcaacctctacctcccaggttcaagcgattctcctgcctcagcctcctgagtggctgggattacaggcatgagccatcatgcctggctaattttgtatttttagtagagacggggtttctgcatgttggtcaggctgatctcgaactcccaacctcaggtgatccgcccaccttggcctcccaaagtgctgcgattacagg

SEQ ID NO: 112731 - DNA, 468 bp, Homo sapiens
cagtgtgacccagggcaactcagacaacctctggtgcctgtttactcagctgtgaaatgcggtaggaccttttgaggaaattgaaggagacgatccatgtaaaacttgggcctaggggtgcggtggacagcaaagctcaatggctgttagcgtcctttctcttcggagtgtggtgcagcaggaagggtaacgtaacaggagccctcctggctctgccatcgagatggagcctggtgtgcgctctctagcagaccttccagccctcacatcgctctacaatgattccgattctcatgtgtctggcatgtgccagtttctaacgtatctgcatgcaccaggttgtagtgaccttgaactttttgatagactgataaagagatgcagcacatagaggccaatgggcatctttccacaaactagccaatgctggtcacagtcagaagcaaaacgcccaccgacgggggctac

SEQ ID NO: 112732 - DNA, 377 bp, Homo sapiens
ctcagcctcccaaggtgctgggattacaggcgtgagctaccgtgcctagcattgtatcttttttttagagaaatgtctattcagatcttttgcccatatttaaattgggttacttatttttgttactgatttgtaggagttatttatatattttagatacaaatctcttatcaggttttttaaattgaaaaagcttgacatcagatatttgatttgcagatttccttgggtttttttttcatttgaaagatcgtagcttccaaatataaagattaaagataattttatttcttgctttccaatctaggtgttttttattgctttttctcttctaattgccctgactagaattttcagaacagtgttgaatagaagtg

SEQ ID NO: 112733 - DNA, 207 bp, Homo sapiens
aaatatttgaaaggaaaggcctgaaaatttattttaattgatgaaaaccaaaaatccacagatccaggaaggtcaatggatcctaagaagaagaaatattaaaaagaaaaagcacaaaagggcatatcataataaattttctgaacacatatgatgagacattttaaaaagcagtcagagagaaaagacattttgtacagagaaaca

SEQ ID NO: 112734 - DNA, 414 bp, Homo sapiens
ggagtggtgacagggtggccctgggcagggtgtggccggttccctcttgcctgtgttgaagcatggactcctctgggccctcagccatcagcccagcctccctcacggaagatggagaattccagacaaagctcatccttcctccaggaaagcctgctccatctgcagtaattgacggcctgagaagctctgctcttgggctgaaccccaagcaggaggaggaggccggggtcctcaggtgcccatctgggaggcccggggcagccagcaactgcctgtgtgtctgggatctcacaggagagggggttcccaagccgagcatcagcccgtcgtggcccatggactctgggttccccaggcgggggaaatgtgccagagccacggggaaagctgagctctgcggccctgcgagtg

SEQ ID NO: 112735 - DNA, 263 bp, Homo sapiens
tgccatagcagctatgctgtgctgtggggaattccccccagtccagaccacccagactcccctgagctggcaggccaaaatggcagactccagccacggaaatggtggctgcccttccctccaggaacttagtcatctcaggcagtctccagtcagctgccgctggccgggctggaattccaagtcagtagatcttatcttgtgagctgccgtgtgagtgcagcctgcagaacaccacttggctcccgggcttcagtctcctt

SEQ ID NO: 112736 - DNA, 204 bp, Homo sapiens
ctcatcaccaataggtcctcagagaaaaatgcaaattaaaaccatcatgcaataatgcttcacacccataagaatagctgaaacaaaatatcgtaatatgctaaatgttgatgaggatgtggagcaactaggactctcaaatgtttctggttggaatgtaaaatggtacagctactttaaaaaattagcagcttttaaaataag

SEQ ID NO: 112737 - DNA, 131 bp, Homo sapiens
  misc_feature (127)..(127): n is a, c, g, or t
ctgcttgatgtaggagggattaagttagtatttcccgtatcgaccaagacaaaattacaatatacgcataacaaagacaaacaccagttacttggctcaatatccaagttttaacctagcaaaaaanaaaa

SEQ ID NO: 112738 - DNA, 512 bp, Homo sapiens
aattctgcttggctaacatttttggaacgctttggaccatgttctctcaaagtctcactttaagggtgtgtctataacttaacatagggtccagatatgctctgaaagacttaacctcaaatgggatactgtcattttattaatgtatgctggagttggcttagtttcaatttgaggaatttcatgtgctgcaacttcttttcctagaaagtaatacttttgatgtttctcacaaattataatttctaggactctgagctgcctacttctacttactcctttttagttagggttgtgtgtgtgtgttgtccttactggttactgcttttacctcctagggtctttttttcaaggccattttcacttaaccttagctattaagcccaagtggaggtgctaaggtgatttgaaaaatggaaatatcttaatttaaattgcacaaacaaacactatcgtgcatatttgagaagtaaaatacaatgtaaatgggggcttttcaggcaccatgttaa

SEQ ID NO: 112739 - DNA, 466 bp, Homo sapiens
ctctaaccccaaaatcttaagcaagtttgaccgcccttccgcgtcaacacaccaagtgttctgcgttagcccaccagggaagtgagactgctgcatccatggtctctcaaaattaagcttcattgcattacacaccctagggcataaggaaaaactgttaacatgtaattctgcactgcttagagatgccaacttcttcaacagttcttggacctcattattttatattctgtaagtgtagatgtgatgtatgtcactttatatttttgggttacccactcttctttatatccagtaggaaagcatttaaatgcatgtttgtcgttatgtttctatttttcgtgattggtataaagatgaatggctctaggaatgtcatctagtccattaagctaccgcctgcctctctgatccctgatcgcttgctgtcagctcacccgagctcagctgtacctttgaagtgcag

SEQ ID NO: 112740 - DNA, 706 bp, Homo sapiens
catggtgccctccagtatacaaaggcagagacacagagccctcaggtagaacggggttccctagatggcatctcctacctccagagctcctgggtacccatcgagccccctaccttctgcctaagccagataggagtgacgatttttatactcagcgactttcggcctccttctgagagtgatgtcaggtcatcacccatagaagaaaggaagtgaaagaaaaagttcatgccttcttggagtgcagatgctcagagtgaaagaaacaacaagacttgagacagatgggtgccattgagcaaacccgaacatgcatgtctctctcatgtgagtgagtgcatgagactttattctccttatttccccagtgcagtgaaatctttctggataaaagaagtgggctaatggaaggagagacagaccaagtcccaatgacattgcctgaccattttcaccttcgccatcagcagtctccctcacagcattggtgtgggcaggtaagaagaaagcaaggccctgaaagaatatacattggaaaatgagcagtaatttgatactcttgtggaagagcatgactcttcgccccagaaaggccaatgacacctttactacagcgtaaagatcaaagccagggactgtgaaactgcctcatgatgtttctcccatgagacctgtgtctggatgtttatatggaacaaaacatgga

SEQ ID NO: 112741 - DNA, 415 bp, Homo sapiens
  misc_feature (3)..(3): n is a, c, g, or t
  misc_feature (8)..(8): n is a, c, g, or t
  misc_feature (28)..(28): n is a, c, g, or t
  misc_feature (74)..(74): n is a, c, g, or t
  misc_feature (130)..(130): n is a, c, g, or t
agnaaaangaaggcaaaaaggtaaaggnaattgtgggcaaatttatgaacccccagtagattttacaatatggnaatttatgttgtttaccagtatataaacacctaagttttgtgttaaatgtgaatcnggaataaaagtatccccacaggcatctgacacaaattcccagaattagcccaaagaattgtttatttgaggcccaggcaatccccagcattttgggaagccaagttgggctgatctcgaactcctgacctcaggtgatccacctgcctcagcctcccaaagcgctgggattacaggcaggagaattgcttcagcccgggaggcggatgttgcagtgaaccaagattgcacccttgtactccggcttgggcgacagagccagactctgtctcgaaaaaaaaaaaat

SEQ ID NO: 112742 - DNA, 357 bp, Homo sapiens
gtcctggcacacggtgtattccagtcttccctgctggcccatctgaatcctccctctctgctagtgggaacctggctcccctgactcctctagcatctgctcagccctggtgcacgtgcgagaattgtccacccaggcccgggggggaaagccctggagtgcagcgtttgtgtacagctccttctggccttgcggtctccactcagaacattttccggagttgcttaggcggctcctgccctctggccagtgtgtttctgtttcacatccgtgcgtgtggagcctgtattctatctgcatcccccaacctcctggtcgggtcttcccccaatagtttgtgcacattgaagttcatct

SEQ ID NO: 112743 - DNA, 191 bp, Homo sapiens
ggaagctgttagacatctttatttggtcccgatgccactgttggccaccctgtggtgaagtctggagcctgcagccattcgccctccacgctgctcagtccacagggccttggtcttgcttgattccagtcttgatgtgcggcacccatcactgattctgaaaccacagccccgtgctctctggaggccaa

SEQ ID NO: 112744 - DNA, 370 bp, Homo sapiens
tccctacaggcctctcccctgagctctgcaagtcctgtgttcagttggctcctcagctctctgctgggatattaaacaggcgtctccacatccacatttccataggtgacttcctaaacccctgaacacattcccttgcagtcctacatgtctcagatgagggtgacagggtacttctggggacttagccaaacttgacagcatgtatttttaaaatgagaaatgaattccattatttgtaaatgttgtaatttataacgtaaagaaaagttgtgtgtatacatgaaaggcgtgagaaaatacatcatttccaaaattcttttgaagtgtgggagaaaaatatttcaagacctcatccctatggatctgt

SEQ ID NO: 112745 - DNA, 757 bp, Homo sapiens
aggataagatcaaagaaactattttttagctacatgtcctttttgatgtgacagtctccccttcttctgtgaattaaatctttttgtccaaagtaactacctatgtctgtgactcaatgtttgaccctcaatctactaaggtctaagtgaaagaagctaagctgaagaaaagtgaacttcataactttgaaacgtgaaagagggaaaatgaagaatattgtttccaatgtcctctgcaatctcattacctgcttctttgttaagacaggattttacacatccacaggtgcttcaccacacctgtgtatgtgccaagttttaaggcgtaatgtgcatttcccttttttacatgagctgtagttctttctagcttcgtcctctctggagattttgtttaattagtcaaagactttagactatgacatttcagacaatggtaaattggtgagacagagtctttataggcatagattcttttcagtttccctgaaatggcaacacttttgaacaatcttgaaacccagcatgtctgttctctgggaagagtaaatagtttggaatttaaaagtaccttttggtggcagattgcaaagtaaatctccctggggaagtgcactctagggagtcaggagaagagactctctaatttagagttccaaccctcctaccactgttttataatttaacctatggaagttcctattaatgcccagttttcttctttgtgaatgagcagcttttgttagatgagatcaga

SEQ ID NO: 112746 - DNA, 191 bp, Homo sapiens
tggtgtgcagtgtacgtgtctgtgtgcgtttcccagcagctccatcaaggcagtaaaacattaagcactcaagagtttgggctttgaggtgaaaatctctgcatttaaaaccagactctgccagacatggtgactcatgtccgtaataccagcactttaggaggccaaggccaaggtgggtggattgcttg

SEQ ID NO: 112747 - DNA, 438 bp, Homo sapiens
acatcaatagacagatgcctcttctggatgagttcatgggtttcagcctgagtggaaatattcagttatagatgagcatgtgattttcacctgtgttttgatcaaagagtctgaagtttctgatgaagtgttatattcgctttcaatggtatctaactggccataaacatgtgggaaaatatcaaacttgaggcaacttgactgaagtggacaggggaaggggactgtctttgttggggtgaagtgtgagataataaaatgcatacatttaatagttaagaacatctaaaggccaaaccttccttatatgcaccaagcagccattaaaacaatatgatttgtgtatgaggaaactgattaatcagtagcaaaccactcactaatgagtttagtggccttcaatatgttttttagccttgctagacctccttgtagttg

SEQ ID NO: 112748 - DNA, 426 bp, Homo sapiens
gcgttgacactcaaatatgtgacaccagtgggtactcagacctctaggtcttccttggcaaatatgagtggtcttaccagagaacgggagtggatggagatggagagctttgaacctcaaagtggagagaagacattgccatggcaaaggaggttagcatacaggcttggtgaattagagctgggcatggtggctcaggcctgttatcccagcactttgggaggccgaggagggcagatcacttgaggtcaggagttcgagaccagcctggccaacatgtcaaaacccccgtctctactaaaaatacaaaaaaattagctgggtggggtggcgggcacctgtaatcccagctactcgggaggctgaggcaggagaatcgcttgaaatgggaggcagaggttgtggtgaaccaagatcttgccactg

SEQ ID NO: 112749 - DNA, 252 bp, Homo sapiens
tgtatttggagattagacctttaagaaggtaattaaggttaaacaggtcataagggtgggctgtaatccaaaaggtctggtatccaccaaagacctttttctctcttcttgcacatacagaggaaaggccttgtgaggatgtgacaaaaaggtggtcacctgcaagccagaaagagaggtctcaccaaaactacccctgctgttacccggatcttggactttgggccttcagaatggtgagaaaatatctat

SEQ ID NO: 112750 - DNA, 281 bp, Homo sapiens
ggcgcagctgtgggactgtttcaacagcaattcttgtggcaaacctgggattgcctggttttgttttctgttgccaggggagacccccaagtgacaaaatctagaggaacagatcagaaaaagtaaatatatgggccggaaagcaaagagaaagtaaaaggagggaaggcactggggttgaacacaaatgaccagccctgtgtgtgaagactgccagcagccagcacaactgccagggccccagctgagccatgctggggatgcaagccagcagtcgcatg

SEQ ID NO: 112751 - DNA, 426 bp, Homo sapiens
taaaagacgttagagttctccatgtaatgccctacgtggcgctagaggagtagcaacttattggggaaatgtttactacccttattagtaaaaaggagacatattaatgattcactttaaaggacactttaatgataaattgttaaattataaaattgaatacttattaaaacatacataaaaccatataacatatatacagcgctaatgaacaatttacttttccatggagtttaataaacctactttaataaattatctttcaagttaaattaacaatggcacctatgtttttttcccccctaagtatttaagttcaggtgcaatgaatttctctatcacaactttaggtcaactcataaaactaattttgcagagtagaatacagttaattcttgttttctgcctagtattcttcaaagatag

SEQ ID NO: 112752 - DNA, 201 bp, Homo sapiens
tgtatgtgtgtgaatgtgggtgtatgtgactgtgagtgtaagtgtatgtgtgagtgtgtgagcatgtgtgtgaatgcatgtgtatgtgtgtatgtgtgtgaatgatagtttgtaagtgtatgtgtgtgtgaatgtgatagtgtgtgagtgcatgtgtaagtgtatgcgtgtatgtggtgtgtgtatgtgtgaatgtgtggg

SEQ ID NO: 112753 - DNA, 645 bp, Homo sapiens
agctgatggcttcccagagatgcctcacagtcctgcgcagacagagagaatgcagaagctggcaaaggatcctccacacgcaagatcagaggacgtcccagatcatcttttctttgtggatactgcaggtctacgtgaaatagtgtgtttttgcggggtgctgtcccttaggacaagtgaagggctgatgagaaaggaaactgcgtgagccaggtgtacagtaaggagcagacaacatggcactggccaagtggaaaggctgtttgcataataagattacgatggggtggcctgccttccctgtgtgctacgtaaacatcacacctgatccaaccaatctgcaggccctacataaatcagacaccgcctcctccagcctgcctataaaatctggtacactccacgtgggccagaagtcccatttggatgcccctctctttcgcaagagagagagctgttctcctttctctttcttttgcctattacattccgctcctaaagtcacttctcatgtatgtccacgtccttaatcttcttgatgcaagacaatgaacccgggtatttaccccagacaacaacaccacttcactaggagttaaaagaacttgaaatgcaaattcatggtcatctggttccaaagcccat

SEQ ID NO: 112754 - DNA, 541 bp, Homo sapiens
gcgtatgaccagctactctcacagtgacaaatttttttaagcaggaaggagaccgcttaagtgatgaagatctctacaaattccttgctgatatgagaaggccatcttctgtcttacggcgactaagacctattacagctcagctcaagatagacatttctcccgcacctgaaaatccccattattgcctaactccggagctgcttcaagtgaagctttaccctgacagtagagttagacctaccagagaaatcttagagtttcccgcaagatggtttatgttccaaacactacttacagaaatcttctctacatataccctcagagtcttaattttgccaatcgtcaaggttctgctaggaaatataacagtgaaagtccagtttatgtatgggagaggatccaagcaatgccatgccggtaatctttggtaaatctagctgttcagaattttcaaaggaagcctatacagccgtagtatatcataacaggtctcctgattttcatgaagaaatcaaggttaagcttcctgctactttaa

SEQ ID NO: 112755 - DNA, 291 bp, Homo sapiens
cagacttctttatgttttgcttgtgacagcagtacttggctatggcagttaaatggactgtaagatgttagcttgatttggagtaccctgagtagctgcacaggtagacaaagtacaaagatattgacagcttttttcttcctttagaagaataacatatctaaaacaactcttaaagcaagagagctgcagttgcacactaagaaaatactgcaatactgccatgacttggttataggtgatgctaacataaatgggatattctgtttctcattgcaccagtcatgcaga

SEQ ID NO: 112756 - DNA, 363 bp, Homo sapiens
gctaggagactcagggacaaatctaagtcttcacttaagtaactcatttatccgaggcacctaccaatatctattttatctttttcctttaagaagacaggccgggcgcagtggctcacacctgtaatcccagcactttgggaggccgaggcaggcagatcacctgaggtcgggagttccagaccagcctgaccaacatggagaaaccccgtctctactaaaaatacaaaattagcggggtgtggtagcatgtacctgtaatcccagctactcaggaggctgaggcaggagaattgcttgaacccgggaggcaggggctgcggtgagctgagatcgcaccattgcgctccagcctgggcaaca

SEQ ID NO: 112757 - DNA, 182 bp, Homo sapiens
aggacttactcatttattccaagcgctcagagagtagactaggtccacagtgtgactcagggaggcaggagggctcactgaaaaaatgacccatctaacaaaaggtggggaaggtggggaagtggtagaagaacaaaacagggagtgaagcacggtgggaagtcatgagggctttctgctgg

SEQ ID NO: 112758 - DNA, 490 bp, Homo sapiens
acctggttaatttttatatctttggtagagatggggttttgccatgttggccaggctggtctcaaactcctggcctcatgtgatctgccctcctcggcctcccaaagtgctgggattacagatgggagccactgtgaccagctttacccattatttcttagtaaaattttattacagattttgtatttcttagatgtgctgtagacacgtatcactattagcacttaaaacagtgatatatagtagtacttggtaagtatttgttgaataaattatcaaatttacgagctagaaaggcacacttgagaaataaactaaagagaaactctttttggagtctcgctctgtagcccaggctggagtgcagtggtgtgatcttggctcactgcaacctctgtctcctgggctcaaaccattctcccacctactcaggaggctaaggtggtcgacgcggccgcgaattagaagtagtagtcgacccgggaatttc

SEQ ID NO: 112759 - DNA, 892 bp, Homo sapiens
acacgggacattctccaaaatagaccgtatgatagggcacaaaacaagtctcagtaaatttaagaaaatcagaattatatcaagtactctctcagaccacagtggaataaaattggaaattaattccaaaaggaacactcaaaagcatgcaaatacatggtaattaaataacctactcctgaatgattgttgggtcaacaatgatatcaagagggaaatttaaaaattctttgaactgaacgataatagtgacacaacctatcaaaaactctgggatacagcaaaagtggagctaagaagaaaattcatagcattaaatgcctatatcaaaaagtctgaaagagcacaaataaacaatctaaggtcacacctcacagaattggagaaactagaacagtccaaatccaaacccagcagaagaacagaaataacaaaatcagaacaaaactaaatgaaattgaaagcaaaaaaatacaacagataaatgaaaaagctggttctttgaaaagataaataaaattgataagcattagcaagattaatcaagaaaagaagagagaagatccaaataagctctattagaaatgaaatgggagatattaccagtgataccacagaaatacaaaaagattattcaagactactatgaacaatcttcaacatccataagatagaaaactacaggagatcgataaattcctggaattataaaaccttcctgggatttcaattaggaagatatagagactctggaacaagaccaatcagaagcagaaggactgacaacggtctttacaaaatgggcaaacaaaagtccggacagatgattcacaccttgaatctacccgaattccaagaatggacccactctattaaactattccggtgagaa

SEQ ID NO: 112760 - DNA, 286 bp, Homo sapiens
atgggagttggggacccctgctttatttaatcacttataacttataatcacttagatgctctaagtcatctggggggtgagaaggttggaaaagaaaaagtacattagtgagtgagtaaagattatctgggattgtttcttagatgaggatctatttgatgttggtgttggtctactgtgaactaaatataactgcattggagcctaagcgcagatgtctgcgtcatggtttattactcctgtgttcgtttcaaggagctcctgtgatacctgctgtctccaccta

SEQ ID NO: 112761 - DNA, 345 bp, Homo sapiens
aagtgctcagcagtataatgtaagcactccagtgttaagtattactatgactactacactctctagcaagcacgctggcttatcatgccagaagccacttcaaaataccttctacgtctcctaggtaccccgtttcctcccttccttcccactcccaatacctggacttgcccagtacttaataggaagagatgttgccaggcagaaagttcttaactgctaaatacacaaaccaattttcatcaatatctatctcctctttcttttctattactgaaacaaaaaatagcccactttctcccaaaagtcaatccagccacaggtggactaagcctatcccttcca

SEQ ID NO: 112762 - DNA, 600 bp, Homo sapiens
caccagatgctcccaccacaccagatgctcccaccttacttccttttaaaattatattgaaatcctagtcctagattttcttgagaatttctctagtatattacatagaattatattttaaagccacacactaaagacagtttaggagtgatttaaaaaatggaatttcactttgattctgttaattcaagaagaggatcttcaaacactgtaatttaaaaaaaacagagacttgctacacgaatactttaagcaagagctaaattcctgaacagtttaactcctcctatcatttttactcagcagaatttcaaatagcagcttgtgtacccaagttatttacatattttcttccttaatcatctccttttcaaaggacatagagttcatttaacaaccagttattatgtcctagttttattgctatttttatttgctttctttaatgaatgaatcatttccaaaaccagtttgtaaagtaatactcatttccgctatttcacgtaaaaagcacaggtccaacaattgcactctttaccaccccttcccgtatgtctcaccaccaaatcactataagacatcctaaattacaaacagatt

SEQ ID NO: 112763 - DNA, 632 bp, Homo sapiens
gatgttgtttttaaaaatactgaccttacagtcctttccatctttatttttgagtgacagcagaatcccgagtataagaaaatgtgattaattctcccatattgaagtcatttaatcatgctttgcctaacagctgctttctattcagtacactgaacataaaattctggagtgcctttgtgctatcataaattgtaaatgtgaaccattcttcctcttaagtatcatatggtattgctgttttgaatttgtcagtttggtagggggtttttctagagattgctgttgtagtcggctaggagggccttcttctgggacgaaactctctccctcattctctatatcactgtgatatttagtattatattattataatatttagtattatttgtttgcagtaaagaagtgggggaaaattggtttgacttgtcatccttttatttctatggcatattgaaaaagtggacaaatagggccaaaacaaagcagtgggattcttacttggctcttttaggtcagaaagaaccagtttaataaatttcagttcaacaaatttgtactgactctattcacagcaccatgtggagaaataaggataattaagacttcatttccgccctgtctggtaggat

SEQ ID NO: 112764 - DNA, 205 bp, Homo sapiens
ggaaagaaatttccggaagtaaatacagcaattaataatgtttataagctgggcatggtcgctcaggccagtaatcccagtgacttaggaggctgaggtgggaggattacttgaaacccacagtttgagaccagcctgggcaacatagtgagaccctgtctctaaaaaaataaaaatagaaataaagtagtgcttattgtttgca

SEQ ID NO: 112765 - DNA, 464 bp, Homo sapiens
ctagcaccatgataccctggaaaaaacctctatgtgactggccaggagtagactgacatgtttttggcacaagaaatgttgactttagaaaggcctgaagggaaatgaacaactttctggtctcccagcaataatcaactggaaaacatgaagagttaatttaaaaaaagaaaaccaaaaaagcaaaacaaaacaaaaccaacaccaaaaaccattcacaacagttacaagcatataaaatacttaggatttaattcagtaagaaatatgaaggcttggtaacataacactaaggggccatgctttgttcaccattatgactgtaatacctacagaggttctagcacaatgcaaacactttacaaatatttactgagacaatagtgtatatgaaggacccaagttaagtgtagtgaaaagcatgttctttgattttgcaaagatgtcagtctaaaaaaataaag

SEQ ID NO: 112766 - DNA, 336 bp, Homo sapiens
tccacaatgagatgccactacacacctgttagcatggataacataaaaaatgttgaggcaaggcacagtggctcatgcctataatcccagcactttgggaggcagaggcgggtggatcacgaggtcaggagatcgagatcatctggctaacgcagtgaaaccccgcctttactaaaaatacaaaaaacatagccaggcatggtggcgggcacctgtagtcccaactactcgggaggctgaggcaggagaatgccgtcaacccagtagacggagtttgcagtgagctgagatggagccacagcactccagcctgggcgacggagcgagactccatcc

SEQ ID NO: 112767 - DNA, 370 bp, Homo sapiens
ccatggcatgtagtgaggacaagaatgactctctggaaataggtatgagttactcctgcaaatctcttgccagttttttggaaatgcaaatgctgtctgtcaagatgaagttgataaagctttttggtattaacgcttcttaggtattaaagaaacaactacctttttttgtgactattttatagtgggagttgggttggcaaggaggactgaagtcaatatgtatttttatatgcgttgtgctccggggaggaaatttttgcctacgtgtgtaggtcttaaaatacagttatttgaaaagattcaggtaaagaatcaggaaaccaattttccaaactttgagtctaatgtacagtcatgagtcaaacag

SEQ ID NO: 112768 - DNA, 374 bp, Homo sapiens
aaatttatgcttgaaatggctcagagtttgtgtatgtggagcatattggaggctgattgtatctgtgagtttaggaaagacttaacttgatcccttgtgcaatgaagtctttcaaagaaaacgagggttttttgtttttttttttttttctataaggtagagtggatattcaggctcagattttagctaaattaagaaggacctttctctgtccagaatagtatcacaaaattaagactggctctggaagagagacagaggatgccctcttttcattgtcatacaccatttgaattgtgtttgataaatttatattgtgaccttgaaaatgaaaccactcagaaatcctggttaatttctgccccatgcgtcag

SEQ ID NO: 112769 - DNA, 497 bp, Homo sapiens
agcaaaaattgaacaactgttctcaccagaaggctgatactctttttccccaccattttctaatttatactttaaaaagtgaaaaccattcttcacctgtgggggtgcaaaaacaaggggcaggtcagaccgagcccgcgagtagtagattgctgacccttgtccaagaagatgctgacaaaaccacaaaaatactaattgcagggggcagcagaatatgaatagaacaggtgaggaagcagggcacatggacaacataggaacacggtcagacattacagaatccttgggaatttgctgcagttaagtttcgtttggtggtggtagcagtgatgtgtgtttgtgtgtttcagatcacccatctaattggaaggtcacaaaagctaatatttctagactggagaagtttaacgaaatgtgagcttgagtccctaagccaaaatgtggggggaatattgtgacaaagaagtgctgtaattattggatggattactcca

SEQ ID NO: 112770 - DNA, 181 bp, Homo sapiens
ctgctgtgagggctgtgggcggtcctgagactggagccagcccccaggctcagctcagctcggggacctcgtgcccgggctttcctggggaggaaggtgttggatctcctgcctctctgtattcattcacactttgggtttctctctcttccgcgcattctaacatctgcaggattttttt

SEQ ID NO: 112771 - DNA, 485 bp, Homo sapiens
aggtcgtaacttttagtcatagctactcctgggcaaaattcttcttacagagacaatattaattacaataccacattgtgtatatattttgaaaagaggctggttgcagcagctcacgcctgtaatcccagcactttgggaggctgaggcgggtggataacctgaagtcaggagttcaagaccagcctggccaacatggcaaaaccccatctccactaaaaataccaaaattagccaggcgtggtggagcaagcctgtagtcccagctactcaggaggctgaggcaggagaatcgcttgaacccaggaggcagaggttgcagtgagctgagattgtgccactgcactccagcctgggcgacagagtgagactgtttcaaaaaaaagaaaaagaaaagaaggtattttgtgtttttgtgctacccgttcagcaaaataatgaaattcattgtttctaaacttttttttctgattaaatacaagagt

SEQ ID NO: 112772 - DNA, 395 bp, Homo sapiens
tcctgccctaccctaactgatcagttgaccctgggacattcttctcctggacagtgagtctcatggtctctccaccatgcaccttgtgaccccctcccctgctgacaacagataaccacctttgactgtaactttccactgcctacccgagccctataaagctgcccctcccctatctccctttgctgactctcttttcggactcagcccacttgcacccaagtgaataagcagccttgttgctcacacaaagcctgtgcaggtggtcttctatacggactcgtgtgacaagcttgcctttcccttttcaatactttgtttccactatgcttatgcccggatgatatagttctatttttataatctttcaggtgtaaaataaaattctaatatga

SEQ ID NO: 112773 - DNA, 787 bp, Homo sapiens
agaaaaaagggggagaaaggagagaaaggaaagcgcgaggagccgccgccaccaccagcgcaacagtcctggagctgtgaggagattcgggccgtcaccctgcctcccctgcgtcccgccaccggccgcttctgtcctcggacccattccaacaatctcgtaaaacatggtggattactatgaagttctaggcgtgcagagacatgcctcacccgaggatattaaaaaggcatatcggaaactggcactgaagtggcatccagataaaaatcctgagaataaagaagaagcagagagaaaattcaagcaagtagcggaggcatatgaagtgctgtcggatgctaagaaacaggacatctatgacaaatatggcaaagaaggattaaatggtggaggaggaggtggaagtcattttgacagtccatttgaatttggcttcacattccgtaacccagatgatgtcttcagggaattttttggtggaagggacccattttcatttgacttctttgaagacccttttgaggacttctttgggaatcgaaggggtccccgaggaagcagaagccgagggacggggtcgtttttctccgtgttcagtggatttccgtcttttagaagtggattttcttcttttgatacaggatttacttcatttgggtcactaggtcacgggggcctcacttcattctcttccacgtcatttggtggtagtggcatgggcaacttcaaatagatatcaacttcaactaaaatggttaatggcagaaaaatcactacaaagaga

SEQ ID NO: 112774 - DNA, 260 bp, Homo sapiens
acaaatcactttggggagccaaggtgacctcgtctctaatttagaaaagtaaataaaaataatataaactagtccatcttgaatagttaccgtcaacatgcatgaattcagtgccttatcagaactgcctggtgaagcagggagtagtatctgttttacggggggcggggggtagctgaggcagagagcttaagtgaatgtcctatgtcacacagtgagcagatgatggggtttgaactcgaacctaggtcttgaaccca

SEQ ID NO: 112775 - DNA, 315 bp, Homo sapiens
tgaaggctattgaatttgggggccttgctttcataacctgcttccttactgaattacctgattgtttgcatcagtttttcagttgattcttttgaatattcaggtattaattagagcatctgcacataatttcacctctgtttataattgtaaactcacatgtctttctctccagttgactaataaattcagtaaaacaatttcagtaaaatgttacatagtggtggtgagagtgggcatacttgtcttgtttctgacattagtgggaacgagaggcatgatttttagcaaccgtttattatttcattctgtgga

SEQ ID NO: 112776 - DNA, 418 bp, Homo sapiens
gctgtctctggcctcagtgactttcacacagaataccatgggcactccgtgtccttttgctgcagggttcctctgccatagctttgggatgggggtagagaatgctcacccccagcctctggagcctggagtcgggggcaaggccattttgtcctgcacgtatcccccactgtcccgttctcgggcagggtgggtgcagacaccaacctcctccacctcccatgctgtctcattccttcacacagtcgctcaccgcctctcactggggacccgtgaggagttctcaaatcacctggcagaggaaataccaccagtgccctggactacgacaaggacatgaagtatccatttccaaagtctatccacaggcaggacttagtctgtttgttccttatccccaccctgagcagtgttgtta

SEQ ID NO: 112777 - DNA, 644 bp, Homo sapiens
ggaattgctgggttgtatggtttaaccatttgaggaactgccaaacttttctaatgcaggtgcactattttacattcccatgagaatgcattggagttctgatttctccacatcctcaccagcactttttattattatctgactttttgattatagccatcctagtgggcatgccatctgttcttgagataagtttagaatcatttttatcccattgatatttttaatgagattgctttgaatttatggatcatttggacatgttttcagtggttaaggcttactatttaagaagagcatgctttttcaattaataaagtattctttaatgttccttagctttagctttatttagcagtccacatttaaagggtattaactatggaaatttttttttttttgatacagggtctcactctgttgcccaggctggagtgcagtggtatgatctcagctcactgcaacctctgcctctcaggctcaagctatcctcccacctcagcctctttggtaactggggctacaggcatgtgccaccacacctggataatttttgtattttttgtagagatggagttttgccatgttgcccaggctggtctggaactcctgggctcaagcaatccacctgcctcagcctccca

SEQ ID NO: 112778 - DNA, 642 bp, Homo sapiens
cacttaaactattttcacagggatgcagcatagttcagaatgccaaatgcccaatccccttggcttaatgagtcacttgtttctaactaactccaggcctttatttattgctctattataggccttataccacattggttttggttttatgttgtgtccatgtctgtctcttctaattggccatgagcagcagaaggacataaatgacctatttttcagctctctcaccttcaaacctaccactgtgcctgacataaagcagatattcagtaactgagaatgagaaggaaagaaaaggactcagggtaaacctcggttttgtttaagattctgcaaaggggaagaactggctttcaccacccaggcttctgaagtgtgtagagagggttgtgaatccgcactgaccgtgttctcttgcataaataagtccaggcacagtatcttcagtggtgaaaacagaagttacctgccttgagaagcacagtcaccacaacccagtctgcagggaatcagatgtcgtgtgtctttcgtttgcccctcttgatgtgggtccctttaatcatttgttgttggactgtggaggcagtgggggacattgtgttaaaaatcattcttcatcttgggaagcgcaggcccctgttg

SEQ ID NO: 112779 - DNA, 867 bp, Homo sapiens
ggtgagtgatcaggtaatggttgaatgaactaataagtcgtgtaagcaagcttcacgagagttgaagtggtctttagctttttcattgaatccacttgtccttggatcagatttacctgattttggattaattcagtggatttcatttactattaacatttgtaggctagacccagcacagtttgctaaatgaagagcagcaacagtactggttttcaaaccttggctcttctctatcctcgctgtcctagccccacgtgatcagcagttcagtgcaaattgaagacagatggaagcacctctgtgagggcagcccaaatccccgctagctccaaccgactgctttctcctgtgcctagttgatttttaccttttgtgcttggaaagttgagcatcactgcaactctggctggggcattggatttttataaaactttatttcaagccctgaatgactgtgttctccaatctggtagaatacagctggagaaaggcagctggctgggtgcccaagagaagggaatttcttcctagcactgtgacggagtggagcatcggaaggctgaactagaaaagggcgcataagtaggaaatagaaactgaaaagccatcccaggatatttgagttgttcaaaagcaggctggtagtttgggcatgtctcaggcacaaagtgactcgtgaacatttgatagatgagctgtacctgtgtgtgtgcttgagaagagacttcgagctgcttttatctgcatgctgggtttggttccattatactcactggaccctctgtgctcttctggggttcctcttggcatttgcctttgtgaacaggcaacacaagtgatggccacaggccctgcctgtctcta

SEQ ID NO: 112780 - DNA, 922 bp, Homo sapiens
ggtgagtgatcaggtaatggttgaatgaactaataagtcgtgtaagcaagcttcacgagagttgaagtggtctttagctttttcattgaatccacttgtccttggatcagatttacctgattttggattaattcagtggatttcatttactattaacatttgtaggctagacccagcacagtttgctaaatgaagagcagcaaaatttgagattttcttgagcttggtgaacctttcctaggtcagagggcaaggcaacagtactggttttcaaaccttggctcttctctatcctcgctgtcctagccccacgtgatcagcagttcagtgcaaattgaagacagatggaagcacctctgtgagggcagcccaaatccccgctagctccaaccgactgctttctcctgtgcctagttgatttttaccttttgtgcttggaaagttgagcatcactgcaactctggctggggcattggatttttataaaactttatttcaagccctgaatgactgtgttctccaatctggtagaatacagctggagaaaggcagctggctgggtgcccaagagaagggaatttcttcctagcactgtgacggagtggagcatcggaaggctgaactagaaaagggcgcataagtaggaaatagaaactgaaaagccatcccaggatatttgagttgttcaaaagcaggctggtagtttgggcatgtctcaggcacaaagtgactcgtgaacatttgatagatgagctgtacctgtgtgtgtgcttgagaagagacttcgagctgcttttatctgcatgctgggtttggttccattatactcactggaccctctgtgctcttctggggttcctcttggcatttgcctttgtgaacaggcaacacaagtgatggccacaggccctgcctgtctcta

SEQ ID NO: 112781 - DNA, 319 bp, Homo sapiens
tctgcaaccccccatgaagcgttcctcaaggtaacccctaacccaggactctccttactcctaccccatcagcaactactcagcaaacccactatttcctctgagtccatgactccctgaaatactggctccacctttctccccaaacctaggcctgattactcccgtgtctcctcgttggccccagcagccacattcggaataatcctaaccagcacttatgagggctgactctgtgccagcccttgtaggaacttagtgtaaatgccagagcagattttcttccttccccatggcctctgcaaggactagaagaaaa

SEQ ID NO: 112782 - DNA, 265 bp, Homo sapiens
tactcaactgcaccttcttcttttctaaaaaagcctttgggagcttggaagtataggccctctcttccagccccatcaaaatttgtttcccttcttcctgccttccctttctctatgcagacccaggccaagagcactaagggtgcttggagatccgtaaagggctgttggctttgacttcttctctctcttttatcatctactccaaacttctgctcttcctagaaccctttgctaggtgtggttttgttgcccaggctggagt

SEQ ID NO: 112783 - DNA, 249 bp, Homo sapiens
aaccaagtacccgtaaataaatgcaaggcaggtaaagtgtgaaataataagtaaaagagtagaaatctatgtaattggaaatcagaagacaatagaaaagaatcaacaaaacaaaaattgattctttggaaaaaataataaaattgatgagcttatggcaggactggccaaaatttaaaaagagaggacacaaggcaaaaatatcagccatataaagactaaaatgcagtactatgagcagcttctact

SEQ ID NO: 112784 - DNA, 279 bp, Homo sapiens
tggctgtggggaagaacagactggagacagccagcacaggagctggagaccagttggggggctgctatagtcatccaggtgagacgggttggcggcttacttgataaaagtggccatattcttgctatatttactttcagggtacagccaaggatgtcccaatggagtccacgtgaggtgtaaaagagagaagtcaagggtgactccgagctttctggcctggcaagtgaaagaatggagctgctatcttttcttttttttttctgagactgagtctcg

SEQ ID NO: 112785 - DNA, 533 bp, Homo sapiens
gcagacggagcccaactgagggacgccccacaaacacccgagcagcgcccctcaaggctgctgaggtcatcaaggaccgggaaaagctgagaaacgtcactcaggaggagcccgtggaagagagacagaatgtcacgtggtgtcctggagagaaagggaccttcagtaactaagggaatctggagaaagcctggatgtcagctgactcgacgtcccaacactggctcactgattgtgacaaagggaccatgagaattaggacgccagcgagagggaaactgggggaggggcacgcaggaactccctgatctgtcttcacattttttttctgtaaatataaaacattctacactgggattgcaggcgtgaaccactgcgcccggccctatgttagttttttatagttttaaactatattagttttttccaagagtcagcttttgacttggatcttcctattacatctttgtttctgtttgtttagtatgtagttttttgagagagtctcactctgtcgcccaggttggagtgta

SEQ ID NO: 112786 - DNA, 677 bp, Homo sapiens
atgagccactcgcagcacagcccttacctccagtcctaccacaacagcagcgcagccgcccagacgcgaggggacgacacagatcaacaaaaaactacagtgattgaaaacggggaaatcaggttcaatggaaaagggaaaaagattcggaagcctcggaccatttattccagcctgcagctccaggctttaaaccatcgctttcagcagacacagtatctggcccttccagagagagccgaactggcagcttccttaggactgacacaaacacaggtgaagatatggtttcagaacaaacgctctaagtttaagaaactgctgaagcagggcagtaatcctcatgagagcgaccccctccagggctcggcggccctgtcgccacgctcgccagcgctgcctccagtctgggacgtttctgcctcggccaagggtgtcagtatgccccccaacagctacatgcctggctattctcactggtactcctctccacaccaggacacgatgcagagaccacagatgatgtgagttgcccaagggaacaccctagggaaacgtctgaacaaggaaaagaggatccgggacctgcttgtatctgcgaaaaggagccaaaggagcaggcttaggagagctcataagtgtggcaagaagccgactaggctcattctctctccctc

SEQ ID NO: 112787 - DNA, 808 bp, Homo sapiens
cacattgttcgggccagggactgggtcaaggagattacgcagacgctgggagcacacgggcagagtggaccaagagaggtcggggcatcatagggatttttcgaggtaacccttattgggctttggggagattcgttgcatgccacgccaggagcagggagatggcagcagtagcctcccgggtgaccgctcctctgtattatttgcttacagatcaacaaaaaactacagtgattgaaaacggggaaatcaggttcaatggaaaagggaaaaagattcggaagcctcggaccatttattccagcctgcagctccaggctttaaaccatcgctttcagcagacacagtatctggcccttccagagagagccgaactggcagcttccttaggactgacacaaacacaggtgaagatatggtttcagaacaaacgctctaagtttaagaaactgctgaagcagggcagtaatcctcatgagagcgaccccctccagggctcggcggccctgtcgccacgctcgccagcgctgcctccagtctgggacgtttctgcctcggccaagggtgtcagtatgccccccaacagctacatgcctggctattctcactggtactcctctccacaccaggacacgatgcagagaccacagatgatgtgagttgcccaagggaacaccctagggaaacgtctgaacaaggaaaagaggatccgggacctgcttgtatctgcgaaaaggagccaaaggagcaggcttaggagagctcataagtgtggcaagaagccgactaggctcattctctctccctc

SEQ ID NO: 112788 - DNA, 878 bp, Homo sapiens
ataggctggctgtgctccaggttgtgtgtcgttgtctcattgtggatgctgaggatgttagcactctgaaggaagcttttgtgtcatctgacaggaatcattgaacactgactggactccagcacaatgcagctcgttttcactgtctgaatttcgtctgcacccatgaaaagcaagtcagaggtgtgagaagactgcttcaccttggacttgcctttgttgtgttttgtgttttttctagagagccactgcaaggcccaggatgaagagagacagtgagaagatcccaaccatttatcactgacaccggcatctgtggtctcaggtatgattctatcacccaaagagccctgaaaaactcaccagattatattccattccttatgggattcaattcttatgcacaaccactttctggaatgtagtcagaaaagcagtttccattggccaactcacagtctcgaaacacccttttcatcaatgctgtccgaccacgaagatggctggaagcggccctgaggtcaagatttgtagggtctcgcagtgggtattctcaggtagcctgctttccaataccaggctgactctgcctgtatgattctttttctgcttaggcaggctgacagcactgatagcacagtgctgtcatggtgaatgtcaccgttgacttgtggcaattccctgtggcttggcaaagaaggagacctccatggatgagcattggccatggactgtcacctctcttttctgtgggatccactagatattcccatgaatttaaaagtgagcagacatgagccagcctgaagaaaagtcaagcagagccccaggaataaaccgcgaaattcccaaggattcaaaaagatctgaagaattcc

SEQ ID NO: 112789 - DNA, 326 bp, Homo sapiens
ttatgttttaaattgttagagtttagaaacttgagattgagtttgctgcctgcattaaaatgatgcttaaacattaaactgcagtggccttaaatattaacaagttgattagaattactaagttcttttcaagctttacatatacagacaaatttcttatgcaaaatagaaggtaacccctgtacgtaagtctagaatttcagcagtccccaaaactgactgagcattagaatcactctgattttaaaatacatatgtggttttccgagatctactaacagagcctccataatgtagcctagagaaacgagttttcagatgtagtg

SEQ ID NO: 112790 - DNA, 400 bp, Homo sapiens
aaatgaggacacgtcagtcgggatttgggaggtggaaatgcaagtgttctgaaagatctctcaagcagctcttctcagtagttctgggtgggggccaagatcttgcctttctaacaagcccccaggtgattaataagctgccagtctgcccaccgcacactgggtagcaaggcacagagagtgccttcacaggttttttcaaaatccccacctgttcgagcattcagcggatactcgtaggatatatctatattctttctggagtttcatccatcgctaaggcaaaatcaggcaccactgcaaatattttgttgctttttgaagaagtatgtgatccaacatccttctctcataaacaaccttctggggagctcagggatttataggcagtgtgaggaac

SEQ ID NO: 112791 - DNA, 321 bp, Homo sapiens
ggaaaaccccctgaagggaaaacataggcaaggtgggagacaagaaatctgagtttacatcttaactttgttactaactgctatggtctgaatgtctgtgttctgccaaaattcatatcctgaaacctaatcaccaaggtgatggaaggtgggggggctttaagaggtaattaggtcatgagggcagagtgctcgtgaatgggattagtgcccttataaaacaggactgagggagctttttagcccctctgcccttccatcatatgagaacacagctagaaggggccatctttgaaatagaaagcaagtcctcaccagacc

SEQ ID NO: 112792 - DNA, 244 bp, Homo sapiens
caaatatataagagaaaaaccagaataaatctaccaaagagtttggccttgaatacaaacttctgcaaagtgtcaactccaaactgacatgagaaattaatccatttggagggctatgtggggtttttcggttcatttttggtttagagagagggtctcgctccctttttcttgttgttgttgttgttttttgagacggagtttcgctcttgttgcccaggctggagtgcaatggcgcgatctc

SEQ ID NO: 112793 - DNA, 394 bp, Homo sapiens
tatcagctcggtacggcatactggacttctgactaatattttcccattcctcagcgctccctactcccccaacccccggaaactaccattctactctctgcttctacgagttcatcatttttacattccacatacaagtgagattatacagtagtagtcttcctatgcctggtttatttcacttaacataatgtcttctaggtttatccatattgccacatatgacatgattccattcttaaggctcaatagtgttccactgtgtgttggccatctgtctggaccgcactcctctaactcttcactcttgaaaaaatcttacatctttcaaagcccagatccagttcatttctgtgaagctttccctgacccatccaaggagaattaattactc

SEQ ID NO: 112794 - DNA, 474 bp, Homo sapiens
tctctcctcctgcatccccaatcccacacagcattcctagacttccttctcaactttttctttacaaacattcacctgacattatgggatatatatgcttattcatttatagtctgtctccaccttctccccaacacccactgcccagaatataaactccctgagggcggagatgtttctctcttttgttgactggtctgtcctcaaggcctaaaactgtacccagcacagagcagaaactcaaaaaatagttgttgcatgcttgggcaggaaatagacaaatttaacctggtctcttgttctttgtctgcatttctgagattttttttacaatgagcatgcactatttttttttaaatgacacaataatgtgtttatcttgttagcctttcattttagttgtttaaatttttaatttttctatgttaagatgacagcaataactctttcctgagttgtaagggaggaaaaggc

SEQ ID NO: 112795 - DNA, 394 bp, Homo sapiens
aaatttacttaactattttctctatcatctccattcttctgataagcctacccagtaattaaaaaaacttagttcttgtgctgttattgaatttccatttgcttcttgttatggttttttaattctgtgctgagatttcttatcttttctttcattgtgagtacatatttctttactcctttgaatgtcatttactttaaaatcctgctctgccaataccaacacctggggcacataagagttggtttccattgattgtctattttattggagaataattttaaataattttaatttaaaataatttaaaattctactgcggacattgtgaatactaggttgctgtgagttcccaccctttcttctagctcctgcctgcctccagatgattcag

SEQ ID NO: 112796 - DNA, 329 bp, Homo sapiens
tgggagaggagtggctggcttacagggcatgtgtgtctccaacttttgcaggtaaggccagtttcccaaagtatttgtactaattgacataccaactctgagttccagatgttccacatccttgccagtacttgatattaagttttttgtttctgttttcattttagccacactggtaggtagatagtggtatctcactgtggctttaatttttatttcccttataactaatgatgatgggcacttcttaatgtacatactgggtttttggatgtgcttttgcaaagtgctgttcacgtcttttactaatagaaaaattgggttatttt

SEQ ID NO: 112797 - DNA, 618 bp, Homo sapiens
tttttatacagaaaggagaatgcagaatggtcagactaccatgcactgttaaatttgatttcaagaaattacaggaaaactttccaaagttccatctcacagaaattatttttacaaagaattccaagataagtttagttttatggaagacttttatgtggtttttactcactcttcatctcagacatcgacagatgattacatcacttatttagctagtaaatttattaatataaaaactcagagacattccaatatccacattgcttacaccattaggcatagattcagtgtcagctatgacaattgaaaataagctgttttgtgatttaaaggtttaaatttctctaaccaaactgcttgatccagatgcaggactgcaaatgttaatatttgttctggaagaacaatcaaataagacttaagaggaaaaggaatggccacaatccacctgaaattttttttaaaaagtgtgcagcctactaaatcagaatgaaaatagaagtacaagattataaacaaaatgcaatcaaacttttcttaagcttacctaaagttatttcatctgaaaatttcaagcaactttgttcaacattaaattgacaatctaaactaaca

SEQ ID NO: 112798 - DNA, 313 bp, Homo sapiens
ttataaacattgaaaaattgtgcaatagagcttcattaggatactttattctatctaaaaagaagatctttcttttgttattaagctatttgcaagatttaattgttgctattccacagagaatggttgacagtggattattattcctcattacactttaaaagacaacctgcttaaactaaagacagacactctccctcatttggagttatatttacttaattattgtcctgttttcttaaagagatttaagtgggttttttagaagtcactagattcactgggcccagagacaacattatcattttctata

SEQ ID NO: 112799 - DNA, 489 bp, Homo sapiens
ggcctcccaaagaaggtctcatcattttgggtgataatcttgtctctatagtctgactgctgctctctgcctctagctcttttcagtttagctttctctttggaattccttgcattgaagtctgcttctgagtgtcttagttttattgtcacatgcagccacttggctccaaggaacccccaaggtctgagtttaccactctcttccatcactatcatcttccccctgttagggaaaggtagtctaagggccatcatggaatgattggagaagtaaaggtttaacagcattgtgtgggctacagaaaaaaaagtgtacaaaggaagagagacaggaagaggtctggcgataaaagtcatactaagtaacttttaaatcttatttaagacacttccaggcacgtctaacaagccagtctagtagctccaccaacaatctaactgtacaagagcggtgaggacctccagcagaccagtttggttcactaag

SEQ ID NO: 112800 - DNA, 249 bp, Homo sapiens
cttgtgcttatatgtatggacacttgcatgcacatgtgcacacatatatcacctttctacaaaaatgggtttttactgtacatactgatttgtaacttgcttgtttaactcgacactatattgtgagcatcttgcagcatcagtaactccgagtaagtgaaaaagacatctggtgggaaaaggccaacatcgtgccatgtaaatacagtgttttagttaaaataactggtttctaggacaaaccagaat

SEQ ID NO: 112801 - DNA, 107 bp, Homo sapiens
ggataacaagaaaatagttatgaatgttttttcagtctttaagggagggtataatagtgggaagaacttggtgattttaaaaataaaacaataaaaattaaaagtcc

SEQ ID NO: 112802 - DNA, 200 bp, Homo sapiens
gaggccccccagtgtgacctagaaggaggagaggtagggctgaaccccctttccaggccttcagatgccttgacaggcccgatgtcctaacaggatgccctctgtctcccctcgggacacccctgctcttcccatccgtctccatcaaccaccccacagtgccaagctgagggaccctcccagagcagtgactggaacct

SEQ ID NO: 112803 - DNA, 401 bp, Homo sapiens
gggtttacaagtgctctgaactctggagagaatttggagaaaagccatcaagttgattaaagaaattaatgaagcaataaacaacaagaagcaataaactattattgcatgggaaaatggacaggaaatcttaatacactgtagtaaggacagtgactaattattcttccactcttcttaagatggtgaaagaactaacagactaaaactacggagttcatacgaagaattccctaagaatgaggtctgttaaaaggtggtggattattctttgatcaatttttcaaaaagaatcctatgacgtgtgtctaagggttgctttacgaagtgcttgatctaaaccacctgagtcctctaccatcatatgaaaatgtcttcctcagaaactttgataactctat

SEQ ID NO: 112804 - DNA, 387 bp, Homo sapiens
aacaagctatacatatggtatgtagtaggctataccatctaggtttgtgtaagtatacccataatattctttcgcaaaacagtgaaactgcctatgactcatttctcagaacgtatccctgttgttaagcaatgcatgactgcgagtatttactagtgctctttaactcaccttaagcaataaaattcacaaaataacagttttcatacattagttatattttctgaatgcatattaaaataaataaccattaaaatataaaacgttctggtggggcatggtggctcatgcctgtaatcccagcactttgggaggttgaggtggggaggatcacctgaacttaggagtttgagactagcttggacaacacagcaaaaccccatctct

SEQ ID NO: 112805 - DNA, 1243 bp, Homo sapiens
  misc_feature (394)..(394): n is a, c, g, or t
tcaataggtctagcatggggcataggaatctgtatttttaggaatgataaaggaaaattgcttaaaatagggtaaattataacttacaaatataaaatgaacacttgtctaagatttttgtttaactcgtttgtttaatgagggagccagtaagatgttatactgagttttatggaaaattaaaagagccacacatatctaggcactaaggaacactgaaataaatttgcttgataggttcaaaactgaattcttgatggaaggtgggaaaaggaaaattaattatacttccaccaaaaaaaaaaaaaaacaaaaaaaaaaaacaacagtcgttgggccgcgccctgcgagcccctcgggaaaaagccttccgagaaacccaatagcgtgtggngacgccgcgggacgcacagtggtgttacgtgcgcacacggtgggcaaaaacgaggataccctacaggaaaacacccgcgggccccatggaaacacagagcgcgccgcggggaaactcctcacacacaactataaaaaaagacgccgccgggggtgagcaacacacagaaggcgtttccgggaacacacaacctccacagagagggacagccccacgagaggcacactaagcgagaaccaccatcaacacaggggacgccccaacaggacgaacgcaccaaacatcactcaaattcacccccgcaaactggttggggggaaaaaacacaagcaacacgaaacaacacacagacagacaaaaacaagaaagaacaacaacaaaaaaagaacaaacgaaaccagacaaaaagcaagagagagaaaaagcagaagacaacagacacaccaccaaaaagaaccacgcacacgagcaaaagaaacgaaacagaacaacaaagacgaaaacgaacaacagcaacgaacgagacgaaaacaagaaacgacagacagcggcgagagcacggggagcacagcagaggagaaagcagacaccaaaaggcgagcagaggagggagcgcggcaagacagagagagaaagacagaagcagcgaagaggagagcgccgaaagacgccggagcagggcaggcaaggagggagaggagaagaacaacagaacacccacggagaggagaaagaggaggaaccagagaagaagaacaaacacagcaagcaagagcgacgacgacgaacgaggaagcgagaggcgagggggcaagagagggagcagccaagcagcagccacggaagaag

SEQ ID NO: 112806 - DNA, 554 bp, Homo sapiens
cacagtggctcacgcctgtaatcccaacactttgggaggcagaggcgggcagatcacttgaggttaggagttcgagaccagcttagccaacatggtgaaacctcatttctactaaaaatacaaaaaatagctgagtatggtggcacatgcctatagtcccagctactccagaggctgaggcaggagaatcacttgaactcaggaggcagaggttgcagtgagccaagatggtaccactgcactccagcctgggcaacagagggagactctgtctcaaaaacaaaacaaacaaaatgaatgcagggcatctgagtggcacacatggtggaccacagtaggtacagtggtggcactacccagcaaaagagctcttcacccaatgtgctagaagccaatactatgacatcagatttttgagaaaaggaaaggtttgtattgcaagttaacaaggagacaggagtccagctcaaatttgtcttatgctgactttaaggcaataattttcttagaaaaggtgtagggcgtggattctgggattagcaggcgattggtgg

SEQ ID NO: 112807 - DNA, 851 bp, Homo sapiens
gaacctggtttcaggtagggtttttcagtgaggcagattctagtttctgttccgaaaacaattggtttttagagagaaatgctgaaggtgctgttgcctttttgcttctctttgtctgcttgttcataagcagcagagtacaatctgtaaaggggagtatgaatagtgtttctgtttttgtttaagagtaagaaattgccagagaaaataattagggcttggatcagcttatttaaagcaatcatcttcacactaagatattactttggtttatttcagagcttgtttctgtgtgtcactttgcccccttctgcaatttgtgccctttgattttcagttcttaaaatttggaggcgagatttccccagaggattatctttctaaatcaaatcctctttatcaagaatctaaatttaaaattgcgtgttttgataaacatgcaggttaaatgtttagaacactacttagagaagatgctggggcccatgcctgccttcttagaaatccacagaaaggaactagggctgccagtatttgttgtatcattgggccataataggtttgtcatcttgataggctgttttcaccaaatatttgccaagaaaagagactttaagaattaaatgtaggccttaaacttgttctacttctgcattcaatagatatctgtttctgtttcattttaaaaagatgttagaccagctgggcgcgctggcttacgcctgtaatcccagcactttgggaggctgaggtgggtggatcacttgaggtcaggtgttcaagaccagcctggccaacatggtaaaaccccgtctctactaaaaatacaaaaattagctgggcgtggtgtc

SEQ ID NO: 112808 - DNA, 422 bp, Homo sapiens
ctcctaccacagacttcctgctgatccacctgcctcctcccttcagggccccttgggttgtaatcactgatgcaccattgttaggcggcagggtgatttaaggtgaattgggcctttgcacggcctgcttggttaaaagctggagcataagtcatcgcaccattctgtgtgcgtgtgtgtgtgggcatgtgtgtgcatgtgtgcacgtgtgtgcctgtgtgtgcctgtgtgtgtgtgcccatcttcgtcttccttcccctcccagccttccctgcctgggctttggggctccctgtgctgtgaatttcactttgctgggttacttccagtgcatgctgctagtcattcttgcttgacctttaaatttttctctttagggaaaatatgatcattagtctgtgttctccagcagatgtatacca

SEQ ID NO: 112809 - DNA, 788 bp, Homo sapiens
ggccattttaatcaacattgggacttccctgttaaaatcttggctgagttcagtgagtttcacaaacacataaaaagcaagcttaaatactggcagagggtggcctgaaaaggaaattcagctttcttgctgaatattattattaatcaaaataagtataaggatcaaataattataattgcattaaactctttggggacttgagacttctgtcatttctataaactaagaatagctattattgaattcacttatgaatcacaattccttacacttatttgtcatcttacacatcacaaaatgctttcacctgttatgatttggtttgatgttcacagtgcaaatgtgcaggacaggtattattagccccgtttaatagatgagtgagttgaacttacgaatggtcaagagctctttccataggcaacattgcctctaagatcctcttagctgtccctttgtgatgaataatcacttctttgctcaaggaagaactaggccttcaaaggttgctgtcattttatataaatgttgactgaaggtgtgcacaacctgacctggaaatacaagaagtatgtcattgacatatctttatgatattcaagcaggttaccttttttctaccaataataattgaaataaattaaagagagtacagattaaacatatgttttcaattgatggtgggaatgtaaagaggctcttaatgaatttgttaacggctgtttccattttgctcaatgctcggttatcaatgccaatgagttttggactttgatcataataac

SEQ ID NO: 112810 - DNA, 1866 bp, Homo sapiens
cagattataaatctacccacattgaattctgaatagatttggaaaattgatctgcttgcctactaagtacaatttgtttctgcctgtggattctgggggttttccatcattaacacattgaggttattctgtctggcagtgatagggaacaaacattggcctatttatttcagcaaaggagttagttgctaggaaacatttcaactttagtcaggtattgccaatagactgcaaccacctgaaaatatcttagagaaattctcggttatattgactttacagagttaattagatcttagtctaccacccggtccactcgggcttctataccaaaacaccttagacagggacagtgtaattataaaggactaaaatttgttaattatagttcacgaagctgagaagtccaagatcaagtcaccaacagattctggtgtctagtgagggctgctctctgtttctaagatggcaccctgttgctgcattctcacatggcggaaggcagaaggtcaacagggacccaaccgagcccttttaaaaggtcaccaatccaattcatgagaatggtgccttcatgacttaatcacatcctaaaggccccatatctgaatactgtcaaaatgggtcttagtttccaacaaatgaatttgggggcacacatacctttaaaccatggctcctactaagcacatttctgttaaatcatactgcctgaattctttccccgttattgcaagtcacaagcagaagataatttactcgcaaaattattttttttgcaaatctatttcagtttttatgaataaagacagattcactcaaataattcacataaatgtatttgtaaacgttatacctgaggaggaaatgaatataaaaaaaaaaagttgattgatttaagggcactgaaactgctcatcaattatttaacaagtacatacggagcttctacactgggccagtagttacgctaggtacgatggtctcaataagcaacaaaaattattttctacaagatgcttaaggtcaattatacatatggaatgtttgattataggatccagagtactatggagaggggtagtagggacactgaactcagttttaatggtcaggaaattaggggaagtaacttttaaactaagaaagtttgctggacaaaaggcaagtgagattatttcaggcaaaggaaagaacataaacagaagtcacctcaggggtctgaaatgtggctaggccactggttttgtgttccttcgtgagtgaaagacatgcagggggtaggacatctaaagagtggttagatcatacagtgccttagccacattaagaagttcaggttggggccagacatggtggttgacaccagtaatcccaccactttgagaggctgaggtgggaggaggtaggaaagatcaagtgtcctttcctacacatagttctctctcagtctctaggaatcaggtggtggacttctctaaagctgcacttttttttttttttttcccaagcagcatggcttgcctgattgttctctaggaactagtctagccttttcagatgagaaagttactttgtctacacagaagttttctcatggtgatttggtatctccctcatcaccaaaacctggatacatggtagatggcctaaaattgttgaattatctatctttcaaatttacagtgtgaatcgatttacgtttcaggtcctgaaagctatcaaaataaccaaagtccatttatctgaggagatggtattaataattagttgtgtaagtaaaaaagtcaataaaagatgaagcatatctgtaaaaaagatgaatatatttaaaataaattaagggtgaattttaaaaaaaagtta

SEQ ID NO: 112811 - DNA, 337 bp, Homo sapiens
acgatgccactttggaggcgatgtctgcattaggtgaccctgttctcttggctccaactaattataccaagggtcacatgtctcagattccctttctcaaaaacacaaagaaaataaaatgtcatcagatggctggggaaggtggagctggctacaagatcagagtttgcccaaaggcaagtcagtgttgctggagcctgtcagatgaatccagtctgcaaaaaaacaagaaagaagcagatgttcagggagaagaggagataagagactgtgaaagcccagagaagtgatggagaaaaaatatctgatgacattccagatttggaaagtccagaac

SEQ ID NO: 112812 - DNA, 808 bp, Homo sapiens
  misc_feature (44)..(46): n is a, c, g, or t
  misc_feature (49)..(49): n is a, c, g, or t
  misc_feature (53)..(53): n is a, c, g, or t
  misc_feature (76)..(76): n is a, c, g, or t
  misc_feature (83)..(83): n is a, c, g, or t
tggccctcagctttgccaacacatggcctgccgtctcctcagcnnnggntgcngaaatcgaagccataaaactggntgagcanaagcacagggaggagcggaggcggagggccacggtggtggtgggggacctgcaccctctcagggatgccctgcccgagctgctggggctcgaggctggcagccggcgccaagcccgcagcagggagagcaacaagccccggccctcagagctcagccggatgagcgcagcccagagacagcagcttctcgaggaagaaaggacccggtttcaggagctgctggccagtccggcctacagagccagccccctggtggccatcgggcagacgctggcccggcagatgcagctggaagatggcggccagctctgaccagggcagcgggcatgccacaactcctcaggacacatgtgggccaagtagagagcgccggcccctcaaggaccatggcctgagcctggtggacgcccttccctctggtcggttgtggggctcaataaatggctctgtgaacttcccctgcactgccagggccgttcccatgagctgcttccctgattcacagggctgggcacaccctgggacagctgcccccactctcctcaggacaacaagccacatccctccactgggggccccagcccccacgcagtcagggtggaccgtgcacagggtttgtggggactgcagttgtggaggccccaagtccgtccctgagcaggcgctggtgcccacaagatagtctgctggctgtgttgggaaggaattgtgcctgggtgtggccc

SEQ ID NO: 112813 - DNA, 737 bp, Homo sapiens
  misc_feature (44)..(46): n is a, c, g, or t
  misc_feature (49)..(49): n is a, c, g, or t
  misc_feature (53)..(53): n is a, c, g, or t
  misc_feature (76)..(76): n is a, c, g, or t
  misc_feature (83)..(83): n is a, c, g, or t
tggccctcagctttgccaacacatggcctgccgtctcctcagcnnnggntgcngaaatcgaagccataaaactggntgagcanaagcacagggaggagcggaggcggagggccacggtggtggtgggggacctgcaccctctcagggatgccctgcccgagctgctggggctcgaggctggcagccggcgccaagcccgccgaggaagaaaggacccggtttcaggagctgctggccagtccggcctacagagccagccccctggtggccatcgggcagacgctggcccggcagatgcagctggaagatggcggccagctctgaccagggcagcgggcatgccacaactcctcaggacacatgtgggccaagtagagagcgccggcccctcaaggaccatggcctgagcctggtggacgcccttccctctggtcggttgtggggctcaataaatggctctgtgaacttcccctgcactgccagggccgttcccatgagctgcttccctgattcacagggctgggcacaccctgggacagctgcccccactctcctcaggacaacaagccacatccctccactgggggccccagcccccacgcagtcagggtggaccgtgcacagggtttgtggggactgcagttgtggaggccccaagtccgtccctgagcaggcgctggtgcccacaagatagtctgctggctgtgttgggaaggaattgtgcctgggtgtggccc

SEQ ID NO: 112814 - DNA, 421 bp, Homo sapiens
gaaaataataaaagtggtatttggatgagataattttcctttaaatttattcctcagaatgatgtaaattttccagctggaaggtcatctttctatacatgcatgcatctatacaaatggttaaacagttactctctcaatttgctgagataggaaaggtggatataaatataagcaagggtctgattaaaacaaaacaaaacaaacaaaagacaagagaagcactgcattgttggccagaaattccttttaagtcagacttaagtccacggaaagctggacctaagcagtgaaggatgtaagggaacagagagagactctgcttggccgagtttgctattctcatttgtctatgtcaatacggctacataaagttcacaactatttgcacatagctataaatatagcatgaataaaacac

SEQ ID NO: 112815 - DNA, 472 bp, Homo sapiens
aaagagggggctctgtgcccggcatgtctctgaagactgattgaacctatgcaccagttgttgctttaagtcgctttattttctgtctttggtgtctctggatgtaggagccccctgctttctctgtccgcagaactccatactgggtcccctacgtgttcctccttccctaggacagcaacaaaaacacacaattttccctctctagcaggtctctaagtctcctgattcctgaaactgcctcagactccccctagagggagggaggcccctgaggctttcttgccatcatagcctcttctgggcctcagtttcccctctgtaacctgatcctagtacttggataaactccgacgaggtgtggggggttgttgtctgtgacctccctgaaatatcttagacatttggggtactgagcatttatctggggttaaataaaatctttacatcttaagacattcgattgaccaaa

SEQ ID NO: 112816 - DNA, 990 bp, Homo sapiens
tgttcctgccaggaaaacatgtagaaccacttaactcagactagaggatcaagatcccttcctggaagaagagagctaatttttgaaaaacaaataagactaagccaggcaattaagaatccagacgctgcactcagcaaaagaaatgacataaaccaaggtgcagagagtggagaaggcaggaattcatctaggtcactgaggttcaatgacccagtacaaggtgagggctgttaagggatggggcaggagaggttggcagaggccacaacacacgggccttatatgagcaatgccatactaaggagcttggactcattcctgtagacagtggggaaccattaatacttttaaaataataccactcttctccttgttttatacacatgacagataaaatcacccaaagccagttcatctggacaaacactaccctttggcatatttccatgtgtgtacatgcatccattgatgatttttaaacagagaagtgacataattgggtcttcattttagagagattactgtacctcaatggttttcaaccaacggtgattttgttacccaaaggacatttggcaacatttgaaaacatttttgggtcagatgtggtggccgcctgtaatctcaacactttgggaggctgaggcgggagactcacttgaggccaagagtttgaaattagcctggtcaacatagtcaggctgcacctctacaaaacattaaaaaattagccaggcatggtggtacacacttgtagtactagctacttaggaggctgaggcaggaggattgcttaagcccagaaggtcaagcttcagtgagctgtgattgtgccactgcactccagcctgggcaacagagcaagaccctatctcaataaaaagaaaacatttttggtttccacaactgaagaggggagggtgcaattgggatccagtgggtagaggccaggggtgctgctaaacatcctacaatgctcacaacaga

SEQ ID NO: 112817 - DNA, 296 bp, Homo sapiens
gataggtctggctccaatcatcacatcgtgctcttacttcattatgggccaagaactaaggcaaggaaatggctgctgctttgtttctccagcccaaatgtgtggggttttttcccagatctgaagcatgcgtggactaaaggcataaggaagaccaaaggatgtgtaatggcttcgctgtgatgaaatcaatctaccctacaacttaactatgaccccagcatgaataaggctctgtgtgtgaaaagtgaatgggtagcaatgtggggtcatggaaaatgctcctggcatcattt

SEQ ID NO: 112818 - DNA, 340 bp, Homo sapiens
tgtctcagcacattggtgttccacaggaatgcaaaggcgcgtctgccctttagtaagtctgtatccactgacacccatgctcctggtaaaatcggaacctctattaaagtagctgtaagttaattattattgagcaatgttttggcatagccactatagactgcctgctgaaaacctggaccaggactggatccgtaaggtctgccttcagccgcttttccttgtatcagttataattagatctctttaccactgataggcttaatggttaatcaacacaaatatggacttttccttaaacattccagaaaccttaataattatacttgaaaaaagtgtg

SEQ ID NO: 112819 - DNA, 94 bp, Homo sapiens
tttgttttaaatttttttattgatacataatagatgtacctattttggggagtacatatgataacttaatacattcatagaattcacaaagatc

SEQ ID NO: 112820 - DNA, 289 bp, Homo sapiens
catttcttacaagcaacaacaacaaaatgctcagaagctatactcagtagtctcagtgactgaaaaagtccggcttttaactgccatccaatccaaacaacccacttctttagaaagctatgcaaaatattgaccccttactgaattattttactattcaacattaaactatctaaaagagaaaagtaattaatcgctaagtttagttaagcaatttagctgacatagtaaatatttactcttcacatctcacaggaagtcttgacaagcatttgctgctattctgctg

SEQ ID NO: 112821 - DNA, 458 bp, Homo sapiens
ggtgacaaagtccacttttcttttccctctgctcttctcaagtggaaggagtctctccccaaagccaccactgctaggaatgtgctgcattacacctgataccagtatgtctgagtctcacccaaggcctgcagcataccacctgggtaccactgctggttcttcaaggcctaagagctctttagtcagtaggtaatggatcctgcctaaactgggtccttcccttcaaggtagtaggttcctttctggcccagagtatgtctagaaatttcatccaagggctaggtcccggaatgggagcctcacgactatgaccagtacgctatcatactgtggctgagctgctatccaagatgcaagacagttgtccttactcttccctctcttctcctcaagcagaaatcaagggtctcttttgaagatgcaagctatgctgcctggggttggtaggagggcat

SEQ ID NO: 112822 - DNA, 796 bp, Homo sapiens
gtggagctcaggcagtaatgtgagcaatggggaatggctgtaaatacagatgaagcttcactcacttgcctgccactcaaaacaggccacagaccagtaccgtgtagaagtaccaatctgtagcctgggggttgaggaccgcagctataaaggacactcattctgctgtccgcacttctcccaataactaccaggaaagggtcacagtcagaatgaatttagccattcaccttcagtaccaatgcattgtcctaaagaggtaacagttccactggcttcaaatcttttgtatcatttgtgtcttccttccctctcttctcttcctctctcattcacacttttctcttctttctccccaatctctcaactcctttccttccttgcttccctgaccactaccttttcaacatctgtcttttgacctttccctttcccttctttattcctatccctgccaccatcctgtgtaaagtgctatcagttctactccattcttccctctacctctgcccttaaccctagttccaggtccaggtagttccttaccccaccctctggacaaggctgcttctgggctataatctcttttcaagatattttatcctacatgcagctgccaagttatttcccctacaacagcaatctattcataacacagccctgctcaaaaacctttaagggtttacatttcctatggagtaaaaaccaagtcgtaagcctcatgttccagagccaagacagtatggttctattcatcttttgcagcctgggcatgctctggttttctttagacatg

SEQ ID NO: 112823 - DNA, 589 bp, Homo sapiens
gtgtgtgtgcaggtgtggtgtacttggagctgtgtgtgtgcacaggtgtagtgggtgcactcagggccatgtgtgtgtgcagccatgtgcacaggtctggcgggggcactggggccatgtgtgcagtgtgtgtgcaggtatggtgggtgcgcttggccaccctcgtttctgtctcctctgggcccccaagcacgcttttgtgctgactggatctgctggcgaatgtgaggccggaaggagggcaaggacgtgaagcccatgtaaacagacctgtcatggccactgttgttgctgcttcagtgggagggatttgagcgggtctgtcctgtctgtgatgcccctaagagttctggaagagccaggagagcccctccggggccagttcgtgagcctggagccccccatgtgggcccagggaggccgcctgggtctgggtctggatccttcttgggggaaggttcaggtctgtgccatgcagcttctggctcaggtgggtccgctctgggcaggaagctgcccaggtgcgagggggatggacactggagcttcgtcccatggcaagctcatttccttccatttctacactgaa

SEQ ID NO: 112824 - DNA, 205 bp, Homo sapiens
gctgctgatgactcgtagaggatccccccggctctgatctttggtatgaacacaatatgccacttaatatttccacaaaggaaaagtaaggctcgtcagtatgttaaaagaccagctcaagagcaaggcaaattctctccacctcgaaatctactttcccctgaaagatctctgttctgtggcaaaaaccgagggtttgaagagt

SEQ ID NO: 112825 - DNA, 799 bp, Homo sapiens
cagagatgatgggacaacctgcctaaagagaggagcttcccactgtagggcctcctttctgctgagagctgaagagatgatgggacaatctgcctgcagagaggagccacccattctagtctaggacctctctgctgagagctgcagacagcaggacaaccagctgcagagaggagctgccctctctgctgatagctgaacacctgttgggatgaccagctgcagagaggagccactctcactgctgagaaaatacttgctggggtgacctgcctgcataaaggagctaccctctctgctaggagctgaacactcatcaggatacccttgctacagagaagagctgtccactgtgggtctttgagctgttctattgctcagtaaagttcctctttgtcttgctcaccctccatttgttgtctgaggacctcattcttcctggtcacagaacaagaacttgggacccttgaatggtgagggtaaaagagctctaacacaagcagagctgaaacatgccccttgctcaccatgttgcaggtgaaggaagggagataagagctgtggcccttctgggagcccagacctgggagctccccaagctagggctgtgactccttctttggggccctgtggttcctggcatcttcaagcttctgagtgccactccattccccggtgccggccggggaagctgtttgtggtgcaactggtccagccacagcctcgcagagagctggcacttatgccagcacctggagctgcccaccctgtggcagcagctgacatgtctgactgggca

SEQ ID NO: 112826 - DNA, 329 bp, Homo sapiens
cagacagaagggcttccaaatcagatccctaaccaagaactccaagagtatcccttccaaactatcctcctgttctctgtctgagaaatctccccaaaatcttcctgattgagaagtctcccaaaccaagactcttcctactaattagagagagccaaccgagaatctcaaatgaaccaaactgagaaagatgcccctcagtggggctacagaccgacaccccaccatggggcaacagaaaaaccaagaccccctccccaaaggaatcaaaccaatcgggaaaaggaaggaggcgttggccgtgcctaggatattcaccaatccagaca

SEQ ID NO: 112827 - DNA, 751 bp, Homo sapiens
gtgcacgctgatttcctccggctttagtgttgaagctgattggatccttggttttctgatcactgcacggggcacactggttacactctgtttacagtgcagacttcagagtgcatagctgagaccacatgtttttctcccagggaggggtcaaggtttggagcaggagctgccaggatccaagacggggtagaaaatgcatggtttcaggccacactgccctcctgccctcctgccttcctgagacccttccttcacttgtttttggtgggaaacagggtagggtggggtggtgggagacattgttagtgtgaaccagtaggagacagagtcctggtgagccggtgggagatggggccgggtgagccggtaggagatggcaccaggtgggatggtgggagatggtgttagtgagccagtaggagacagcgtctggcgggccagtgggagacagggtccggtgggcccatggaagactgggtctgggtgcgccggtgggagatggcgccgggtgagccagtaggatttataggggcagggcctgcagcgacgagctaagtgcaagctcactgtggattctgggcatcgtaatagggagatgtattttcaatgcttgtctgtagttcagattaatgcgttttcctaggctcacagcttaactcctggctctgcctcttatgttgtgatgtgaggaaaggagtccaatttccttcagcccaggtttcttcctctgtcaaacagggatcctcac

SEQ ID NO: 112828 - DNA, 446 bp, Homo sapiens
tgggtataaaatgtcaatcctgtataaattctttcagaaaactgaacagaatacttcagaaatcattctgaagctacattactgattccaacaccaaaacattacaagaaaactacaactatcccatgaacataagttcaaaaattctcaacaaaattttagcaaatcaaatccaacaaaatataattagaatagtatattgtgaccaagttcagtttatcccaggaatgtaagtctaatttcataattgaaaatcaatgtcattcaccacattggcagactaaaaatgaaaaaccacctatttcaatatatgcagtaaaaaagcatttgaaaaatatccaacatccaaccctgataaaacctctcagcaaatgagaaatcaaagagaacttccacaacgtgataaaaagcacctacaaaaaacctacagctaagatcagacttaa

SEQ ID NO: 112829 - DNA, 535 bp, Homo sapiens
atgttactaagcaaaagaagctaatatgaaaagccacatattgtaggattccaactataaaacattctggaaaaggcaaaactatggagacaataaaaagatcagtggttgccagagattatgagcaatgaaggaatgagtagatgaagcataaaaaatgttttatggcagtgaaattattctgtacattataataatggatacatgttattgtacatttgtcagagcccataaatttatatattgtgatacaatccattttacatttgtccaaaaccatggagtgtacaacaccaagagtgaaccttatgtaaattatggactttgggtgatcatgatgtgtcaatgtaggtccctaaaatgtaaaaaatgtgccattctggtgggggatattgataataagggagactgtgcatgtgtgaaggtaagggggatatgggaaatgtctatttcttctttgcaattttgctatgaaactaaaactcatctaaactcactaaagtctgtaaaataaaaatatgatggagaataacag

SEQ ID NO: 112830 - DNA, 171 bp, Homo sapiens
cacgacaaacgcatcataaaataataccactcttaaagatataaattatgtaattgctaataaatgttttttcttctgaataattttaccctagtaattttcttcaacctgacagggtttcatggagaattcgaaccatgagtatatgcaaatgataaggtcaggattcat

SEQ ID NO: 112831 - DNA, 776 bp, Homo sapiens
gggaaggaaagtacacttggaagaaggccaaacccagttttcatattttattttcgcattgagaatcagtcagatttacttcagcctcaaaagtgtgtttatgtaaaattaaatgagcactagcagcaagctgcactttttttttcccaaatgggaaacgggttaaatatgtgtaggaagtcctgggccatgccctccaagtgcccatgtgtgaaaacaaccaggatcaacacagcaaaagctctgagagctcaacggcaatgtggaatactctgaggtttcaaactggcctccagggctgggtgcggtggctcatgcctgtaatcccaacactgtgggaggccgagatgggaggaacacttgagcccaggagttcaagatcagcctgggcaacagagtgagaccttgtctctactaaatataaaaaattagctgggcgtggtagtgtgtacctctggtcccagctactcaagaggctgaggaggaggagtgattgagtctgggagattacagctgcagtgagctatgactgggccattgcactccagccagggcaacagagcaagaccctgtctccaaacaacaacaaaaacaaaaacaaattggcctctgggttgcacaaaggtgggggaggccagaggagctctgcaaaaactttgaaaactaaattgatcttagaaccagagccctgctggccacagaaagtgcatcctgaatctaaacaggttgagtgcctgctaatacagaatatttaaacaggaactacagtctcataa

SEQ ID NO: 112832 - DNA, 173 bp, Homo sapiens
ggtgggcacccaaatggcatttactgaatgaatgaattttgggaaatccttttagcctggtgcatgggctctgtatttagttttatctgatttttatttattttatttagtttccagcccaaatttaacgtctagttatccatggctgtgtaagaaccccccatccccaccaa

SEQ ID NO: 112833 - DNA, 237 bp, Homo sapiens
tggtgtttcctactggagaggactcagggtggatgatctggctagactggaaaaagagttgccctgttggaggacagtgagagagacagcaagacctaggctgggtgtggtggctcacacctataatcccagtactttgggaggtcaaggtgggaggattgcttgaggccagcctgggcatcacagtctctacaaaaaaataaaaaactagccaagtgtaggggtgtagtcccagct

SEQ ID NO: 112834 - DNA, 327 bp, Homo sapiens
aaaatgctacaggaagcaggaacaaagttaatgaaaatataaatgcacttttctcctcgtcttccataaccactcactgattagaggcacagtccatttgagatgaggctgctgcctgtgtgtgtgggagggttgaatattttttgctctgggaggagcaactgtgatagccccaaatccctgacagcctctcttcatagactgcaggtctagtgtgcaggtgatagtgctaaactcccagtccaagggagtctaaaggaggaagccgtgaagaaaaaggaaagtgaaacagtggactaggacagaaggacattactattaatacta

SEQ ID NO: 112835 - DNA, 804 bp, Homo sapiens
catttgccagggtgctctctgggccactttacctgcctgattaattacccctgtactctgggtgatactgaaaataaaatgagacaactggtttggcatcaatacaataaaaaatagatgctgttcgtaaaacgaacagacaaaaacccaccctagctgtacttgtgagtactcactgaatatcacccctacctgttttgtttcactaagtagtggactcatcttttgtcacagacctagtggaagatagtgagtgggaaaaatatgttgatgctttacatgtgatttccattggcagctatcattgttagattttctttctccatatacaagttatggagaattcagatatgtttccagacttcttcaacatgcctttctagaataagaagggtttcatgcttttaaagtacaaaagaaaaagtgactcattctgtcaccatgtacaagaattgataagtatcacatttaggtctttttggaatgttttcatagaatttaaagaaaacagcatgattcaataagcagagaacctaaataagcagagaactttccattttgttttaaccatacacttgaagggaaatcacttaattgttcagtttcccccaccagcaaaatgcaagccctatcacctaaaatatttggattggacagttgattattttaccctgtagttccatgggcagtaagtgggggagcttagggtttttattccatgtgtgctctgcagccagcattcgttgagtggtgcagtatggaaagggcacaaggctgctcctgctactagcttatcaaaaggtg

SEQ ID NO: 112836 - DNA, 416 bp, Homo sapiens
gggcgaatctataagaatcccgggttgatatacgtgggaaacaatagcaactcaataaatgcagggccactgagtatttggagtgtttatttgtaggactgaggtaaccctagtcggtaaaaacaaacaaaaaacctcatgagtcaaggtgctgtgggagaaggacacaaggagggtagatttgggtctcactgaaggagggtcttagcatctgtatggggagttcgtccctctccctgacacattattttgtctctgccactctccatgaagggctctggaggtggagaagatgaccatttttctccttgtgggactataatgagatcgccatcatctcaggaggagacaccgtggttgatgggaaatgagttttcctgtgttggtatttttccaactaaaggaagaataagttg

SEQ ID NO: 112837 - DNA, 278 bp, Homo sapiens
atccgccagccttggcctcccaaagtgctgggattgcaggcgtgagccaatgtgcctggccggaatgatggacatttctaaaatgtatcattaggccacccttcacctaaattctccaaaggcttcaactcacctccaggaacggagtcactcactcattcatttattcattcgtttgccaccttcaggaggctcaaggagtaacaatttcaatttcatcccttccctcttctctgctttagttttcccaacaggatttaacaccatctgacatcctg

SEQ ID NO: 112838 - DNA, 436 bp, Homo sapiens
gcttagagagaaagttaaggcaatttaagagtctactgtccaagggatttatctcccagaagcgcatggaaaacatcacaacactacctctataaattggactcatggcaggattccaaggaattcagtatgccatcaacattaagcaatataatcagaactaaactcaacaaaatttttctttcagtgataatcctaatttttggtaaattatcggggaacctgcccccaataattcaaagtgagtccttttctattttccctaagtgtcggctggtctgagaaataaagggaaagagtacaaaagagagaaattttaaagctgggtgtctggggagacatcacatgcccaagccgcaaaaccagcaagtttttattagtgattttcaaaaggggagggagtgtacgaatagggtatgagtcacagagatcacat

SEQ ID NO: 112839 - DNA, 684 bp, Homo sapiens
gctctgtctaaacatcattccaacctttgcaaatcttatagactacccatccatgaaaaacgctttgataccaagaattaaaaatgcttgtctacaaacatcttcccttgcggttcgtgtaaattcattagtgtgcttaggaaagattttggaatacttggataagtggtttgtacttgatgatatcctacccttcttacaacaaattccatccaaggaacctgcggtcctcatgggaattttaggtatttacaaatgtacttttactcataagaagttgggaatcaccaaagagcagctggccggaaaagtgttgcctcatcttattcccctgagtattgaaaacaatcttaatcttaatcagtagtttagcatggatgtggtctgccttcccatttgtttcatgttcaattctttcatttccgtcatataagaaatgcttaatagattggagtctgaacataagactaaactggagcaacttcatataatgcaagaacagcagaaatctttggatataggaaatcaaatgaatgtttctgaggagatgaaagttacaaatattgggaatcagcaaattgacaaagtttttaacaacattggagcagaccttctgactggcagtgagtccgaaaataaagaggacgggttacagaataaacataaaagagtgagtttccttac

SEQ ID NO: 112840 - DNA, 781 bp, Homo sapiens
gataggaaaagaaggctgctattcttttatcatacttttaaaaatcttataaatatataaagactgatttcgacatgtatttgttacagaatctaaatatattacatgcataaatcagaatggaaagttctttcatcacttacaattagtgtgacaattttttaagggcagaagaaaactattttaatatgttttcatgtttaattcaggaagtggaagtctcattccataaagtaacatttttggtgatagttgagttttgtatgctctaaatataagtccttcctattttagggatctgtcaataagttgaaagtgaatttcgaattttgatgttaatttctgcatttttttcctccctttgaagaggagactctacctttccatatcattcttgaataataccattctcaaggtgctgtagaagtacagagacgaagggcagaatactgaatgcataacagaataactctaggtcgacagatcaaatatccctccaaaaatgtgtttaaacaaactttcagtataataaaaagatttaaaagctccagacaatccctacttaaaaaaatcaaatgtaacacaacataccagaagaatctgggaaagttttggaccctgttacgacagtttaatgtagatattaaagagtcctggagagagtacttactgccccatggacaactataataaaagattcccctacatgcacacacacacgcacatacacacatatatgatatgggctaattaatggcaccgattttcagcgctaatcaca

SEQ ID NO: 112841 - DNA, 678 bp, Homo sapiens
aaacacaccctcactcctttcctatagcggagctctgtcccctgcagcactccagggagtgtgttgggaaaccactctgagatccagtgccacccacctcttcactggcatctgtccccacctccacaacctgtgcatccctccacctcagaaccgcccttagggcccgcccccgcccccatcaggtcacactgtttcccaatccaagtccttgttccctttgctcatccattgaggttcatcccagggagaaccattctcttcccacaaaaccttgcgtgatcttggtgtccactgtgccaccaaattgcactggatggccctcctgtgacccctccttcccaggacgtgttagatgaagctcctgattcgatggtcagtttctccagcaccgtgagctccccgaggataggcactgtctgtgctcctccagtgcccggcacgcagaaaccattctatttactcgatgaaggacgtgcccatccagaacccccagtaagagcttcaggacgtaggacgggaggcagctcctttttcgaggaggctggaggccttgtgtgggagggggagctgtactttcctgggttagcagtgacctgtgactctccccttcccactgtgggtcctgcctcttatgcaggcccctcagcgttggtgccaggcccttgttatcccact

SEQ ID NO: 112842 - DNA, 390 bp, Homo sapiens
attgttaatttgtggtgtatcttgtcctttgggatcttcttcatatgtgttaacatatattgctttttcccccaaagtgccatcatttttcacttatattttgtaacctacttttctgactaatattacttggatatattccacagacagtacatacagagctactctataatgtttaatgctgcatagaattacattgtatggatgaattgttatttagttaacctgacgatggacttttgggttgtttctgttattaatagctatgtgggccaaagcaggaggattgcttgaggctaagagtttgagaccagcctgggcaacgtagtgagatgctatttctagaaaaaagtaaaaaattagctggtgtggtgctacatgcctgtagtc

SEQ ID NO: 112843 - DNA, 818 bp, Homo sapiens
atttattttctttgcttttctttttttttgagacagagtctcactctgtcgcccaggctggagtgcaatggcgcatctcggctcactgcaacctccgcctcctgggttcaagtgattctcctgcctcagcctcccaagtagctgggaatacaggcaagcaccaccacgcccagctaatttttatatttttaggtagagacagggtttcctcatgttggccaggctggtctcgaactcctgacctcaagtgatccgcccgccttggccttccaaagtgctgggattacaggcatgagccactgtgcctggcctgattacttgaaattcatgagtattgatttaaaatgcttctgacagccaggatttgtctgtccatctattcattcagttattcacttaacattttttgaatctctatagttgtgccagaacttgtataagcaccacaaaatgcaaagaggtataagataatgcccctgcttgcaataagctcacattctaacattcaaaatgactagcacatagtagatgttcaataaacatttgttgactaaattcagtgaaagagttgatgaatgagagacagccatatcaatgaatcataaaaatctgacagggatatgttcaagccagaggagattatggaagcttggaggaggattacctgaccacctagtctgagggaatcaaagcttgtagaagagataacgcataataggagtcttaaagaataggagcttaaagaattagaacagtgtgagcaaaaataggtaagcactagaaacagcagtcaggcataaggcaaaacaaaatgaaac

SEQ ID NO: 112844 - DNA, 422 bp, Homo sapiens
attgaggcttttttgtggcctatggtctggtttatgtttaatgtacacttgagtagaatgtgtattgtgctgttgttgagtggggtgttctgtaaatgtctgttaggtttttagtgtctgctgatcaagtttttctaactcctcgttgatcttctgcctcgctctcctgtctgttaggagcctggccctgccaacaccttgattctggacttccagcctcccaaactgagacagttaatttcagtgtgaaaccaccccatttcttctgttacaaccaccctgacacaggctgattgagcttaacctactgtggaaataagtggcaacctcagatagtgcttgaaggaggcggaacagattggccattttgtgtgagtgcatgtgtgcgtgtgtgtgcgtgtgtgtgtgtgagtgcatgtgtg

SEQ ID NO: 112845 - DNA, 810 bp, Homo sapiens
agtggtggtgggtgcctgtaatctcagctactcgggaggctgaggcaggagaatcgcttgaacctgggaggcagaggttgcagtgagccgagatggagccactgcactgcagcctgggtgacaagagcgaaactctgtctcaaaatattaggaaaaaaaaagagagagagcctcttttccatctccccgccacagagttgtcttcagtaatttcattcccttttttcctgaggattcactgggtttctgggtcccagaggggaagttctcttcaaggtacagaaaccacgactccgcagagaaccgcagagaaccgcagagatggcagcatgaccagaccacggacaggtgtgtagaagctgctgggctgaaacttgggctgaacttccgctgcaggttgacttattcccatcagcaccaaagccgctggagggggtcatccactagcaaatgaagtgggggcacggattggaggctgtttcagaaggtcccactgagccacggactcaaggcctggccacagccctcccaagcgaggcccagatcatatttcaccacgctcagaaaaccttgccagctcatttcagtccacagtgactttgctttctttaggatctctcttgcactgtccaactcagagaatttcaaatctgaatggattccaatgatggagctaaatcaggcctcacctcagttttttaattacaatcaatagggctgggtcccagcatctgtgtcttaatgttcctccatgtgatcctcatgctgaaaggctggtatttgaaaatccctttttttggggagtgaagg

SEQ ID NO: 112846 - DNA, 365 bp, Homo sapiens
agtctcagcatcaccgtgaaccactggcacatgaagagccctcttgcctcagcattccatgaccatttggtgcagttactgcattagccacttttatcattctcccatagatgaacatatgccatttaaaaaaaacagcttttttgagataccattcacatagcatacaatcatccacttaaagtgcaccattcagcccgggtgaggtggctcacgcctgtaatcccagcactttgggaggccgaggcgggcggatcacgaggtcaggagatcgagaccatcctggctaacatggtgaaaccccgtctttactaaaaatacaaaaaattagccgagcatggtggcaggcgcctgtagtcccagct

SEQ ID NO: 112847 - DNA, 339 bp, Homo sapiens
taaaaagatttttttaagttgttttattccaaatggttagtcttcactacttcaactgaaatgtttttgtgcaaatgatattttataaaggtatttcagtagtttaacttatcttttaggtttatttgaaaatgtatatcacctttaaagatgcttggtagaatgcctatttcaaaaacaagcattctttgtggatttggcctatagtggagggaaaggggaaaaaacagaacttctaaacaccttaaatattaaacatattaaatctgtttctggaggagttccactttcagtaatgttagctaaagtaatttggattgatgctctaaaaaatgagaa

SEQ ID NO: 112848 - DNA, 403 bp, Homo sapiens
gcagtcagtcatcattaaaatctactcttcccatcttctgcagcaaaaattcatacttgccttcttgtacatatggctgctcagttactggcttcttttcccaaccaccatgcagctatgtttcactttgtgcatagtacgcaatgcaagcaaaaaagacaatgtgcctcttaagagattttggccttaaaacatggaatgcctgctttctcatgtttttttcacctgtctgagaactggaacatagatgatgcttgatgatgtgttggaagaactacaagatggaaggaaatggggtctctgaatgatagtgagaagtaaaaccactcagctggcttggactgctcactcatgactgttacatgggataaaaataaacatctatgttttttaagacactata

SEQ ID NO: 112849 - DNA, 450 bp, Homo sapiens
attccctgcattgaatgcctgtctgttgacattgtctgtaaaaattgtgggaagttttctgcaccctgaaatttctgttatgcggattaaatatccactatccatgtttttccaagtcttacagtagaaaggggtaaatgcagcccgtcacagcagcctgttgttcgtcctgcaaatgtgtttccatcacattacacaaagcctctttgtcttcgtggttctaccctactaataagtttttaaaaaaattatgtaatgtgtgtatatacaaatacctatatgtatgtgtgtacacatacagctgatatctgctgagattatgtatgcatgaactatagaattaacttgtaattttaagaaaataaattattttgtaaagataaatctcatgtttaagaagaggaattacagttgaatcatttagggatgcctcagcctaaacataatatg

SEQ ID NO: 112850 - DNA, 383 bp, Homo sapiens
ttgagatggagtcttgctttgtggcccaggctggagtgcggtggcgcgatctcggctcactgcagcctctacctcctgggttcacgccattctcctgcctcagcctcctgagtagctgggactacaggtgcccgcgaccacgcctggctacttttttgtatttttagtagagatggggtttcaccgtgttagccaggatggtctcgatctcctgacctcgtgatccgcccatctcggcctcccaaagtgctgggattacaggcgtgagccaccgcgcccggcctgaaatcctatatatgaaaaaaatccaaaccaagctgaacaaacaagttaacatttttattaaaataatgtagtaatatgtatactcagttttactcagg

SEQ ID NO: 112851 - DNA, 233 bp, Homo sapiens
gttagcgtgacatgagagtatggaatgcggtgttggttctgagcggtcgtgactcagagtcgctgctggtaaaccctagagaatcaagagaacaaaaacaacactagcaataaaacctatcgaaaatgctaagtttgagatgccgagaacaccctggcagagtcaatggcatcaagagagatatgtgcactggaagtgagggattcacggccatcggtgggtcagaacataag

SEQ ID NO: 112852 - DNA, 565 bp, Homo sapiens
ccaggaaaacagagttttctctgaagctctgcctcgtagacttctaaccactagcattgccacacctggatctcgtggccatccctagctgcaagggcccccagcaatgtgaccgtcttagtggggcacatggccacctcagtagagtcaggcagctgacagataccaggtaggcagagagcattgtctccaaagctaggtagggtttggatgcatggaaaagatttgggaaaatggcattcagattgggagaatagcataagcagaggcacagaggtgggagagttcagggtacaagggagggccaagactgtcacaaataactttaatcctcttcacactggtgtaagcaaaaaggagaatgtttcagtggggctcgcttcaggtgcagctggatccagggcttctaaaacccatcaggactctgcttcatcctctcagctctctttgctctttctgttagggacaggatggtccccagcagctcctgatagacttccctctagcttcacatccctcaagaagagagcacctctttcccacggctctaacaggaatccagggc

SEQ ID NO: 112853 - DNA, 465 bp, Homo sapiens
gggaggcctctgggagaagaatgaaagggcaggctgttcaggaacctgaaggcagcctggatacctcagcatgggtgttgttagggaggcgctcctcagaactgccaggataggcactggacaagttatgacaaccaggtggcccccagcaaggggcctcccttctctgatcctcagtctacccctggacaacaggcctggcaatctacttcacagcatcaggcggagctgatgaaacggccccaagcccggggttaggcacacagtcttcgctcagtagagtaggtattattgttatcattgttattattgaaagtgcttaagggcctgggatctggagccgcacagtctgagttcaaatcctggctcttgacagctcggtgtggtgacccaagcctgtaatcccagcactttgggaggccaaggtaggaggaccacctgaggtcaggagttgaagaccagcct

SEQ ID NO: 112854 - DNA, 222 bp, Homo sapiens
tgggcaccggggcaggggtgaggcagcaggtgagaggctggcgcctggcttgaatagactgctcagagccacagccagtggctcctctgttttatgggtggttttaatgcacagatgggttggttttaaaggggctctaaatcatggcacagtgagagcccccacaccccagagccccctaggaggctgtatctgtgagtgactgtggtatgggcacaagtg

SEQ ID NO: 112855 - DNA, 396 bp, Homo sapiens
accagaggatcccggtctagcctcgccaagtgaattacatgccagagagaattcaaatctctgtcagcctgccttgtgaattacatgccagggagaattcaaatctctctcagcatgagaacaccagtggggttggctggaggccccgcttgggaggtccctcactgggcaggacctcaagacctccacactagggagaattcaaatctctgtcagccccagaacactggcgggggtggctgcaggcccccgttgggaggtccctcactgggcaggaccccgatacctcgatgccagggagaattgaaatctctgtcagccccagaatattggcgggggtggggggagttggctggaggcctgagttggaaggaccctcactgggcaggaaccgga

SEQ ID NO: 112856 - DNA, 203 bp, Homo sapiens
tacattaatagaagcttaacactcaaagttttaatttttattttttgctgttgttgaactgaactgttagactgaacaccaggtatgttgaattttaacattaccatttatttcctagtagtttactcattttgtttgccagcagatgacatcttgttagccaacaagtagcagcagatgtcaaagtttagaaaataatattt

SEQ ID NO: 112857 - DNA, 690 bp, Homo sapiens
tttagatgtttccttgattaaagatggctggtttttttttttcatgtgttgggtaaaggatatgtttaatgtttacagattaaattggtagacttaattcaaactaacaataatgtagcttatggttcatggaagcatatcatttttagtgaataatttttactaggttacaagtattctgatggttagcatggtaggataaagaaaaacaattctaatagtagtgagagcagaattctacgaggtgatcagttaatgctcagggcattgaggataggttaggctttagtaatacagtgttaaagacctaaaaacataaaatatggcataggattaaagttaagtaagatgagagactttgtctatctggtattatcttctagttaaccagatcagaattgaaattttttctctcttgatacataaatgagagaaacattcctccttcgttaacatccaatttattatagatacagtaactgtttttgtgaatcaaggtttggtttacaccaaattttagtttaaggatatttatgttcatttatgaatagtgaaaaatcttgaggccgggtgcagtggctcacggctgtaatcccagtactttgggaggctgaggcaggcagatcacttgagatcaggagttcgagaacctggccaacatggtgaaactcccgtctctactaaaagtac

SEQ ID NO: 112858 - DNA, 340 bp, Homo sapiens
atagaactgagagatgaaataggcaattcaatatttagaagagttggagattttaatactcttctctcaacagttgataggataagtaaacagaaaacaggatacagaagacaggaataaagcaatcagccaactcaatctaattgacatctgcagaatacccaacaacagtagaaaacacattattctaaagtgcattggtaacattagccagggtgaatagtatactggcccacaaaaatgaaatgttttaataaatatggaagaattgaaattatatggtatgttttgcaactacaaaggaattaaaaatcatggagagaaataaggaagaaataag

SEQ ID NO: 112859 - DNA, 125 bp, Homo sapiens
gcagaaggggaaaagatttgttaatcttctacccatactgggcctcccagaggttttcttcctgctttaagcagtcatgagaggttcagcttttgcaactaagtatcctgactggtagtgctgct

SEQ ID NO: 112860 - DNA, 325 bp, Homo sapiens
ggtcgaccatgaatcttaactggaaagagaacagtaaaagatatttggggtgaaaattggaacaactaaaatatcaccatatgttagattatattgtggtattatggttaactttttatggtgttataatggtatataggaaatatttttatttttagaagattcatgtactgcattctgagtaggtttctttcatccatttgaatctagaacatttcccttgcctcctttcccccttaattttgctattaatgacactgacttttgatgtgagtccaggttagtcatagattgtctcacatttgggatttgtctgattgtttcc

SEQ ID NO: 112861 - DNA, 207 bp, Homo sapiens
tttaatctttttttttacctttaaactttttattttgaaatagttttagacatacagaggagttataaactcagcacagagttcctatatataccacattcagctatccctaatgttagcatcttataaatacacagcacaatggccaaaactatgaaaccaacattggtaacacactattaacaaaatgcagactttgttcagatc

SEQ ID NO: 112862 - DNA, 635 bp, Homo sapiens
gacggggttttgccacgttggtcaggctggtctcgaactcctgacctcaggtgattcacccaccttgaccttccaaagtgctgggattgcaggcttgagccactgcccccagccagaagtaattacttttaaaactatataaagacactaccgaaggcaagacatgaattctagatgagcaactactggaaggagggacaaaaagcatttcctagaggccagacactcagacatctcatccccacagtagctctcatctcaggaaacagctttgtcttcaggggaggagaaataccaggggcagggcactactgaaattcaggtctgtccagcttcaaaactcatgctcttgaccccctccgtacttctgtttcaggatgtaactgctctggcccaaagttttctcatctgtaaaatgtgggtaataataactttccccttacaattgtcgtgaaaagtaagtaactcctaaaaattgtcttgctcagtgccagacccagagttagtgcttcatatgcagtagctatttcatttgtattaaactatactgtcatggtttggcatacataaaaagaaaaaacagcacacatcatactgttttgaagactcagtaaatgacaacagccagaatattt

SEQ ID NO: 112863 - DNA, 214 bp, Homo sapiens
ataaggcaggttggacaagtttgctagagtctgtgtgacatttaaatatcttcgttaacccagctgtttaaggtatatgctcattgcttttcagaaattttgaattttaaaaatatctgaaaatggttgagtgctgaaagttaacagtgcaggcagttatcattgagaacacctgactttcacacattttaacaccactaacattggctagtcc

SEQ ID NO: 112864 - DNA, 185 bp, Homo sapiens
ttcgagaggctgaggtggaaggattgcttgagctagggagtttgaggctgccatgagctatgatcgcgcctctgcacaccagcctgggttacggagtgagactgtctcaataaataaataaaactgtcacagtaatttttttgtggtaaaatatatgtaacacagaatttaccattttaatcatt

SEQ ID NO: 112865 - DNA, 365 bp, Homo sapiens
gaagaaagcaaatatcaaagttgcttctaaacatcactgattttgctagctctatcacttcatttttttctatcaagtttttaagataaccttgtgtgactcaggccattccttgtttgcacgttcaccatcaatacaagtcagccaagacgagtgtcgctagagcttccagtgtctttcacattctagccctcttcaaccacaaattataaaaacgtggctctgctcaagcacacgttttaaattaaacctttttgttttttacatgaattttttaggtctttttttcaggttattattttctgagacagtccaataaaaatttattttaaaatgtatttgtggtaatttgatgacagcctcaa

SEQ ID NO: 112866 - DNA, 287 bp, Homo sapiens
gagtaagagggcctacactttatcattttaatgctaagtagtaatggagtgggaataaagtatccaaattgagagataattaatagtcagttttggataattgtttactcaatcagcagataatgaaggagcataccagtttccttcccataggccagggaggatatgctggtggataataggacagggcttttgctctcccagagctctctaacgggataagcccgagataggctacactagttgaataggaaagataggatcttggtagaaagagactctatcga

SEQ ID NO: 112867 - DNA, 644 bp, Homo sapiens
ggggattctcctgatggaggtgctcgttctggctgtgaagcagctgttcccagagtttgagtttatgtggcttgtggatgaagccaagaagaacctgcctttggagctggatttcctcaatgaagggaggaatgctgagaaggtgtcccagatgctcaggcattttgacttcttgaaggtcccccgaatccactgggacctgtccacggagcgggtcctcctgatggagtttgcggatggcgggcaggtcaatgacagagactacatggagaggaacaagatcgacgtcaatgagatctcacgccacctgggcaagatgtatagtgagatgatcttcgtcaatggcttcgtgcactgcgatccccaccccggcaatgtactggtgcggaagcaccccggcacgggaaaggcggagattgtcctgttggaccatgggctttaccagatgctcacggaagaattccgcctgaattactgccacctctggcagtctctgatctggactgacatgaagagagtgaaggagtacagccagcgactgggagccggggatctctaccccttgtttgcctgcatgctgacggcgcgatcgtgggactcggtcaacagaggcatcagccaagctcccgtcactgccactgagg

SEQ ID NO: 112868 - DNA, 402 bp, Homo sapiens
catgtggaagggaaagatgggcgtataggctggcagacctgtccccgggttgcactgcctgggtggcatgtttttatgaggaaaaacaagagaggtcttgttaatttgtttgtttttattcctttctccttagcctctccactttcaaacagtgttgtttttccagaaaaattagttatgtggtaatggaaagaattactgtgtttggattaactagaggctgcccggaatgatgaggtacaaaagtgacaggctatggtatgatctcattgacagcattttctccagctcaactgcctttctacaaacaaacacatgtaggaaatggttcccagcagaagttcttagcaggtgtttgcagagctgttgaaaagttgttgcagtgattggtgctggaaggag

SEQ ID NO: 112869 - DNA, 716 bp, Homo sapiens
ggctagtctctgttccggagattctgatttgataggtcccaaatgagtcctgtattttttaaaagcttcgcaagtgcattaaactaccaacttatgagatgtgggcaagatacagtcaaaggcaagttcataattttgtaatatttcttcataaaagaagaatgaataaaaataaatgaaataggcaataaccttaaaaagttatgaagagaacaataaaagaaaatgtatagactgaaataaaaatgaagacgagtaaaattcagtaacttagagaactaaaaacaaatagaaggaaaaattcaatccaggaagcagctcttaaactaacaagacatgagcttctgataaatatatgaacaaaaatatatgccaagatatctgaaaatctggatgaaatagacaatttatgtgaaagcagttatgagcattgactcaaaaacttcagaaatatcagatatagtctattaactcaaatatttatcaagtacttactatatatcaggcactgacctaggcagagggtccagcactggacaaattaggcaaaaatctcagccattgtggcatttactttctgtgaacctaagtctgacagcccacatacagagggcaataacccaatcacatatattgggttggaaaaatgtaagcacaagaccaggaaactatattcaaaagtaccttagaatgactactcatccacactcattcca

SEQ ID NO: 112870 - DNA, 261 bp, Homo sapiens
catggatccaaggtttagcacagaggcgttgatgcacatcagtgtggctttccagaactccactttccctagccttgctttggggtgaagatgaggccctggggtgcctgcctcatagccacatccactgctccttgctgggcagcaaggagctcaggcaagcaggctgggtcctgaggtacgcgtggtaattcgtctgaaccgattaagggaatctctcctctttgcagatgaagagtagtgggatggggcatctttcct

SEQ ID NO: 112871 - DNA, 299 bp, Homo sapiens
tatcagtcaaatattactaaattaattattaggagcctcatttaacacattttataacatctaaaatctaccaatacatctgaaaaatggagaaaaattataaacaaaaataaatagaacattttctgtaatcatatttaatagctacattgtttacattttattgtatctacatttgtgatactagagattatattagatattaatatctagaatactagatattagaaatatcccatacatctagttttaattgaagtatagttcatttgaagcatagtctcaataatttgaacttg

SEQ ID NO: 112872 - DNA, 489 bp, Homo sapiens
ccacagctgatgctctctggaaagcaccacctcctggcaggaggtcaaccagcacaaaaatagaacattaaaccaccaaggctaagaaccctcacagagtccattgcaccccccacccccagccacctccacctgaacagccactagcatcgacagctgagagactcatagacagttcacatcacaggactctgtgcagacaatccccagtatgagcccagagccaggtagactcaatgggtggctagacccagaagagagagagcaatcattgtggtttggctcacaggaagccacacccataggaaaagatgaagagtactacatcaagggaatatcctatgggataaaagaatctgaacaacagcctatagctctagaccttccctctgacagagtctactcaaatgagaaggaagcagaaaaccaaccctggtaatatgacaaaacaaggctcttcaacagccccccaaaatcacactagtccac

SEQ ID NO: 112873 - DNA, 514 bp, Homo sapiens
ggcaggaatgtctggtttgcccaaggcacagaaaggaggcttggctggatcagaatgagtaagagggagaagagtagaagatgaagtcagatgtgacagggagtttgattatgtagagctttagaggccgctgagaggacattgacttcactatgagtggaaagctattgaatggttataacgacataatctgacacttgcatttaacatgagaccatgctggcttctgtgtttaggtttgatcttggccaggcaaaggcaagagggggtagaccatttaggaggcttttagcagtaatttaggtgagctttggtggtcatatggactaggatcataggagtggagatgatgagaggtggtcagattctggttttattttgatgttaaaggccacagcattggatatgagggagaaggtgagtagtagagggtggcaccagggcttttgtcttgggcacctgtgagatatatttgctatctacaaagatgggaagactgcaggatagatggatt

SEQ ID NO: 112874 - DNA, 303 bp, Homo sapiens
cacagtttggattcccttctgcagccagtatgaagttatgtgtgatggtgagattgtgccacttgaaggaccagactggcctgaaaattagtgtcatcttaggagttcaggtggtaaaggtagatgttgaggtcaaaatacagaactttgctttcaggcaggggtgagctggtgagggtttgtcaggaggagtgatgtgaaagcagtgtgtctgtgtcaagttggaagcaacaagggctgaacccgagtcttggcggtgagaatgaaaagagagggctgcattggcaaatcagtagaatggga

SEQ ID NO: 112875 - DNA, 816 bp, Homo sapiens
tggcaactgatttatcaagcctgagaatacagaagacttaaacaatataatgggaagtttgatctcatcaagatttacaacacattatacgcaacagcttcacaatacacattctttcagactcatgcagaatacgtaggagaactgatgacatggggtcagaaagcaagtctcagcaaattttaagagactggtatcaaatatatatttgtttactacaaagcaattaaattagaaatcaatagactaaaggtaactggaagaacccatgtgtgtaggcactaggaatttatacttctaaataactctcagaaacaatattgggaattgagaaatactcgtaagtaaataacagaaacgctacctatcgaaacctgtgggatgcagctcaaacatcactgaaatgcctgtgacattaggcaagaaggctgaaatttaatgaaccaagcatctaacttaagttaggaaaaacccaaaagaataaatacaaaatcaacaagaaaaaaaaaaaaaagaagcaaaaaaactttggtggggggcttgggccttggaaaggtttttagaagccatttggttgggggcacgggccccactgttagtgtacacagtgaacacgtttgccaaagcggggtccaagggggaaaaccgggggcaacgaaacaaagggcgggggagttctcccgccccatttaaaaaagcgccgcgggggaaaccgcgagacgttttcgtgaaacaaattcccgaaagggaagatacaggaagacacctaagggggactcatcaacagggggatccaagacgaagccgaatctcatc

SEQ ID NO: 112876 - DNA, 671 bp, Homo sapiens
gttttttgtagtgacgggtctcactatgttgcccaggctggtcttgtactcttgggctcattcattcctcccaccttggcctctcaaagtgttgggattgcaggtgtagccattgcacctggcctgtttccactttttattagctcagagtggttgagtggtgatggagacaatgaatttcagctgtccagaaagagattgaaaacacctacctgccctaaaagctgtgttgcagtttctagaggctcgtggagcccctactactgctttcagtccaccccgatggcccatgggtcagcatggtctgttgggagcagacctacatcttaagtttcataaatgcccgatttctaaaaacaccaactgaaagcagaaagagtaatttcacctaatgtcctgccagatctcagcagatcactgcagctggggaactgggtcccgctttactgaggggaccttcgtgtagttggtgcggaggtgcctggatttggttagcacgcttcagggtggtgtctgaaccctttacacgcctgctaacagcactgccttgttgaggtgtgaactgtctagctgagtggaggccagagccaggggacctctcaggagtctgtggacctctcaggagtctgtggacggggaacacggggctggaaggggccgaggtggaaaag

SEQ ID NO: 112877 - DNA, 313 bp, Homo sapiens
gtggtgggtgtgtgtagtcccagctacttgggaggctgaggcaggagaatggcgtgaacccaggaggtggagcttgcagtgagccgagatcatgccactgcactccagcctggcgacatagacccctgtgcccagccagctgcctagaaatttctggacttcaaccacactgtaattttttttttttaatcagtttcttctatttccttgaactcagtttccaggaacttctggtttggaaattagagacctgccttccaggttagtctacagaaagtctagttgtgttccactgtgtcttcattgtcctgca

SEQ ID NO: 112878 - DNA, 249 bp, Homo sapiens
tgtagctcaaggtgaaataagggaatgtccagtactgacttctgaaagaaatttcctcccttaaaaaaacaaaaaacaataagaaaaacttgtgaagagaaggcctcttttatgtattttttgtttcttgtttgtttgttgttgttgttgttgttgtttttgagacaaaagtttcactgtcgcccaggctgcagtgcagtggcgcgatctcggctcactgcaacctctgcctctctggttcaagtgatt

SEQ ID NO: 112879 - DNA, 303 bp, Homo sapiens
aacagatgcctacaccttattatctccagagattcttctagggcatctgtacttttgggaaagatccctaggtggataggaaaatggactagaactagaagactttatcatctctagatctcttctaaaaattatctcatgagtctgacactttcaagtcctatacagaatggtagtcgggccagtaatatgcccttcaagcttaatatctggcctccaggttgtcagaatattataatgcattgtaaaatgaatcttgagcatctgtttatgtatttccctgagcaggtcaagtgggatcaa

SEQ ID NO: 112880 - DNA, 390 bp, Homo sapiens
tctaagatttaataaatacgtttatttataaaattaaaactatgggttactataaatgagtttagaggattttgaggcatataaataagttccaggagcatttcgagaaattcatgatgcaaggtctccatctaacaagtagagcagttggtgcagatgagatgagcctgatcgccaaccagcctggaggaaccatgagctctctctgcactccttgtcttcgcctttgcatggttctttaccggttatccaggcctatcatgcccagtatttccttccatcctgaccacatccctgcgtgggaagtaggtcacatcaatggtaaatatgctgtcgttatgcagatgtagaaaccgaggctcagagaggtgaagtgacttacccaaggtc

SEQ ID NO: 112881 - DNA, 225 bp, Homo sapiens
atgaataaatggatgaatgaataaatgcacatgtgtgttaggtacctggctaagatcagactgcatattgcctaaagaattctttttctcaacttgaaaatttttagccaatgtgaaaattatgtttgcgactgtcacttcatcattgccaggttcaaacactgcagtgaattttttttttttaaccaaaaggccactctctaaccacctgaggaaaagcaacta

SEQ ID NO: 112882 - DNA, 364 bp, Homo sapiens
  misc_feature (364)..(364): n is a, c, g, or t
gcacttaggattgagcggggacacagcagtgccggctcctggcccccacgggcctgactcagcttgtcctcccctggtcggccgtgctgccttctggttcctctgcgctccaagcttctgcccatctccagacctttgcccctgctgtttcctctgcttgacagtccctcccacctgcacatgcgcatgcacgcacacacacacacacgtgtcacacacttggccgggacgtattgagtgtatttgggttgcaagcaacagaaacaggccctggctaattgaaggggggataacaaaggatgactcaccaagtaggagactttgaattttgatgtgggatgatgaggtgaacatggcaggcagn

SEQ ID NO: 112883 - DNA, 219 bp, Homo sapiens
aagaaggaatgcttgtgaaaagcctgtgaggagagggagagggagaggggctgaggggctgaggatgccctgcgtgtacctggaaatgggacctccccagaggctgtgggtttgcagccacgcctcatttcctcttggaaggggccctaccactaagctgcggggcccactttgccgcctctaaaacgtgccagtggctgggtttgcagtaaggaacag

SEQ ID NO: 112884 - DNA, 1313 bp, Homo sapiens
taaaattgtataaatccatagagcaccatattgataagctttatgagaagaacttatctatttacataatttattctcctgttattagtctactgtggataataattttaaaattactatattcccttagggatattttaactgtaagataattttcatagttgattatattaagtatagaatctttaaaagcttttctgattttattcagccatgtgccatttgcttaaagattccctagaaacatacacttcaatgtatatatagaaaataactgtgaatacttaatatgtggtattataagccagttatgccttgggcatttagattttcatgcttggattttcattagtaacctgtagtataactgtatcctttcttgaaccatgaatttaagtgcccacattactggatagtagagatgcccatattaagtaaacatcagtctaaggaaatatttaaagtgatgatttttcttcagcttctgttttctgacttaaagtttgtgggacataaactgtagagctttttaaactggccaagaaaaaatattattggcagaaagtttggtatatggattctacataggctaaggtaaataacttatggtctttttaaaatacattactggcattttacaatcagtcaccatttctgtatagaaacattcttttctcaacaaatgtacgttgacaaccctgttatattttaatatataactctggctatctgggttaaaatgatactccaaagcctaatgactatagtaaaactgatgtgacacatttagcttctaaggtagatgttggccctcccttacatggagatcaccttacctatctaaaatgatcatcagatgctttattaagactctttaatgactagatttcatttatttaaaatataaacatgtcattttgccctaaattcaacaaaataaattcaacaaagccttgaataatagtaaacaatgattattttttcttatgagaaaaactagttttgtaattgaataattttaaatcaggaagaatccagctttccccaaggttttgtctttagtgttattttttcagtgttagagagcttctggttgtttctttatattaatagacgcaggccaaccataaaaatctttgacaatattctgtctctatctttggatgtaaaaggacattaaatagtaatacgtacagttggacccacagttgcatgagttcaaactactagttttgtataacactgtgtacatagtcagactgtttcaacttttgtggtatttagcttcacaattataacctttaactgcatgc

SEQ ID NO: 112885 - DNA, 543 bp, Homo sapiens
tgcttataataaatctgttgttgggcatggtggctcatgcccgcaatcccagcccgcaatcccagcactttgggaggctgagacgggtggatcacctgaggtcaggagttcgagaccagcctggccaacatggtgaaaccccgtctctactaaaaatacaaaaattagccaagtgtggtggcgggtgcctgtaatcccagctactcaggaggctgaggcaggagaatcctttgaacccgggaggcggaggttgcagtgagccaagattgtaccattgcactccagcctgggtggctgggtgacacagtgaaactccgtttcaaaaaaataaaaaataaaaataaataaatctgtcacctgttaacataaatgacattgtatggaaaatgatgtttccaatacaaaaaaaaaaaaaagtgagagagatagcattattttagatatttgcaaatctctttaatgtctgcttagtaagaaacagctggattctcatatttgcttctgcgttcactctgttacaataatgtaaagaaattctggact

SEQ ID NO: 112886 - DNA, 496 bp, Homo sapiens
taaattagcccagggcagtagcacatgcctgtagtcccaactactcaggaggctgaggcaagaaagatggcttgagcccaggagttcgaggctgcagtgaaccatgatcacaacagtgcactccagtctaggtgacacagtgagaagatcctgtctctaaacaaacaacaacaacaacaacaaaacaattgactgtatttgtgagggtttaattctggactctttttcaccaatctacgtggttaccgtcttgtgtcacaccatcttgtgtcacagtatctcaattcttgtacctttacagtaaatcttaaaatcaagtaagatgagtcttccaattttttgtttcaaagctactttgccttttcatctaaattttacaacaatcttgtctatatctacaaaaggtcttgcttgggagttgacttagaattcactaatactatagatatactagggagatttgaaatcataactagggatgagtcttctaatccat

SEQ ID NO: 112887 - DNA, 222 bp, Homo sapiens
ggaggcagaggtgttgactcctggatgttattcttgggctgcggaagggagacagtgctggaattcttcttctgtcattgttaattgagcctctccgcttgcagagagaatcttaccccactcctctcctgacttccctcttcactttcccctctgactaacccttacctgcatagagccaagacagccggccaggacctgtggccagggttgggtagggaa

SEQ ID NO: 112888 - DNA, 384 bp, Homo sapiens
ttattgttgttggcaagattcagtttcttgcagttctaagactgatgtccctgttttcttcatggccattagccaggagccactctcaggtcctagaggccacctgtcttccttgacatgtggttcctccattttcaagccaacaacagtgcctctaacccttctcatgcttcacacttttctgatgtccccttctgcaaccataaagaaaacactctgcttttaaagggctcatgtgactcatgtgactagatcaggcccacccagacaatcgctcttacagtcaactatgccatatattataaccttctcacataagtaaaatttatcacattcacagtcccatggaatatgcagcgtatactagggagatatatactagag

SEQ ID NO: 112889 - DNA, 836 bp, Homo sapiens
ggatgttttcaatcctgtcccagttgctttaaagaaaattggaacataaatgttaaaaaacatattgaaacaacactcgatggtgtttccaagcagagttaccaagtggtttcattacattgatatgtattgcaagaggaatcccttgttacagagagcatccagaaaaaaaaaaatatgtgtgagttatgggccttaaatgcctacgctggatcctcatgggaaaacatgccctacttagtacaggcggctctcttttttgaaggctttctgagcttagaaagcgtgggatttggcctcaatattttttatatggaatgtgagaaaccgttagtacttaaaacattgatgtcggtagatttgaccttgtggtttcaagaattttcaagcaacctgaaatttcagggtagtcggtagtttgtacttttgttgagacaggatatttaatctgaatgtgctgtgaagctggctttgggtaggagtcacttaatccagtgtggctactctgtcattctcatattattccatcatccttcacctaggaactcttatgaagtgatagtagtggacaggccatttgtccacagtgattgcaccatccccagttttctcccatcctcttaataattcttgatattcattcaagtttctccttccacttccccattacagctcaagtgggcattgattggactaggtccaagcatttggtttagaagtgagccagtgacttaaaaataatgcaatcaaagcagccttaaaggacctatgtattggttagatattgctgtgtaacaaaccactccaaaactcagttgctttaaacaataaacatt

SEQ ID NO: 112890 - DNA, 192 bp, Homo sapiens
actgttctaggtattggagattcaggatgagcctgatgaggagagttcctgccctcaagcggttcattttcttgggaaggaggagagcagtaaacaagcatttggtgtcctaactgcttcaaagggcaaatgaggcagggtaggtgagagaaggtcaaataggtggtgaggatggagtgagctgggctgagg

SEQ ID NO: 112891 - DNA, 462 bp, Homo sapiens
  misc_feature (39)..(39): n is a, c, g, or t
ctcagatcactcctaccaactccctgctttaagcagatngaccatacttactttcttgagaaaaataaaatcatcagaacagagtctacttttctacccaataaaaatctcacacactcttcttcctttctcttataatagaagacctgtttttcccttctgaagtcagtccttccatctgtgctttgaagccattctcctcctaccttctgatgaacattgtactatcaataattcatttttcttgaatatttatcctttccctctcaaataatatttttaaataagcttgtctctccaaagtttaaataaccttgcctcaaaatctccaggcttcatgccattttgctcgccttcacaaatttcctggaggagttgtctataaactcttgatctccattccttacctcttgttcaatccataaccacttgatctggttttattcttcattacttgataag

SEQ ID NO: 112892 - DNA, 300 bp, Homo sapiens
gtgatgagatgttgaaatcctgccatagagtttcacattcgtccatagttaatttcatggtaattttttttaaagacacaggtgaagggaagagtgggaaaggaaagagggagaatgtgatcatcgtgtgactgaaaatcaggttatcaaatggataaattaggaggtaccatttgaatttcacaggcatctttcactttagaaatagattaaccacataataacaactgtagtgtagagtattaactacttaacaaaagaggattgagggtggaagtttaactgttatttcaatgtcca

SEQ ID NO: 112893 - DNA, 408 bp, Homo sapiens
tttgccaaggtcctctgtagcccaccccgccagcatctgtgagtcggcggctgggtagtgctgccggcctgcaacgggccggaaattaaaaaaaggcccaggagccagtttcctgaggggagataaagagctggggttcgttctaggcggagcagtgcttggtagagctagacattgaacttggagccacagtctctgagcattccctccgtccctgggaacgtttcctttcttttgttccctaagggctagagaggacattaactttataaaactggagtggaagtgggcacaaaagaacagtcagaggacttcagacctctcctcatctcttaagctagtgacaccaccattcaccagataaggggtcggttaatggctttctttcctaccctactcccaggtgca

SEQ ID NO: 112894 - DNA, 460 bp, Homo sapiens
aaattattttcacaaggatgtgatcaagatcaaacctttcttattttaaaagacttccaaaattcccatagtctgtctccaattattgcattatcttttttcccttcacagctacttttaagaatttcttacctcctttttattcctgaccctacttttatctgtttgcagcctgagattatcagtgactttcattttgctaaatcccgttgaattttttcagtacttgcctaacttggctcttgagtagcactaaatatttaattatttcatttttcttatattttcttcctttggtttccatgtcattgtactctggtggttttctgtcttctgtatgggtgccctttcggtcttctttgcagacttgtctgtctctgtctgaacgtagaatcttgggatttcttaagatgccattcttagaacaacacagatgagtaattaaatgatatactttttt

SEQ ID NO: 112895 - DNA, 883 bp, Homo sapiens
cagtgccgaaaaatcacaatgatttgagttcttcaaaaacctttgattggctgcattggctctgttctgcatattactagacttcttacatgatcacaagtaaccactaattggttaaaaccaaagagagagagagagagagtgtgtgtgtgtgtgtgtgtgtttggttggggggtgttgtgttagcttccaggtgaatgcattatctgttaatcctgtttattgatctgtttttataagtgctccatgattctctgaaaacagtatactatgtatctaatttttggatacaggatggacatacgtactcaaactgtgtttttcaatttgtactgtatttgtttctctcgacctgacttagtgatagaggtatattaaagtcttccactagcatggtagattaacaattctttctgtaattctgtcatttttactttatatatgtttatgtgtaatgtaactaggtgcgtagaggtttagatattctcctgtgaatttatttattttcagtaggggccataccttttcataccaaataattgtaatatgaaaatatattaacaaaaagagatcaaacatttcgctagcccatcctatagaccaggcgctcttcaaagtgccttataaatattaactgcgtcctcactataagcttgcaaactgtgctattactgtctccaacttacagatgggaaaactggcatggaaatgtctaggttgcttgcctgagttcaccagctagtaagtggtagagcacagattggaatccagacaggtgattctcataaccactagcctgttcattgagtacattccatgtggctaagcactgtttgagatgccatgtctagagcagtgaatgaaactcaagttttgccattga

SEQ ID NO: 112896 - DNA, 252 bp, Homo sapiens
aaaaaaaaaaaaaagccatagaaaatcttgacaaaatatatttctttgatttagaaacaaaatggcaagtttgtttgtggttgaaccggaatatttcttcaaatttggggtcaggtgccagttaaggcaaataaatgccttttaggtatctgaagggcccctttctggcttgaatgttatgtaatacagttctgtagtgttacaggtgctatattttgttgattagtattctgcagtaggaggcttggtatg

SEQ ID NO: 112897 - DNA, 379 bp, Homo sapiens
actggttttcaaactgccccccagagccccagagtgacgggcaagatgaaacacaggggggacccctcaataccccaccttcaaattataacagcacatgttccagcaacgccacttctgggtatatatgcaaaataattgaaagctgggtctcaaaaacatatttgtacacccatgtttacagaattattcaccatagccgagagttggaagcaacccaaatgcccatctacagatgaatagatcaacaaaatatgatatatacacacagtggaacattattcagtcttgaaaaaggaaggaaattctgacacgttacaacacgaatgaaccttgaaaagttgtgaaataagccagtcacaaaaagataaaatgctgt

SEQ ID NO: 112898 - DNA, 409 bp, Homo sapiens
tttttccagaacaagggttgggttggagagttaaagcatgcagtgttccttctttgactaccacttcccattgttttaccgaagaaaaataaaagaagccttagtccatattacaatgattctatttagatttttcctgaaacttttgagtcacttaaaccaaactgattgttcctgttcccaagaagtctgaatcccatcatgagtgtatatacacttatcagagtttagaagagggtgggctgaacacacaatatgtccgggaaaatgggccctgactgagtagttagaagtggcacggatttgtgtcaatggtggctccgtcatgactggttgttttgctttggctaagccaataacccactctgtgctcctgtataatcacctgtgaaacgaacataaactttga

SEQ ID NO: 112899 - DNA, 801 bp, Homo sapiens
gaaattgccaagaactagtaaatggagaagtcagggccccttgccttagagagggtaagggatgtccccaagtcacaccccggcagttgggagtggggaactcagcactggagccgcctccctctggaggagggatcctttgccttccctgagaaggacccttgctgcaaacacgagtggatatgagccaggggcacggccaggctgcctctgccaccctctctccccagcccagggtagacaggtcacaccaaccccaggctgtgcctcaattcacagtgccggggaggcaggggacaggcacttctggagccccctgcctggtgtgcacctttgctgtgccctgcgcgggctgggaggccttgggcaaaggtgttcatcttacagtgcctcagtttcctcccctgtgaaataggggaatgatggtgccacatcagaggctagttcccaggttgttagtcccgagggcttaggagaggccccgctgacgggaagcgctgcctgcaggttgggtctcattgtcttttgtcatcctctgcaggacaaggtgctggctggcactctgaggcaggaattggacaggtgtgggctcctgtcaggctctgaaacttccccagtgccttgctgggggtcagcggggcaatatccccctgactctccttatctgggagtaggtcctgatgactgccgcctcccaggggtgctgggggtccctaagagtgctgcaacaagcttgtgtccaggcctggaaagcgcccagctgctactgaggccagggctgcagccaggctgcccctcccc

SEQ ID NO: 112900 - DNA, 234 bp, Homo sapiens
tctctgaaggcaatgtgttttgccatagccagttcacatgacaaacaataacatgtctaggcaaaatgcatgtcttggaagcaccagagaaaatactaacttaagatttccattatatgataaaaatttgttgagtatctcgtatgtgacagacattttgctaagggctagggacacaaagatgcaaaaggcagaagtctctgacataatggtgagggcaacagtttagaagtg

SEQ ID NO: 112901 - DNA, 544 bp, Homo sapiens
agtgatccgcccacctcagcttcccaaagtgctgggattacaggtgtgagccaccatgcccagctttccgctcctttttatgacagccatgggaacaccctcatgctggtctagcattttgaggaattcattcacaggaaccccaagtaggttctgctgtcaggtacatggtgaggatgtaatgattgggcctactaggtcagtaggcaagttttggagactcttctgtttaaggaaatgcaactccaaagtcatgatagaccctagaaagtttaaagccagtggaattaaagctgtcatgttccctgagtttgggggtcacattactattagtataaactttgccttaaatggcttgtcaagtcttagccatgcctatgatgttttcttctgcaacataattcctcattaggttcctctcttttaaagagaaatagtggacccaattctcttgggtctttacaacatagtcttactcctgcagggagcaaagctttctttctctagctggccctgtaaggagcagtgagagtccttgcccacc

SEQ ID NO: 112902 - DNA, 748 bp, Homo sapiens
gaaaggaaaggcacttcctcaccgctaatgggtcttgcattaaataccatcaagacatcaacaggctattatcctcagtgttcctcccatgagaattagtggtcagacattgcagagggcatcagaagcgggtagatgaaatagcgaaaggaaacaggctagcagaccaaagagctaagtcagcagtaagaaggccccaaggtcccaaaacacttgaggcccctctgatttgggagggctacataagggaaataaagcctcagtattcccctacagagatagaatgggccacctctcgaggtatacttttcaaccctcaggatggttacaatcagaagattgcaaagtacgcttgccagcctccagccaatggaagattcttaaaatcctccactgagcctttcacttaggaaagcataagacatcagtgcatccaaagattgttctcaggagaaaatctactaaaaatggtcaaataggttgttaatactcgtgaaaccctcttaaaaataatccctttaacagatgacttcttccccaccacaatcaaaggatgggaagttactcaggggaggactggcagatagacttcacccatatgcccaaaataaatggcattcaatgtcttttggtgtgggtgcataccttcattaactgggtagaggcattcccatgcccaacagaaaaggcctctgaggtggtgagaatactaattagttaaataattcctcactttgggctccctaag

SEQ ID NO: 112903 - DNA, 144 bp, Homo sapiens
actcaattgtggtaatcatttcacaatgtatgtgtatatcaaaacatcacatcatacaccttatacatatgtacaatttaatttgtcaactatacctcaataaaactgaaacacatatacatgtgcatgcgcgcacacacacac

SEQ ID NO: 112904 - DNA, 434 bp, Homo sapiens
agctagaaacaatatagtaagaatatttaagctgggatggagtgggcagggtcctggcgcctgcctggcatttagccctggctccagcccagccaacccagcaaacagggccttgacttcctcttcctgggtgggaatgaaccccagatcaattcagtcagcctttcttgggactagtaaccatagtaacataaacaataacaaaaacaacaatagaagctaccatttattcttaaatatgccggcagttatactagtcactttacatgcatttcctcacctaatctttacaattgccttgcaaaatgcaggctgttattatttccattttgaaaatgaggagactgaggctcagagaggttaaataatctgctcttggccacacaacagctaagcagtggagtccggatctgaacccagccctctggctgaga

SEQ ID NO: 112905 - DNA, 445 bp, Homo sapiens
gccttgcacagagggatctggctatggcagcctctctggaggcttcacctgccataaagatgtttgctccacactactaaaccgtctccttctcttgtatacttctcaatgtcttctgcctctgtcctacacgtgggctgacatgctaccaaaacttctttcttcctggctcttccccccagcctccccatgttttgtttgtttgtttgtttgttttttagttatccttcaaaccttggctcaagagtttatctttccaggaaacactcccttgctcaccaattaatttatatgccattacattctctctcccaccgtacagtaggcttttgagggcagaccccttgccttgctaatttatctcttgtgccctcagaatctagcacattgtgtcatacatactagttccaggaaaactgcaaaagactctgaaaggagcaaaatg

SEQ ID NO: 112906 - DNA, 477 bp, Homo sapiens
gaaaccagagaggtttagaaacctgtagacattgtgcatcccccaatgcctttccccttaaaaaaatattatattctagtccagtccatcaaataaagtctacattcattagaaacatattctcttggtttttataatttcagttttttccagacacagtgcatatgcagatttgttacttttgtacagtgcaccctggtagtgagcatagtacccagtaggtagttattcagcccatgctcccctctctcccccacccccatagcctgcagcatgtcttgttcccatgttaatgttcctgtgtgctcagtgtttaggttccacttataagtgagaatgtgtggtatctggttttcttttccagcactaatttgcttaggattatgtccttagctccatccatgttgctgcaaaggacataatttcattcttttttatggaggcatagtattccatagtgtatatgtaccacatttt

SEQ ID NO: 112907 - DNA, 157 bp, Homo sapiens
tctccggttaccagggactcaactcagatgtcacctcctcagagaggtctgtcccctactgatgcccacctccccttcatgttgccctgttttccttctaaacacagcactgcccactagttggtacttttctggtttatttgcacctcttttttca

SEQ ID NO: 112908 - DNA, 128 bp, Homo sapiens
cagaggtgctcaggcatgactttaaaagacactatctgggccggaaaaacgtagaaatataaaacatttatagcacttgttttaagtgatgtgaatccatatgcccaaagctcttatactctgtcttt

SEQ ID NO: 112909 - DNA, 1818 bp, Homo sapiens
gtcgcgtcggaacgtgactggatggtagtgtgctggccggtctgcctccgggagaaccgagcgcttccggtggtttggctttgaatgacagcaagaactctgtctttaatggcttcattggtagcgtatgatgattcggactcggaggctgagacagagcatgcaggaagttttaatgctaccggccagcagaaagacacttctggtgtggccagaccacctgggcaggattttgcatctggtacactggatgtgcccaaagcaggggcacagcccacaaagcatggctcctgtgaagacccagggggctatcgccttccattggctcagcttgggagaagcgatcggggatcttgccccagccagaggctacagtggcccgggaaggagcctcaagtcaccttccccatcaaagagccttcttgttcttctctgtggacgagccatgttccagccagccacatgcccctggcagctgcccgctttaagcaagtaaaactctccaggaactttcccaagtcatctttccgtgctcaaagtgagtctgaaaccgtaggtaaaaatggcagctcttttcagaagaaaaaatgtgaggactgtgtggtaccctatactcccagaagactaagacagcggcaggcattaagcacggagacaggcaagggtaaagacgtggagccacaggggccccctgcagggcgtgccccagcccctctctacgtgggcccgggagtgtctgagtttattcagccgtatttgaatagccattataaagaaaccacagttccccggaaagtgcttttccacctgagaggccacaggggccctgtcaacaccattcagtggtgtccagtcctttctaagagccacatgcttctctccacttctatggataaaactttcaaggaacccagctatttagtggtcgaagtgactttagaatcactaccttgaaattccatccaaaagaccacaacatctttttatgtggaggcttcagctctgaaatgaaagcttgggatataaggactggcaaggtgatgagaagctacaaggcgaccatccagcagaccttggacatcctgttcctccgggaaggctccgagttcctgagcagcacagacgcttccacccgggactcagctgaccgcaccattattgcctgggatttccggacctctgccaaaatctccaaccagattttccacgagaggttcacctgccccagcctcgccttgcacccgagagagcccgtgttcctggcacagaccaatggcaactacctggcccttttctccactgtgtggccctaccggatgagcagacggcggcgctatgaagggcacaaggtggagggctactcagtgggctgcgagtgctccccaggcggtgacttgctggtgacgggcagcgccgatggccgggtcctgatgtacagcttccgcacagccagccgagcatgcacactgcaggggcacacacaggcctgtgtcggcaccacctatcaccccgtgctgccctccgtcctcgccacctgctcctggggaggggacatgaagatctggcactgagctttttgtcactgaaccttcccgatgccagctgggctcttggactcccctcttcctcaagggtagatgagaggaacgagcacagaggttggctgtgggtcctgggtaccaccttctgagcctcagtttcctcatctgtaaagtggggagaaaagtctgtttgcctcaggagtgtgaggactacactagtgaaagcgcctggcgggcagccggcgatgcccaataaatgtgtgttttgctgtttgtt

SEQ ID NO: 112910 - DNA, 1963 bp, Homo sapiens
gtcgcgtcggaacgtgactggatggtagtgtgctggccggtctgcctccgggagaaccgagcgcttccggtggtttggctttgaatgacagcaagaactctgtctttaatggcttcattggtagcgtatgatgattcggactcggaggctgagacagagcatgcaggaagttttaatgctaccggccagcagaaagacacttctggtgtggccagaccacctgggcaggattttgcatctggtacactggatgtgcccaaagcaggggcacagcccacaaagcatggctcctgtgaagacccagggggctatcgccttccattggctcagcttgggagaagcgatcggggatcttgccccagccagaggctacagtggcccgggaaggagcctcaagtcaccttccccatcaaagagccttcttgttcttctctgtggacgagccatgttccagccagccacatgcccctggcagctgcccgctttaagcaagtaaaactctccaggaactttcccaagtcatctttccgtgctcaaagtgagtctgaaaccgtaggtaaaaatggcagctcttttcagaagaaaaaatgtgaggactgtgtggtaccctatactcccagaagactaagacagcggcaggcattaagcacggagacaggcaagggtaaagacgtggagccacaggggccccctgcagggcgtgccccagcccctctctacgtgggcccgggagtgtctgagtttattcagccgtatttgaatagccattataaagaaaccacagttccccggaaagtgcttttccacctgagaggccacaggggccctgtcaacaccattcagtggtgtccagtcctttctaagagccacatgcttctctccacttctatggataaaactttcaaggtggaacgccgtggactccgggcactgcctgcagacctactccctgcacacagaggcagtgcgggccgccggtgggctccctgtggccggcgcatcctcagtggtggctttgacttcgcgctgcacctaacagaccttgaaacaggaacccagctatttagtggtcgaagtgactttagaatcactaccttgaaattccatccaaaagaccacaacatctttttatgtggaggcttcagctctgaaatgaaagcttgggatataaggactggcaaggtgatgagaagctacaaggcgaccatccagcagaccttggacatcctgttcctccgggaaggctccgagttcctgagcagcacagacgcttccacccgggactcagctgaccgcaccattattgcctgggatttccggacctctgccaaaatctccaaccagattttccacgagaggttcacctgccccagcctcgccttgcacccgagagagcccgtgttcctggcacagaccaatggcaactacctggcccttttctccactgtgtggccctaccggatgagcagacggcggcgctatgaagggcacaaggtggagggctactcagtgggctgcgagtgctccccaggcggtgacttgctggtgacgggcagcgccgatggccgggtcctgatgtacagcttccgcacagccagccgagcatgcacactgcaggggcacacacaggcctgtgtcggcaccacctatcaccccgtgctgccctccgtcctcgccacctgctcctggggaggggacatgaagatctggcactgagctttttgtcactgaaccttcccgatgccagctgggctcttggactcccctcttcctcaagggtagatgagaggaacgagcacagaggttggctgtgggtcctgggtaccaccttctgagcctcagtttcctcatctgtaaagtggggagaaaagtctgtttgcctcaggagtgtgaggactacactagtgaaagcgcctggcgggcagccggcgatgcccaataaatgtgtgttttgctgtttgtt

SEQ ID NO: 112911 - DNA, 2172 bp, Homo sapiens
gtcgcgtcggaacgtgactggatggtagtgtgctggccggtctgcctccgggagaaccgagcgcttccggtgcgtgtggtgagcggcgggccccgggctggaggggccgggactgggcagcgcctaaagcgccccgtgccgcttaacgcggtctctcatagccgctcgccttcctttcacttcctgttccttcagaaagcgctgtgccttggaccaaccttacttcttactattgacagctcagctaactcctattcatccttcaaaacccatctctggtggtttggctttgaatgacagcaagaactctgtctttaatggcttcattggtagcgtatgatgattcggactcggaggctgagacagagcatgcaggaagttttaatgctaccggccagcagaaagacacttctggtgtggccagaccacctgggcaggattttgcatctggtacactggatgtgcccaaagcaggggcacagcccacaaagcatggctcctgtgaagacccagggggctatcgccttccattggctcagcttgggagaagcgatcggggatcttgccccagccagaggctacagtggcccgggaaggagcctcaagtcaccttccccatcaaagagccttcttgttcttctctgtggacgagccatgttccagccagccacatgcccctggcagctgcccgctttaagcaagtaaaactctccaggaactttcccaagtcatctttccgtgctcaaagtgagtctgaaaccgtaggtaaaaatggcagctcttttcagaagaaaaaatgtgaggactgtgtggtaccctatactcccagaagactaagacagcggcaggcattaagcacggagacaggcaagggtaaagacgtggagccacaggggccccctgcagggcgtgccccagcccctctctacgtgggcccgggagtgtctgagtttattcagccgtatttgaatagccattataaagaaaccacagttccccggaaagtgcttttccacctgagaggccacaggggccctgtcaacaccattcagtggtgtccagtcctttctaagagccacatgcttctctccacttctatggataaaactttcaaggtggaacgccgtggactccgggcactgcctgcagacctactccctgcacacagaggcagtgcgggccgccggtgggctccctgtggccggcgcatcctcagtggtggctttgacttcgcgctgcacctaacagaccttgaaacaggaacccagctatttagtggtcgaagtgactttagaatcactaccttgaaattccatccaaaagaccacaacatctttttatgtggaggcttcagctctgaaatgaaagcttgggatataaggactggcaaggtgatgagaagctacaaggcgaccatccagcagaccttggacatcctgttcctccgggaaggctccgagttcctgagcagcacagacgcttccacccgggactcagctgaccgcaccattattgcctgggatttccggacctctgccaaaatctccaaccagattttccacgagaggttcacctgccccagcctcgccttgcacccgagagagcccgtgttcctggcacagaccaatggcaactacctggcccttttctccactgtgtggccctaccggatgagcagacggcggcgctatgaagggcacaaggtggagggctactcagtgggctgcgagtgctccccaggcggtgacttgctggtgacgggcagcgccgatggccgggtcctgatgtacagcttccgcacagccagccgagcatgcacactgcaggggcacacacaggcctgtgtcggcaccacctatcaccccgtgctgccctccgtcctcgccacctgctcctggggaggggacatgaagatctggcactgagctttttgtcactgaaccttcccgatgccagctgggctcttggactcccctcttcctcaagggtagatgagaggaacgagcacagaggttggctgtgggtcctgggtaccaccttctgagcctcagtttcctcatctgtaaagtggggagaaaagtctgtttgcctcaggagtgtgaggactacactagtgaaagcgcctggcgggcagccggcgatgcccaataaatgtgtgttttgctgtttgtt

SEQ ID NO: 112912 - DNA, 441 bp, Homo sapiens
aggaaggtgtggctttgcctgacatatttgtctatttttgccaaaaatctttaccatcaaaaaaccagaactaggtcacccaggttcttctagctttaaaggaagcaggtaaatcaagatacaaactgtcaccactggctgagaacaaacatgatctattacctaagactggacaaatgtagtctcttagcaattaaagttcttttagtgacaacaagaacaaacaggaatggctactgagtaggaaaatagcagtgctggccacacttctattttttcatagtacttactacttactatctggagttaacttatgctaaataaataaatgtttattgcttatctgtgactcactgcttatctggacagatgagtcacctgattctgtgtaaccataaagaagctaggaaacacagaaaagcacatggatattggtagaaa

SEQ ID NO: 112913 - DNA, 826 bp, Homo sapiens
ttaacaggccatgtctgagactctcattggtaaaaagttactgggactgagtacaggagatgaaggcatattaaaaagaaaaccttctatatttggcagttctgagcccagagtctaaaatagccaggccaaacaattccattgtcatggccactgggccaaggggactgactcaaaatgtaaactgtgaaaggtactgagtgtgtagttctctagggagaaaggccaagcaacccatccccgaggagccctcgaccactgctcagagagctggtgggagaatcattctcattcactagggagggaagctagatgttcagaaaaaactctcaacttcttatgtacacacgcgcacacacacaaggtaaggcagtcattcaagttccaatatttctaatcaattgaatcaaatttaatttgcagagaaggaataatttctgtgactttattactttataagcactccaagtttagacagtctctatgtaaaccattctgaccctgcctccgttccaggcagtttcagagttggactgctctgctcctcttcactttgtgcagcacgtgttgtaagaacattcatttggcattaatacccactgccttgttttgaaaatgatctttccatttttatctcctcaccttctcatgagctccttgaaaacagaaaccacatgtcatgtcatacttctctgtacctcacagaactcttccacagccagactcactacatgctgtagaatgactcaatgaatgaagtaccgcaaacatctgaattttaaataaggggcctagttccctacttcttctagcttctgtgtgcttg

SEQ ID NO: 112914 - DNA, 881 bp, Homo sapiens
tagataaagtcgttgaatactagcgtgttgtcatacactttttctcagagtttttaaagagtacttcgctgaaatgatgccatcaggaaagagatatttttacctctatcacctatcaatgcgagaccatagcaggctatagtgcagtaatatcatcatggctcactgcaatctcgacttctccagctcaaacaatcctcccacctcagcctcccaagcagttgggactacaggcacgtgtcattacacccaggctatctgcaatacatgactctggaagctagggtgctctatgctgtgatgctatcaaatcttcatggatttttccaggatcctcaaaacagagtgagactccttcaaaaaaaattaataaaagcaagcacatagggtgcacatttgcccttccctcttgggatccagggtgatcccacaggtgctgttcatccccaagtttgacctggacgtgttccagtgttatgtcgcagtgtttctcccttttttggtactgggatttctccccagaaacaaaccatatgtatccaaagtagtgggcttgctatacaagatgactagtggaaacctcaagtagaggtacgatttcctagaatcgatctggtgcaggatattaccagggccaaagtaaaacgagcaaacgctccatcctgcagactcaggggtgcaggccctcacttatgcatcaatcttataccttcctgttgggcctccatggtattacaaaaggtgtagattgacatttcgcccaagatgggtccgggaaaagtgcactgggtcgtacattggtggggttgtaccctacagggaagcttcagatatatcggaacctctggaactccactgtgaaagtattcccccactagggg

SEQ ID NO: 112915 - DNA, 198 bp, Homo sapiens
tgggtccttatgcaagcaactctgagctgggacctcagctaaggaaggtgagagcagcaccacaaggctactttccagcccactgctgagaccagtgctagcgggcagactagcctttctgccaaaacactagtgtgtacagttctttctggaccccatggcaaatggttttggtggcaggatcatgggcaaacaggg

SEQ ID NO: 112916 - DNA, 299 bp, Homo sapiens
gtcagaagaaaaatcacagtcctcctcccgcagcccctttccctcttggagctgattatttggggtttatcttctgtagtagaagaagaaatcgatttggtgtttgtccccagttcctgtcacggagccgctaacacctttggaaattcctgatcggtaggcgtgtcttgtcgttcattatatgctctgttagagaactcccgagtttatgctaatgcagtggtctagggtagagccccgggggagcctcagggtggggctggtaagtaagacctaaagactgaagggttgggactttc

SEQ ID NO: 112917 - DNA, 539 bp, Homo sapiens
  misc_feature (15)..(15): n is a, c, g, or t
cgggagacaacttanggctaggtacgaggcctgggtggtgtccttcctgagagcaaaggtcaaggaccccctctgtgaaggctcagcagaggtgggatcccacgccccctcccggcccctccctgccctccattcagggagaaacctctccttcccgtgtgagaagggccagagggtccaggcatcccaagtccagcgtgaagggccacagcccctcttggctgccaagcacgcagatcccatggacatttggggaaagggctccttgggctgctggtgaacttctgtggccaccacctcctgctcctgacctccctgggagggtgctatcagttctgtcctggccctttcagttttataagttggtttccagcccccagtgtcctgacttctgtctgccacatgaggagggaggccctgcctgtgtgggagggtggttactgtgggtggaatagtggaggccttcaactgattagacaaggcccgcccacatcttggagggcatctgccttactgattaaaatgtcaatgtaatctaa

SEQ ID NO: 112918 - DNA, 611 bp, Homo sapiens
ggggttaaacagagcccgtcttcaaggaaaggcagtttattgatttagttgttgatttagttattgatttagttatgaagctgtggattataaaaaggctggtttgaaagaaggaagccacattctgtgggggcctatgactgacacccctggggagagttgggccaaggctagctggcctgtgagcctcagcagcactgcagggggcctgggaggggtgtgcaggggggtcccaggtgcgccaggagtcagggtatgcagggggctccagggtgtgcaggggttaggagagctgagcaactttctggaacttatcccgggaactcatttccagagaccccataggctcactgcagaaccatgcttggtatatatggggcgtgtagagggcgcttggggaacagaatcctgcgtttcccccgagggagggaagacatgcaggggaacagggaggaaacgctgcggcagggcagatggcatgggtacatcctccaccgccactctccccctggcaagagtcctggccactccccataaaacgagtacccaccacacccaggcacaaaggggacggtaggtggggtgagtccctgctgtctggctgagatctg

SEQ ID NO: 112919 - DNA, 605 bp, Homo sapiens
cttcagatgccagtcccaagtacagctgtccctttgtatccttgggggatgggatccagtacctccaaaacaccagaatccacaaggccagagtccctgatacaaaatggcatcccagttgcagataaccccctcctctggacttaaatcacctcttgattacttataacacctgaaccctgtgaaccccaggcaatgacagcaggatcctgaagcccatgcaggctctgaaccacgcggccatccagaaggggctgcaggcacctgccactaccgcagaggactgaggggccttggcccagcagggaccccagggccttgggggactgtgtgagctggaaacgtggctggccagatgggcagcaccatggagccccctgggggtgcgtacctgcacctgggcgccgtgacatcccctgtgtgcacagcccgcgtgctgcagctggcctttggctgcactaccttcagcctggtggcccaccggggtggctttgcgggcgtccagggcaccttctgcatggacgcctggggcttctgcttcgccgtctctgcgctggtggtggcctgtgagttcacacggctccacggctgcctgcggctctcct

SEQ ID NO: 112920 - DNA, 538 bp, Homo sapiens
ggtcccggcaggggctccacaggggaccaggggtcagatgtctctctaagatggggacaggcacgcaagctgctattccggggctctgatcacggctgtctatttatagcgctggggggagccgcctcacatagacagcagagaggctgccctgctgcaatgtcaccgtcgtcactgcctctgcaggctgcaggcacctgccactaccgcagaggactgaggggccttggcccagcagggaccccagggccttgggggactgtgtgagctggaaacgtggctggccagatgggcagcaccatggagccccctgggggtgcgtacctgcacctgggcgccgtgacatcccctgtgtgcacagcccgcgtgctgcagctggcctttggctgcactaccttcagcctggtggcccaccggggtggctttgcgggcgtccagggcaccttctgcatggacgcctggggcttctgcttcgccgtctctgcgctggtggtggcctgtgagttcacacggctccacggctgcctgcggctctcct

SEQ ID NO: 112921 - DNA, 158 bp, Homo sapiens
gaattcaagcttctaacgatgtacggggacgaggccctgcctgtgtgggagggtggttactgtgggtggaatagtggaggccttcaactgattagacaaggcccgcccacatcttggagggcatctgccttactgattaaaatgtcaatgtaatctaa

SEQ ID NO: 112922 - DNA, 1883 bp, Homo sapiens
cgacgggggcggggcctgggtgcgggtgccgcgtggcggccgcagcgctgagggagccggtgccatctgtgggggctttgggccagggtctccggacagcatgagcgtgggcttcatcggcgctggccagctggcttttgccctggccaagggcttcacagcagcaggcgtcttggctgcccacaagataatggctagctccccagacatggacctggccacagtttctgctctcaggaagatgggggtgaagttgacaccccacaacaaggagacggtgcagcacagtgatgtgctcttcctggctgtgaagccacacatcatccccttcatcctggatgaaataggcgccgacattgaggacagacacattgtggtgtcctgcgcggccggcgtcaccatcagctccattgagaagaagctgtcagcgtttcggccagcccccagggtcatccgctgcatgaccaacactccagtcgtggtgcgggagggggccaccgtgtatgccacaggcacgcacgcccaggtggaggacgggaggctcatggagcagctgctgagcagcgtgggcttctgcacggaggtggaagaggacctgattgatgccgtcacggggctcagtggcagcggccccgcctacgcattcacagccctggatgccctggctgatgggggtgtgaagatgggacttccaaggcgcctggcagtccgcctcggggcccaggccctcctgggggctgccaagatgctgctgcactcagaacagcacccaggccagctcaaggacaacgtcagctctcctggtggggccaccatccatgccttgcatgtgctggagagtgggggcttccgctccctgctcatcaacgctgtggaggcctcctgcatccgcacacgggagctgcagtccatggctgaccaggagcaggtgtcaccagccgccatcaagaagaccatcctggacaaggtgaagctggactcccctgcagggaccgctctgtcgccttctggccacaccaagctgctcccccgcagcctggccccagcgggcaaggattgacacgtcctgcctgaccaccatcctgccaccaccttctcttctcttgtcactagggggactagggggtccccaaagtggcccactttctgtggctctgatcagcgcaggggccagccagggacatagccagggaggggccacatcacttcccactggaaatctctgtggtctgcaagtgcttcccagcccagaacaggggtggattccccaacctcaacctcctttcttctctgctcccaaaccatgtcaggaccaccttcctctagagctcgggagcccggagggtcttcacccactcctactccagtatcagctggcacgggctccttcctgagagcaaaggtcaaggaccccctctgtgaaggctcagcagaggtgggatcccacgccccctcccggcccctccctgccctccattcagggagaaacctctccttcccgtgtgagaagggccagagggtccaggcatcccaagtccagcgtgaagggccacagcccctcttggctgccaagcacgcagatcccatggacatttggggaaagggctccttgggctgctggtgaacttctgtggccaccacctcctgctcctgacctccctgggagggtgctatcagttctgtcctggccctttcagttttataagttggtttccagcccccagtgtcctgacttctgtctgccacatgaggagggaggccctgcctgtgtgggagggtggttactgtgggtggaatagtggaggccttcaactgattagacaaggcccgcccacatcttggagggcatctgccttactgattaaaatgtcaatgtaatctaa

SEQ ID NO: 112923 - DNA, 1965 bp, Homo sapiens
cgacgggggcggggcctgggtgcgggtgccgcgtggcggccgcagcgctgaggggtgggtacgacccgcgcacggtagctgggttggggtcgggctccgggaatggtgggcggcggtcgccgggtggggcgcgacgagccggtgccatctgtgggggctttgggccagggtctccggacagcatgagcgtgggcttcatcggcgctggccagctggcttttgccctggccaagggcttcacagcagcaggcgtcttggctgcccacaagataatggctagctccccagacatggacctggccacagtttctgctctcaggaagatgggggtgaagttgacaccccacaacaaggagacggtgcagcacagtgatgtgctcttcctggctgtgaagccacacatcatccccttcatcctggatgaaataggcgccgacattgaggacagacacattgtggtgtcctgcgcggccggcgtcaccatcagctccattgagaagaagctgtcagcgtttcggccagcccccagggtcatccgctgcatgaccaacactccagtcgtggtgcgggagggggccaccgtgtatgccacaggcacgcacgcccaggtggaggacgggaggctcatggagcagctgctgagcagcgtgggcttctgcacggaggtggaagaggacctgattgatgccgtcacggggctcagtggcagcggccccgcctacgcattcacagccctggatgccctggctgatgggggtgtgaagatgggacttccaaggcgcctggcagtccgcctcggggcccaggccctcctgggggctgccaagatgctgctgcactcagaacagcacccaggccagctcaaggacaacgtcagctctcctggtggggccaccatccatgccttgcatgtgctggagagtgggggcttccgctccctgctcatcaacgctgtggaggcctcctgcatccgcacacgggagctgcagtccatggctgaccaggagcaggtgtcaccagccgccatcaagaagaccatcctggacaaggtgaagctggactcccctgcagggaccgctctgtcgccttctggccacaccaagctgctcccccgcagcctggccccagcgggcaaggattgacacgtcctgcctgaccaccatcctgccaccaccttctcttctcttgtcactagggggactagggggtccccaaagtggcccactttctgtggctctgatcagcgcaggggccagccagggacatagccagggaggggccacatcacttcccactggaaatctctgtggtctgcaagtgcttcccagcccagaacaggggtggattccccaacctcaacctcctttcttctctgctcccaaaccatgtcaggaccaccttcctctagagctcgggagcccggagggtcttcacccactcctactccagtatcagctggcacgggctccttcctgagagcaaaggtcaaggaccccctctgtgaaggctcagcagaggtgggatcccacgccccctcccggcccctccctgccctccattcagggagaaacctctccttcccgtgtgagaagggccagagggtccaggcatcccaagtccagcgtgaagggccacagcccctcttggctgccaagcacgcagatcccatggacatttggggaaagggctccttgggctgctggtgaacttctgtggccaccacctcctgctcctgacctccctgggagggtgctatcagttctgtcctggccctttcagttttataagttggtttccagcccccagtgtcctgacttctgtctgccacatgaggagggaggccctgcctgtgtgggagggtggttactgtgggtggaatagtggaggccttcaactgattagacaaggcccgcccacatcttggagggcatctgccttactgattaaaatgtcaatgtaatctaa

SEQ ID NO: 112924 - DNA, 2175 bp, Homo sapiens
cgacgggggcggggcctgggtgcgggtgccgcgtggcggccgcagcgctgaggggtgggtacgacccgcgcacggtagctgggttggggtcgggctccgggaatggtgggcggcggtcgccgggtggggcgcgacggtagcccagttctgggcggggtgggaacccagacgggggacccctaggcgccgggccctccctctccccgtacttttcccccttcccagtcatttcttctgcggaacctccacccctccagtgggtgcgggaccctaggcagcaggccaggcaccgccgctctgactgggggccccgaagcagttaacgggccggacagcaaagtggaaaagccggtgccatctgtgggggctttgggccagggtctccggacagcatgagcgtgggcttcatcggcgctggccagctggcttttgccctggccaagggcttcacagcagcaggcgtcttggctgcccacaagataatggctagctccccagacatggacctggccacagtttctgctctcaggaagatgggggtgaagttgacaccccacaacaaggagacggtgcagcacagtgatgtgctcttcctggctgtgaagccacacatcatccccttcatcctggatgaaataggcgccgacattgaggacagacacattgtggtgtcctgcgcggccggcgtcaccatcagctccattgagaagaagctgtcagcgtttcggccagcccccagggtcatccgctgcatgaccaacactccagtcgtggtgcgggagggggccaccgtgtatgccacaggcacgcacgcccaggtggaggacgggaggctcatggagcagctgctgagcagcgtgggcttctgcacggaggtggaagaggacctgattgatgccgtcacggggctcagtggcagcggccccgcctacgcattcacagccctggatgccctggctgatgggggtgtgaagatgggacttccaaggcgcctggcagtccgcctcggggcccaggccctcctgggggctgccaagatgctgctgcactcagaacagcacccaggccagctcaaggacaacgtcagctctcctggtggggccaccatccatgccttgcatgtgctggagagtgggggcttccgctccctgctcatcaacgctgtggaggcctcctgcatccgcacacgggagctgcagtccatggctgaccaggagcaggtgtcaccagccgccatcaagaagaccatcctggacaaggtgaagctggactcccctgcagggaccgctctgtcgccttctggccacaccaagctgctcccccgcagcctggccccagcgggcaaggattgacacgtcctgcctgaccaccatcctgccaccaccttctcttctcttgtcactagggggactagggggtccccaaagtggcccactttctgtggctctgatcagcgcaggggccagccagggacatagccagggaggggccacatcacttcccactggaaatctctgtggtctgcaagtgcttcccagcccagaacaggggtggattccccaacctcaacctcctttcttctctgctcccaaaccatgtcaggaccaccttcctctagagctcgggagcccggagggtcttcacccactcctactccagtatcagctggcacgggctccttcctgagagcaaaggtcaaggaccccctctgtgaaggctcagcagaggtgggatcccacgccccctcccggcccctccctgccctccattcagggagaaacctctccttcccgtgtgagaagggccagagggtccaggcatcccaagtccagcgtgaagggccacagcccctcttggctgccaagcacgcagatcccatggacatttggggaaagggctccttgggctgctggtgaacttctgtggccaccacctcctgctcctgacctccctgggagggtgctatcagttctgtcctggccctttcagttttataagttggtttccagcccccagtgtcctgacttctgtctgccacatgaggagggaggccctgcctgtgtgggagggtggttactgtgggtggaatagtggaggccttcaactgattagacaaggcccgcccacatcttggagggcatctgccttactgattaaaatgtcaatgtaatctaa

SEQ ID NO: 112925 - DNA, 1945 bp, Homo sapiens
cgacgggggcggggcctgggtgcgggtgccgcgtggcggccgcagcgctgagggagccggtgccatctgtgggggctttgggccagggtctccggacagcatgagcgtgggcttcatcggcgctggccagctggcttttgccctggccaagggcttcacagcagcaggcgtcttggctgcccacaagataatggctagctccccagacatggacctggccacagtttctgctctcaggaagatgggggtgaagttgacaccccacaacaaggagacggtgcagcacagtgatgtgctcttcctggctgtgaagccacacatcatccccttcatcctggatgaaataggcgccgacattgaggacagacacattgtggtgtcctgcgcggccggcgtcaccatcagctccattgagaagaagctgtcagcgtttcggccagcccccagggtcatccgctgcatgaccaacactccagtcgtggtgcgggagggggccaccgtgtatgccacaggcacgcacgcccaggtggaggacgggaggctcatggagcagctgctgagcagcgtgggcttctgcacggaggtggaagaggacctgattgatgccgtcacggggctcagtggcagcggccccgcctacgcattcacagccctggatgccctggctgatgggggtgtgaagatgggacttccaaggcgcctggcagtccgcctcggggcccaggccctcctgggggctgccaagatgctgctgcactcagaacagcacccaggccagctcaaggacaacgtcagctctcctggtggggccaccatccatgccttgcatgtgctggagagtgggggcttccgctccctgctcatcaacgctgtggaggcctcctgcatccgcacacgggagctgcagtccatggctgaccaggagcaggtgtcaccagccgccatcaagaagaccatcctggacaaggtgaagctggactcccctgcagggaccgctctgtcgccttctggccacaccaagctgctcccccgcagcctggccccagcgggcaaggattgacacgtcctgcctgaccaccatcctgccaccaccttctcttctcttgtcactagggggactagggggtccccaaagtggcccactttctgtggctctgatcagcgcaggggccagccagggacatagccagggaggggccacatcacttcccactggaaatctctgtggtctgcaagtgcttcccagcccagaacaggggtggattccccaacctcaacctcctttcttctctgctcccaaaccatgtcaggaccaccttcctctagagctcgggagcccggagggtcttcacccactcctactccagtatcagctggcacgggctccttcctgagagcaaaggtcaaggaccccctctgtgaaggctcagcagaggtgggatcccacgccccctcccggcccctccctgccctccattcagggagaaacctctccttcccgtgtgagaagggccagagggtccaggcatcccaagtccagcgtgaagggccacagcccctcttggctgccaagcacgcagatcccatggacatttggggaaagggctccttgggctgctggtgaacttctgtggccaccacctcctgctcctgacctccctgggagggtgctatcagttctgtcctggccctttcagttttataagttggtttccagcccccagtgtcctgacttctgtctgccacatgaggagggaggccctgcctgtgtgggagggtggttactgtgggtggaatagtggaggccttcaactgattagacaaggcccgcccacatcttggagggcatctgccttactgattaaaatgtcaatgtaatctaaaaaaacaaaaacaaaacccacagcacacctaacagggggcagacaaacggaattgcactgcc

SEQ ID NO: 112926 - DNA, 2592 bp, Homo sapiens
cgacgggggcggggcctgggtgcgggtgccgcgtggcggccgcagcgctgagggagccggtgccatctgtgggggctttgggccagggtctccggacagcatgagcgtgggcttcatcggcgctggccagctggcttttgccctggccaagggcttcacagcagcaggcgtcttggctgcccacaagataatggctagctccccagacatggacctggccacagtttctgctctcaggaagatgggggtgaagttgacaccccacaacaaggagacggtgcagcacagtgatgtgctcttcctggctgtgaagccacacatcatccccttcatcctggatgaaataggcgccgacattgaggacagacacattgtggtgtcctgcgcggccggcgtcaccatcagctccattgagaagaagctgtcagcgtttcggccagcccccagggtcatccgctgcatgaccaacactccagtcgtggtgcgggagggggccaccgtgtatgccacaggcacgcacgcccaggtggaggacgggaggctcatggagcagctgctgagcagcgtgggcttctgcacggaggtggaagaggacctgattgatgccgtcacggggctcagtggcagcggccccgcctacgcattcacagccctggatgccctggctgatgggggtgtgaagatgggacttccaaggcgcctggcagtccgcctcggggcccaggccctcctgggggctgccaagatgctgctgcactcagaacagcacccaggccagctcaaggacaacgtcagctctcctggtggggccaccatccatgccttgcatgtgctggagagtgggggcttccgctccctgctcatcaacgctgtggaggcctcctgcatccgcacacgggagctgcagtccatggctgaccaggagcaggtgtcaccagccgccatcaagaagaccatcctggacaaggtgaagctggactcccctgcagggaccgctctgtcgccttctggccacaccaagctgctcccccgcagcctggccccagcgggcaaggattgacacgtcctgcctgaccaccatcctgccaccaccttctcttctcttgtcactagggggactagggggtccccaaagtggcccactttctgtggctctgatcagcgcaggggccagccagggacatagccagggaggggccacatcacttcccactggaaatctctgtggtctgcaagtgcttcccagcccagaacaggggtggattccccaacctcaacctcctttcttctctgctcccaaaccatgtcaggaccaccttcctctagagctcgggagcccggagggtcttcacccactcctactccagtatcagctggcacgggctccttcctgagagcaaaggtcaaggaccccctctgtgaaggctcagcagaggtgggatcccacgccccctcccggcccctccctgccctccattcagggagaaacctctccttcccgtgtgagaagggccagagggtccaggcatcccaagtccagcgtgaagggccacagcccctcttggctgccaagcacgcagatcccatggacatttggggaaagggctccttgggctgctggtgaacttctgtggccaccacctcctgctcctgacctccctgggagggtgctatcagttctgtcctggccctttcagttttataagttggtttccagcccccagtgtcctgacttctgtctgccacatgaggagggaggccctgcctgtgtgggagggtggttactgtgggtggaatagtggaggccttcaactgattagacaaggcccgcccacatcttggagggcatctgccttactgattaaaatgtcaatgtaatctaaatgcaaaagtctacagattcaaatgttagtctcatgcaacccctccccacccctgccagaaacagaataatgtttgaccaaacactcaggcaccctgtagcccagtcaagtggacacatacaatcacccattccaggaggcccacaggattggaggagctgctgagggttgggttacaagggccaggggtgctctggttccttcaaccaacacatagttactgagtatggagacagcaagatgaggcccccttccctccagaggcagtgcacactgtgtgaggggagctgggctgggtagcagcagggtgtcagggtgtgcaggggggtcccaggtgcgccaggagtcagggtatgcagggggctccagggtgtgcaggggttaggagagctgagcaactttctggaacttatcccgggaactcatttccagagaccccataggctcactgcagaaccatgcttggtatatatggggcgtgtagagggcgcttggggaacagaatcctgcgtttcccccgagggagggaagacatgcaggggaacagggaggaaacgctgcggcagggcagatggcatgggtacatcctccaccgccactctccccctggcaagagtcctggccactccccataaaacgagtacccaccacacccaggcacaaaggggacggtaggtggggtgagtccctgctgtctggctgagatctg

SEQ ID NO: 112927 - DNA, 1794 bp, Homo sapiens
cgacgggggcggggcctgggtgcgggtgccgcgtggcggccgcagcgctgagggagccggtgccatctgtgggggctttgggccagggtctccggacagcatgagcgtgggcttcatcggcgctggccagctggcttttgccctggccaagggcttcacagcagcaggcgtcttggctgcccacaagataatggctagctccccagacatggacctggccacagtttctgctctcaggaagatgggggtgaagttgacaccccacaacaaggagacggtgcagcacagtgatgtgctcttcctggctgtgaagccacacatcatccccttcatcctggatgaaataggcgccgacattgaggacagacacattgtggtgtcctgcgcggccggcgtcaccatcagctccattgagaagaagctgtcagcgtttcggccagcccccagggtcatccgctgcatgaccaacactccagtcgtggtgcgggagggggccaccgtgtatgccacaggcacgcacgcccaggtggaggacgggaggctcatggagcagctgctgagcagcgtgggcttctgcacggaggtggaagaggacctgattgatgccgtcacggggctcagtggcagcggccccgcctacgcattcacagccctggatgccctggctgatgggggtgtgaagatgggacttccaaggcgcctggcagtccgcctcggggcccaggccctcctgggggctgccaagatgctgctgcactcagaacagcacccaggccagctcaaggacaacgtcagctctcctggtggggccaccatccatgccttgcatgtgctggagagtgggggcttccgctccctgctcatcaacgctgtggaggcctcctgcatccgcacacgggagctgcagtccatggctgaccaggagcaggtgtcaccagccgccatcaagaagaccatcctggacaaggtgaagctggactcccctgcagggaccgctctgtcgccttctggccacaccaagctgctcccccgcagcctggccccagcgggcaaggattgacacgtcctgcctgaccaccatcctgccaccaccttctcttctcttgtcactagggggactagggggtccccaaagtggcccactttctgtggctctgatcagcgcaggggccagccagggacatagccagggaggggccacatcacttcccactggaaatctctgtggtctgcaagtgcttcccagcccagaacaggggtggattccccaacctcaacctcctttcttctctgctcccaaaccatgtcaggaccaccttcctctagagctcgggagcccggagggtcttcacccactcctactccagtatcagctggcacgggctccttcctgagagcaaaggtcaaggaccccctctgtgaaggctcagcagaggtgggatcccacgccccctcccggcccctccctgccctccattcagggagaaacctctccttcccgtgtgagaagggccagagggtccaggcatcccaagtccagcgtgaagggccagccagggacatagccagggaggggccacatcacttcccactggaaatctctgtggtctgcaagtgcttcccagcccagaacaggggtggattccccaacctcaacctcctttctgaggccctgcctgtgtgggagggtggttactgtgggtggaatagtggaggccttcaactgattagacaaggcccgcccacatcttggagggcatctgccttactgattaaaatgtcaatgtaatctaa

SEQ ID NO: 112928 - DNA, 1670 bp, Homo sapiens
cgacgggggcggggcctgggtgcgggtgccgcgtggcggccgcagcgctgagggagccggtgccatctgtgggggctttgggccagggtctccggacagcatgagcgtgggcttcatcggcgctggccagctggcttttgccctggccaagggcttcacagcagcaggcgtcttggctgcccacaagataatggctagctccccagacatggacctggccacagtttctgctctcaggaagatgggggtgaagttgacaccccacaacaaggagacggtgcagcacagtgatgtgctcttcctggctgtgaagccacacatcatccccttcatcctggatgaaataggcgccgacattgaggacagacacattgtggtgtcctgcgcggccggcgtcaccatcagctccattgagaagaagctgtcagcgtttcggccagcccccagggtcatccgctgcatgaccaacactccagtcgtggtgcgggagggggccaccgtgtatgccacaggcacgcacgcccaggtggaggacgggaggctcatggagcagctgctgagcagcgtgggcttctgcacggaggtggaagaggacctgattgatgccgtcacggggctcagtggcagcggccccgcctacgcattcacagccctggatgccctggctgatgggggtgtgaagatgggacttccaaggcgcctggcagtccgcctcggggcccaggccctcctgggggctgccaagatgctgctgcactcagaacagcacccaggccagctcaaggacaacgtcagctctcctggtggggccaccatccatgccttgcatgtgctggagagtgggggcttccgctccctgctcatcaacgctgtggaggcctcctgcatccgcacacgggagctgcagtccatggctgaccaggagcaggtgtcaccagccgccatcaagaagaccatcctggacaaggtgaagctggactcccctgcagggaccgctctgtcgccttctggccacaccaagctgctcccccgcagcctggccccagcgggcaaggattgacacgtcctgcctgaccaccatcctgccaccaccttctcttctcttgtcactagggggactagggggtccccaaagtggcccactttctgtggctctgatcagcgcaggggccagccagggacatagccagggaggggccacatcacttcccactggaaatctctgtggtctgcaagtgcttcccagcccagaacaggggtggattccccaacctcaacctccttcccgtgtgagaagggccagagggtccaggcatcccaagtccagcgtgaagggccacagcccctcttggctgccaagcacgcagatcccatggacatttggggaaagggctccttgggctgctggtgaacttctgtggccaccacctcctgctcctgacctccctgggagggtgctatcagttctgtcctggccctttcagttttataagttggtttccagcccccagtgtcctgacttctgtctgccacatgaggagggaggccctgcctgtgtgggagggtggttactgtgggtggaatagtggaggccttcaactgattagacaaggcccgcccacatcttggagggcatctgccttactgattaaaatgtcaatgtaatctaa

SEQ ID NO: 112929 - DNA, 1512 bp, Homo sapiens
cgacgggggcggggcctgggtgcgggtgccgcgtggcggccgcagcgctgagggagccggtgccatctgtgggggctttgggccagggtctccggacagcatgagcgtgggcttcatcggcgctggccagctggcttttgccctggccaagggcttcacagcagcaggcgtcttggctgcccacaagataatggctagctccccagacatggacctggccacagtttctgctctcaggaagatgggggtgaagttgacaccccacaacaaggagacggtgcagcacagtgatgtgctcttcctggctgtgaagccacacatcatccccttcatcctggatgaaataggcgccgacattgaggacagacacattgtggtgtcctgcgcggccggcgtcaccatcagctccattgagaagaagctgtcagcgtttcggccagcccccagggtcatccgctgcatgaccaacactccagtcgtggtgcgggagggggccaccgtgtatgccacaggcacgcacgcccaggtggaggacgggaggctcatggagcagctgctgagcagcgtgggcttctgcacggaggtggaagaggacctgattgatgccgtcacggggctcagtggcagcggccccgcctacgcattcacagccctggatgccctggctgatgggggtgtgaagatgggacttccaaggcgcctggcagtccgcctcggggcccaggccctcctgggggctgccaagatgctgctgcactcagaacagcacccaggccagctcaaggacaacgtcagctctcctggtggggccaccatccatgccttgcatgtgctggagagtgggggcttccgctccctgctcatcaacgctgtggaggcctcctgcatccgcacacgggagctgcagtccatggctgaccaggagcaggtgtcaccagccgccatcaagaagaccatcctggacaaggtgaagctggactcccctgcagggaccgctctgtcgccttctggccacaccaagctgctcccccgcagcctggccccagcgggcaaggattgacacgtcctgcctgaccaccatcctgccaccaccttctcttctcttgtcactagggggactagggggtccccaaagtggcccactttctgtggctctgatcagcgcaggggccagccagggacatagccagggaggggccacatcacttcccactggaaatctctgtggtctgcaagtgcttcccagcccagaacaggggtggattccccaacctcaacctcctttcttctctgctcccaaaccatgtcaggaccaccttcctctagagctcgggagcccggagggtcttcacccactcctactccagtatcagctggcacgggcgaggccctgcctgtgtgggagggtggttactgtgggtggaatagtggaggccttcaactgattagacaaggcccgcccacatcttggagggcatctgccttactgattaaaatgtcaatgtaatctaa

SEQ ID NO: 112930 - DNA, 1498 bp, Homo sapiens
cgacgggggcggggcctgggtgcgggtgccgcgtggcggccgcagcgctgagggagccggtgccatctgtgggggctttgggccagggtctccggacagcatgagcgtgggcttcatcggcgctggccagctggcttttgccctggccaagggcttcacagcagcaggcgtcttggctgcccacaagataatggctagctccccagacatggacctggccacagtttctgctctcaggaagatgggggtgaagttgacaccccacaacaaggagacggtgcagcacagtgatgtgctcttcctggctgtgaagccacacatcatccccttcatcctggatgaaataggcgccgacattgaggacagacacattgtggtgtcctgcgcggccggcgtcaccatcagctccattgagaagaagctgtcagcgtttcggccagcccccagggtcatccgctgcatgaccaacactccagtcgtggtgcgggagggggccaccgtgtatgccacaggcacgcacgcccaggtggaggacgggaggctcatggagcagctgctgagcagcgtgggcttctgcacggaggtggaagaggacctgattgatgccgtcacggggctcagtggcagcggccccgcctacgcattcacagccctggatgccctggctgatgggggtgtgaagatgggacttccaaggcgcctggcagtccgcctcggggcccaggccctcctgggggctgccaagatgctgctgcactcagaacagcacccaggccagctcaaggacaacgtcagctctcctggtggggccaccatccatgccttgcatgtgctggagagtgggggcttccgctccctgctcatcaacgctgtggaggcctcctgcatccgcacacgggagctgcagtccatggctgaccaggagcaggtgtcaccagccgccatcaagaagaccatcctggacaaggtgaagctggactcccctgcagggaccgctctgtcgccttctggccacaccaagctgctcccccgcagcctggccccagcgggcaaggattgacacgtcctgcctgaccaccatcctgccaccaccttctcttctcttgtcactagggggactagggggtccccaaagtggcccactttctgtggctctgatcagcgcaggggccagccagggacatagccagggaggggccacatcacttcccactggaaatctctgtggtctgcaagtgcttcccagcccagaacaggggtggattccccaacctcaacctcctttcttctctgctcccaaaccccctttcagttttataagttggtttccagcccccagtgtcctgacttctgtctgccacatgaggagggaggccctgcctgtgtgggagggtggttactgtgggtggaatagtggaggccttcaactgattagacaaggcccgcccacatcttggagggcatctgccttactgattaaaatgtcaatgtaatctaa

SEQ ID NO: 112931 - DNA, 1833 bp, Homo sapiens
ggccacggtctccatgctctgctcctctggccgcagcagaaccctgtgaaccccaggcaatgacagcaggatcctgaagcccatgcaggctctgaaccacgcggccatccagaaggggcgtcttggctgcccacaagataatggctagctccccagacatggacctggccacagtttctgctctcaggaagatgggggtgaagttgacaccccacaacaaggagacggtgcagcacagtgatgtgctcttcctggctgtgaagccacacatcatccccttcatcctggatgaaataggcgccgacattgaggacagacacattgtggtgtcctgcgcggccggcgtcaccatcagctccattgagaagaagctgtcagcgtttcggccagcccccagggtcatccgctgcatgaccaacactccagtcgtggtgcgggagggggccaccgtgtatgccacaggcacgcacgcccaggtggaggacgggaggctcatggagcagctgctgagcagcgtgggcttctgcacggaggtggaagaggacctgattgatgccgtcacggggctcagtggcagcggccccgcctacgcattcacagccctggatgccctggctgatgggggtgtgaagatgggacttccaaggcgcctggcagtccgcctcggggcccaggccctcctgggggctgccaagatgctgctgcactcagaacagcacccaggccagctcaaggacaacgtcagctctcctggtggggccaccatccatgccttgcatgtgctggagagtgggggcttccgctccctgctcatcaacgctgtggaggcctcctgcatccgcacacgggagctgcagtccatggctgaccaggagcaggtgtcaccagccgccatcaagaagaccatcctggacaaggtgaagctggactcccctgcagggaccgctctgtcgccttctggccacaccaagctgctcccccgcagcctggccccagcgggcaaggattgacacgtcctgcctgaccaccatcctgccaccaccttctcttctcttgtcactagggggactagggggtccccaaagtggcccactttctgtggctctgatcagcgcaggggccagccagggacatagccagggaggggccacatcacttcccactggaaatctctgtggtctgcaagtgcttcccagcccagaacaggggtggattccccaacctcaacctcctttcttctctgctcccaaaccatgtcaggaccaccttcctctagagctcgggagcccggagggtcttcacccactcctactccagtatcagctggcacgggctccttcctgagagcaaaggtcaaggaccccctctgtgaaggctcagcagaggtgggatcccacgccccctcccggcccctccctgccctccattcagggagaaacctctccttcccgtgtgagaagggccagagggtccaggcatcccaagtccagcgtgaagggccacagcccctcttggctgccaagcacgcagatcccatggacatttggggaaagggctccttgggctgctggtgaacttctgtggccaccacctcctgctcctgacctccctgggagggtgctatcagttctgtcctggccctttcagttttataagttggtttccagcccccagtgtcctgacttctgtctgccacatgaggagggaggccctgcctgtgtgggagggtggttactgtgggtggaatagtggaggccttcaactgattagacaaggcccgcccacatcttggagggcatctgccttactgattaaaatgtcaatgtaatctaa

SEQ ID NO: 112932 - DNA, 1705 bp, Homo sapiens
tcaggcggtaccgcccggaattagggatcagcgctgagggagccggtgccatctgtgggggctttgggccagggtctccggacagcatgagcgtgggcttcatcggcgctggccagctggcttttgccctggccaagggcttcacagcagcaggcgtcttggctgcccacaagataatggctagctccccagacatggacctggccacagtttctgctctcaggaagatgggggtgaagttgacaccccacaacaaggagacggtgcagcacagtgatgtgctcttcctggctgtgaagccacacatcatccccttcatcctggatgaaataggcgccgacattgaggacagacacattgtggtgtcctgcgcggccggcgtcaccatcagctccattgagaagaagctgtcagcgtttcggccagcccccagggtcatccgctgcatgaccaacactccagtcgtggtgcgggagggggccaccgtgtatgccacaggcacgcacgcccaggtggaggacgggaggctcatggagcagctgctgagcagcgtgggcttctgcacggaggtggaagaggacctgattgatgccgtcacggggctcagtggcagcggccccgcctacgcattcacagccctggatgccctggctgatgggggtgtgaagatgggacttccaaggcgcctggcagtccgcctcggggcccaggccctcctgggagctgcagtccatggctgaccaggagcaggtgtcaccagccgccatcaagaagaccatcctggacaaggtgaagctggactcccctgcagggaccgctctgtcgccttctggccacaccaagctgctcccccgcagcctggccccagcgggcaaggattgacacgtcctgcctgaccaccatcctgccaccaccttctcttctcttgtcactagggggactagggggtccccaaagtggcccactttctgtggctctgatcagcgcaggggccagccagggacatagccagggaggggccacatcacttcccactggaaatctctgtggtctgcaagtgcttcccagcccagaacaggggtggattccccaacctcaacctcctttcttctctgctcccaaaccatgtcaggaccaccttcctctagagctcgggagcccggagggtcttcacccactcctactccagtatcagctggcacgggctccttcctgagagcaaaggtcaaggaccccctctgtgaaggctcagcagaggtgggatcccacgccccctcccggcccctccctgccctccattcagggagaaacctctccttcccgtgtgagaagggccagagggtccaggcatcccaagtccagcgtgaagggccacagcccctcttggctgccaagcacgcagatcccatggacatttggggaaagggctccttgggctgctggtgaacttctgtggccaccacctcctgctcctgacctccctgggagggtgctatcagttctgtcctggccctttcagttttataagttggtttccagcccccagtgtcctgacttctgtctgccacatgaggagggaggccctgcctgtgtgggagggtggttactgtgggtggaatagtggaggccttcaactgattagacaaggcccgcccacatcttggagggcatctgccttactgattaaaatgtcaatgtaatctaa

SEQ ID NO: 112933 - DNA, 1704 bp, Homo sapiens
gagtaggctagtagaggcggtgtgaatcgggcgagggggagccggtgccatctgtgggggctttgggccagggtctccggacagcatgagcgtgggcttcatcggcgctggccagctggcttttgccctggccaagggcttcacagcagcaggcgtcttggctgcccacaagataatggctagctccccagacatggacctggccacagtttctgctctcaggaagatgggggtgaagttgacaccccacaacaaggagacggtgcagcacagtgatgtgctcttcctggctgtgaagccacacatcatccccttcatcctggatgaaataggcgccgacattgaggacagacacattgtggtgtcctgcgcggccggcgtcaccatcagctccattgagaagaagctgtcagcgtttcggccagcccccagggtcatccgctgcatgaccaacactccagtcgtggtgcgggagggggccaccgtgtatgccacaggcacgcacgcccaggtggaggacgggaggctcatggagcagctgctgagcagcgtgggcttctgcacggaggtggaagaggacctgattgatgccgtcacggggctcagtggcagcggccccgcctacgcattcacagccctggatgccctggctgatgggggtgtgaagatgggacttccaaggcgcctggcagtccgcctcggggcccaggccctcctgggagctgcagtccatggctgaccaggagcaggtgtcaccagccgccatcaagaagaccatcctggacaaggtgaagctggactcccctgcagggaccgctctgtcgccttctggccacaccaagctgctcccccgcagcctggccccagcgggcaaggattgacacgtcctgcctgaccaccatcctgccaccaccttctcttctcttgtcactagggggactagggggtccccaaagtggcccactttctgtggctctgatcagcgcaggggccagccagggacatagccagggaggggccacatcacttcccactggaaatctctgtggtctgcaagtgcttcccagcccagaacaggggtggattccccaacctcaacctcctttcttctctgctcccaaaccatgtcaggaccaccttcctctagagctcgggagcccggagggtcttcacccactcctactccagtatcagctggcacgggctccttcctgagagcaaaggtcaaggaccccctctgtgaaggctcagcagaggtgggatcccacgccccctcccggcccctccctgccctccattcagggagaaacctctccttcccgtgtgagaagggccagagggtccaggcatcccaagtccagcgtgaagggccacagcccctcttggctgccaagcacgcagatcccatggacatttggggaaagggctccttgggctgctggtgaacttctgtggccaccacctcctgctcctgacctccctgggagggtgctatcagttctgtcctggccctttcagttttataagttggtttccagcccccagtgtcctgacttctgtctgccacatgaggagggaggccctgcctgtgtgggagggtggttactgtgggtggaatagtggaggccttcaactgattagacaaggcccgcccacatcttggagggcatctgccttactgattaaaatgtcaatgtaatctaa

SEQ ID NO: 112934 - DNA, 1790 bp, Homo sapiens
cgacgggggcggggcctgggtgcgggtgccgcgtggcggccgcagcgctgagggagccggtgccatctgtgggggctttgggccagggtctccggacagcatgagcgtgggcttcatcggcgctggccagctggcttttgccctggccaagggcttcacagcagcaggcgtcttggctgcccacaagataatggctagctccccagacatggacctggccacagtttctgctctcaggaagatgggggtgaagttgacaccccacaacaaggagacggtgcagcacagtgatgtgctcttcctggctgtgaagccacacatcatccccttcatcctggatgaaataggcgccgacattgaggacagacacattgtggtgtcctgcgcggccggcgtcaccatcagctccattgagaagaagctgtcagcgtttcggccagcccccagggtcatccgctgcatgaccaacactccagtcgtggtgcgggagggggccaccgtgtatgccacaggcacgcacgcccaggtggaggacgggaggctcatggagcagctgctgagcagcgtgggcttctgcacggaggtggaagaggacctgattgatgccgtcacggggctcagtggcagcggccccgcctacggggctgccaagatgctgctgcactcagaacagcacccaggccagctcaaggacaacgtcagctctcctggtggggccaccatccatgccttgcatgtgctggagagtgggggcttccgctccctgctcatcaacgctgtggaggcctcctgcatccgcacacgggagctgcagtccatggctgaccaggagcaggtgtcaccagccgccatcaagaagaccatcctggacaaggtgaagctggactcccctgcagggaccgctctgtcgccttctggccacaccaagctgctcccccgcagcctggccccagcgggcaaggattgacacgtcctgcctgaccaccatcctgccaccaccttctcttctcttgtcactagggggactagggggtccccaaagtggcccactttctgtggctctgatcagcgcaggggccagccagggacatagccagggaggggccacatcacttcccactggaaatctctgtggtctgcaagtgcttcccagcccagaacaggggtggattccccaacctcaacctcctttcttctctgctcccaaaccatgtcaggaccaccttcctctagagctcgggagcccggagggtcttcacccactcctactccagtatcagctggcacgggctccttcctgagagcaaaggtcaaggaccccctctgtgaaggctcagcagaggtgggatcccacgccccctcccggcccctccctgccctccattcagggagaaacctctccttcccgtgtgagaagggccagagggtccaggcatcccaagtccagcgtgaagggccacagcccctcttggctgccaagcacgcagatcccatggacatttggggaaagggctccttgggctgctggtgaacttctgtggccaccacctcctgctcctgacctccctgggagggtgctatcagttctgtcctggccctttcagttttataagttggtttccagcccccagtgtcctgacttctgtctgccacatgaggagggaggccctgcctgtgtgggagggtggttactgtgggtggaatagtggaggccttcaactgattagacaaggcccgcccacatcttggagggcatctgccttactgattaaaatgtcaatgtaatctaa

SEQ ID NO: 112935 - DNA, 2190 bp, Homo sapiens
cgacgggggcggggcctgggtgcgggtgccgcgtggcggccgcagcgctgaggggtgggtacgacccgcgcacggtagctgggttggggtcgggctccgggaatggtgggcggcggtcgccgggtggggcgcgacggtagcccagttctgggcggggtgggaacccagacgggggacccctaggcgccgggccctccctctccccgtacttttcccccttcccagtcatttcttctgcggaacctccacccctccagtgggtgcgggaccctaggcagcaggccaggcaccgccgctctgactgggggccccgaagcagttaacgggccggacagcaaagtggaaagttagaccagctgggaccaggggaggtgggcacccggctgcgggaggagcggccaggctggcactgcccccctaacttgctctcgatcctgccggtctcgtcccgcagagccggtgccatctgtgggggctttgggccagggtctccggacagcatgagcgtgggcttcatcggcgctggccagctggcttttgccctggccaagggcttcacagcagcaggcgtcttggctgcccacaagataatggctagctccccagacatggacctggccacagtttctgctctcaggaagatgggggtgaagttgacaccccacaacaaggagacggtgcagcacagtgatgtgctcttcctggctgtgaagccacacatcatccccttcatcctggatgaaataggcgccgacattgaggacagacacattgtggtgtcctgcgcggccggcgtcaccatcagctccattgagaagaagctgtcagcgtttcggccagcccccagggtcatccgctgcatgaccaacactccagtcgtggtgcgggagggggccaccgtgtatgccacaggcacgcacgcccaggtggaggacgggaggctcatggagcagctgctgagcagcgtgggcttctgcacggaggtggaagaggacctgattgatgccgtcacggggctcagtggcagcggccccgcctacggggctgccaagatgctgctgcactcagaacagcacccaggccagctcaaggacaacgtcagctctcctggtggggccaccatccatgccttgcatgtgctggagagtgggggcttccgctccctgctcatcaacgctgtggaggcctcctgcatccgcacacgggagctgcagtccatggctgaccaggagcaggtgtcaccagccgccatcaagaagaccatcctggacaaggtgaagctggactcccctgcagggaccgctctgtcgccttctggccacaccaagctgctcccccgcagcctggccccagcgggcaaggattgacacgtcctgcctgaccaccatcctgccaccaccttctcttctcttgtcactagggggactagggggtccccaaagtggcccactttctgtggctctgatcagcgcaggggccagccagggacatagccagggaggggccacatcacttcccactggaaatctctgtggtctgcaagtgcttcccagcccagaacaggggtggattccccaacctcaacctcctttcttctctgctcccaaaccatgtcaggaccaccttcctctagagctcgggagcccggagggtcttcacccactcctactccagtatcagctggcacgggctccttcctgagagcaaaggtcaaggaccccctctgtgaaggctcagcagaggtgggatcccacgccccctcccggcccctccctgccctccattcagggagaaacctctccttcccgtgtgagaagggccagagggtccaggcatcccaagtccagcgtgaagggccacagcccctcttggctgccaagcacgcagatcccatggacatttggggaaagggctccttgggctgctggtgaacttctgtggccaccacctcctgctcctgacctccctgggagggtgctatcagttctgtcctggccctttcagttttataagttggtttccagcccccagtgtcctgacttctgtctgccacatgaggagggaggccctgcctgtgtgggagggtggttactgtgggtggaatagtggaggccttcaactgattagacaaggcccgcccacatcttggagggcatctgccttactgattaaaatgtcaatgtaatctaa

SEQ ID NO: 112936 - DNA, 2006 bp, Homo sapiens
cgacgggggcggggcctgggtgcgggtgccgcgtggcggccgcagcgctgaggggtgggtacgacccgcgcacggtagctgggttggggtcgggctccgggaatggtgggcggcggtcgccgggtggggcgcgacggtagcccagttctgggcggggtgggaacccagacgggggacccctaggcgccgggccctccctctccccgtacttttcccccttcccagtcatttcttctgcggaacctccacccctccagtgggtgcgggaccctaggcagcaggccaggcaccgccgctctgactgggggccccgaagcagttaacgggccggacagcaaagtggaaagttagaccagctgggaccaggggaggtgggcacccggctgcgggaggagcggccaggctggcactgcccccctaacttgctctcgatcctgccggtctcgtcccgcagagccggtgccatctgtgggggctttgggccagggtctccggacagcatgagcgtgggcttcatcggcgctggccagctggcttttgccctggccaagggcttcacagcagcaggcgtcttggctgcccacaagataatggctagctccccagacatggacctggccacagtttctgctctcaggaagatgggggtgaagttgacaccccacaacaaggagacggtgcagcacagtgatgtgctcttcctggctgtgaagccacacatcatccccttcatcctggatgaaataggcgccgacattgaggacagacacattgtggtgtcctgcgcggccggcgtcaccatcagctccattgagaagaagctgtcagcgtttcggccagcccccagggtcatccgctgcatgaccaacactccagtcgtggtgcgggagggggccaccgtgtatgccacaggcacgcacgcccaggtggaggacgggaggctcatggagcagctgctgagcagcgtgggcttctgcacggaggtggaagaggacctgattgatgccgtcacggggctcagtggcagcggccccgcctacgcattcacagccctggatgccctggctgatgggggtgtgaagatgggacttccaaggcgcctggcagtccgcctcggggcccaggccctcctgggggctgccaagatgctgctgcactcagaacagcacccaggccagctcaaggacaacgtcagctctcctggtggggccaccatccatgccttgcatgtgctggagagtgggggcttccgctccctgctcatcaacgctgtggaggcctcctgcatccgcacacgggagctgcagtccatggctgaccaggagcaggtgtcaccagccgccatcaagaagaccatcctggacaagatgtcaggaccaccttcctctagagctcgggagcccggagggtcttcacccactcctactccagtatcagctggcacgggctccttcctgagagcaaaggtcaaggaccccctctgtgaaggctcagcagaggtgggatcccacgccccctcccggcccctccctgccctccattcagggagaaacctctccttcccgtgtgagaagggccagagggtccaggcatcccaagtccagcgtgaagggccacagcccctcttggctgccaagcacgcagatcccatggacatttggggaaagggctccttgggctgctggtgaacttctgtggccaccacctcctgctcctgacctccctgggagggtgctatcagttctgtcctggccctttcagttttataagttggtttccagcccccagtgtcctgacttctgtctgccacatgaggagggaggccctgcctgtgtgggagggtggttactgtgggtggaatagtggaggccttcaactgattagacaaggcccgcccacatcttggagggcatctgccttactgattaaaatgtcaatgtaatctaacttagcgtcgagttcctcacttacttttatcctttactcttgtatgatttatactcctt

SEQ ID NO: 112937 - DNA, 1626 bp, Homo sapiens
cgacgggggcggggcctgggtgcgggtgccgcgtggcggccgcagcgctgagggagccggtgccatctgtgggggctttgggccagggtctccggacagcatgagcgtgggcttcatcggcgctggccagctggcttttgccctggccaagggcttcacagcagcaggcgtcttggctgcccacaagataatggctagctccccagacatggacctggccacagtttctgctctcaggaagatgggggtgaagttgacaccccacaacaaggagacggtgcagcacagtgatgtgctcttcctggctgtgaagccacacatcatccccttcatcctggatgaaataggcgccgacattgaggacagacacattgtggtgtcctgcgcggccggcgtcaccatcagctccattgagaagaagctgtcagcgtttcggccagcccccagggtcatccgctgcatgaccaacactccagtcgtggtgcgggagggggccaccgtgtatgccacaggcacgcacgcccaggtggaggacgggaggctcatggagcagctgctgagcagcgtgggcttctgcacggaggtggaagaggacctgattgatgccgtcacggggctcagtggcagcggccccgcctacggagctgcagtccatggctgaccaggagcaggtgtcaccagccgccatcaagaagaccatcctggacaaggtgaagctggactcccctgcagggaccgctctgtcgccttctggccacaccaagctgctcccccgcagcctggccccagcgggcaaggattgacacgtcctgcctgaccaccatcctgccaccaccttctcttctcttgtcactagggggactagggggtccccaaagtggcccactttctgtggctctgatcagcgcaggggccagccagggacatagccagggaggggccacatcacttcccactggaaatctctgtggtctgcaagtgcttcccagcccagaacaggggtggattccccaacctcaacctcctttcttctctgctcccaaaccatgtcaggaccaccttcctctagagctcgggagcccggagggtcttcacccactcctactccagtatcagctggcacgggctccttcctgagagcaaaggtcaaggaccccctctgtgaaggctcagcagaggtgggatcccacgccccctcccggcccctccctgccctccattcagggagaaacctctccttcccgtgtgagaagggccagagggtccaggcatcccaagtccagcgtgaagggccacagcccctcttggctgccaagcacgcagatcccatggacatttggggaaagggctccttgggctgctggtgaacttctgtggccaccacctcctgctcctgacctccctgggagggtgctatcagttctgtcctggccctttcagttttataagttggtttccagcccccagtgtcctgacttctgtctgccacatgaggagggaggccctgcctgtgtgggagggtggttactgtgggtggaatagtggaggccttcaactgattagacaaggcccgcccacatcttggagggcatctgccttactgattaaaatgtcaatgtaatctaa

SEQ ID NO: 112938 - DNA, 1204 bp, Homo sapiens
aattagctagtacgagcgtgtttaatcggccgaggctgggcgccaggccctctgggggctgccaagatgctgctgcactcagaacagcacccaggccagctcaaggacaacgtcagctctcctggtggggccaccatccatgccttgcatgtgctggagagtgggggcttccgctccctgctcatcaacgctgtggaggcctcctgcatccgcacacgggagctgcagtccatggctgaccaggagcaggtgtcaccagccgccatcaagaagaccatcctggacaaggtgaagctggactcccctgcagggaccgctctgtcgccttctggccacaccaagctgctcccccgcagcctggccccagcgggcaaggattgacacgtcctgcctgaccaccatcctgccaccaccttctcttctcttgtcactagggggactagggggtccccaaagtggcccactttctgtggctctgatcagcgcaggggccagccagggacatagccagggaggggccacatcacttcccactggaaatctctgtggtctgcaagtgcttcccagcccagaacaggggtggattccccaacctcaacctcctttcttctctgctcccaaaccatgtcaggaccaccttcctctagagctcgggagcccggagggtcttcacccactcctactccagtatcagctggcacgggctccttcctgagagcaaaggtcaaggaccccctctgtgaaggctcagcagaggtgggatcccacgccccctcccggcccctccctgccctccattcagggagaaacctctccttcccgtgtgagaagggccagagggtccaggcatcccaagtccagcgtgaagggccacagcccctcttggctgccaagcacgcagatcccatggacatttggggaaagggctccttgggctgctggtgaacttctgtggccaccacctcctgctcctgacctccctgggagggtgctatcagttctgtcctggccctttcagttttataagttggtttccagcccccagtgtcctgacttctgtctgccacatgaggagggaggccctgcctgtgtgggagggtggttactgtgggtggaatagtggaggccttcaactgattagacaaggcccgcccacatcttggagggcatctgccttactgattaaaatgtcaatgtaatctaa

SEQ ID NO: 112939 - DNA, 1168 bp, Homo sapiens
ggacgcgtgggtcgcggacgcgtgggtcgacccacgcgtccgacctgattgatgccgtcacggggctcagtggcagcggccccgcctacgcattcacagccctggatgccctggctgatgggggtgtgaagatgggacttccaaggcgcctggcagtccgcctcggggcccaggccctcctgggagctgcagtccatggctgaccaggagcaggtgtcaccagccgccatcaagaagaccatcctggacaaggtgaagctggactcccctgcagggaccgctctgtcgccttctggccacaccaagctgctcccccgcagcctggccccagcgggcaaggattgacacgtcctgcctgaccaccatcctgccaccaccttctcttctcttgtcactagggggactagggggtccccaaagtggcccactttctgtggctctgatcagcgcaggggccagccagggacatagccagggaggggccacatcacttcccactggaaatctctgtggtctgcaagtgcttcccagcccagaacaggggtggattccccaacctcaacctcctttcttctctgctcccaaaccatgtcaggaccaccttcctctagagctcgggagcccggagggtcttcacccactcctactccagtatcagctggcacgggctccttcctgagagcaaaggtcaaggaccccctctgtgaaggctcagcagaggtgggatcccacgccccctcccggcccctccctgccctccattcagggagaaacctctccttcccgtgtgagaagggccagagggtccaggcatcccaagtccagcgtgaagggccacagcccctcttggctgccaagcacgcagatcccatggacatttggggaaagggctccttgggctgctggtgaacttctgtggccaccacctcctgctcctgacctccctgggagggtgctatcagttctgtcctggccctttcagttttataagttggtttccagcccccagtgtcctgacttctgtctgccacatgaggagggaggccctgcctgtgtgggagggtggttactgtgggtggaatagtggaggccttcaactgattagacaaggcccgcccacatcttggagggcatctgccttactgattaaaatgtcaatgtaatctaa

SEQ ID NO: 112940 - DNA, 645 bp, Homo sapiens
tcacaaagtgatgtaaataataaacattaaaattttcccaagtaatgatgacttaagcgttcaaaatccagttatgtgctttgttatgaaaacagtccaaacaaaaattcttttgttgttttctgttctctttttcaaaatacataaatcctactgaagttagtctattttttcccacttcagaacaccctcgtgccgaattcggcacgagcccctcccggcccctccctgccctccattcagggagaaacctctccttcccgtgtgagaagggccagagggtccaggcatcccaagtccagcgtgaagggccacagcccctcttggctgccaagcacgcagatcccatggacatttggggaaagggctccttgggctgctggtgaacttctgtggccaccacctcctgctcctgacctccctgggagggtgctatcagttctgtcctggccctttcagttttataagttggtttccagcccccagtgtcctgacttctgtctgccacatgaggagggaggccctgcctgtgtgggagggtggttactgtgggtggaatagtggaggccttcaactgattagacaaggcccgcccacatcttggagggcatctgccttactgattaaaatgtcaatgtaatctaa

SEQ ID NO: 112941 - DNA, 419 bp, Homo sapiens
agattacattgacattttaatcagtaaggcagatgccctccaagatgtgggcgggccttgtctaatcagttgaaggcctccactattccacccacagtaaccaccctcccacgcagatcccatggacatttggggaaagggctccttgggctgctggtgaacttctgtggccaccacctcctgctcctgacctccctgggagggtgctatcagttctgtcctggccctttcagttttataagttggtttccagcccccagtgtcctgacttctgtctgccacatgaggagggaggccctgcctgtgtgggagggtggttactgtgggtggaatagtggaggccttcaactgattagacaaggcccgcccacatcttggagggcatctgccttactgattaaaatgtcaatgtaatctaa

SEQ ID NO: 112942 - DNA, 334 bp, Homo sapiens
cttcagatgccagtcccaagtacagctgtccctttgtatccttgggggatgggatccagtacctccaaaacaccagaatccacaaggccagagtccctgatacaaaatggcatcccagttgcagataaccccctcctctggacttaaatcacctcttgattacttataacacctgaaccctgtgaaccccaggcaatgacagcaggatcctgaagcccatgcaggctctgaaccacgcggccatccagaaggggtgagataaatgttggggaaaccatccccgacccccgcgagccccaggagcccaggctgccgcctcctgcctcctacaccc

SEQ ID NO: 112943 - DNA, 2283 bp, Homo sapiens
cgacgggggcggggcctgggtgcgggtgccgcgtggcggccgcagcgctgaggggtgggtacgacccgcgcacggtagctgggttggggtcgggctccgggaatggtgggcggcggtcgccgggtggggcgcgacggtagcccagttctgggcggggtgggaacccagacgggggacccctaggcgccgggccctccctctccccgtacttttcccccttcccagtcatttcttctgcggaacctccacccctccagtgggtgcgggaccctaggcagcaggccaggcaccgccgctctgactgggggccccgaagcagttaacgggccggacagcaaagtggaaagttagaccagctgggaccaggggaggtgggcacccggctgcgggaggagcggccaggctggcactgcccccctaacttgctctcgatcctgccggtctcgtcccgcagagccggtgccatctgtgggggctttgggccagggtctccggacagcatgagcgtgggcttcatcggcgctggccagctggcttttgccctggccaagggcttcacagcagcaggcgtcttggctgcccacaagataatggctagctccccagacatggacctggccacagtttctgctctcaggaagatgggggtgaagttgacaccccacaacaaggagacggtgcagcacagtgatgtgctcttcctggctgtgaagccacacatcatccccttcatcctggatgaaataggcgccgacattgaggacagacacattgtggtgtcctgcgcggccggcgtcaccatcagctccattgagaagaagctgtcagcgtttcggccagcccccagggtcatccgctgcatgaccaacactccagtcgtggtgcgggagggggccaccgtgtatgccacaggcacgcacgcccaggtggaggacgggaggctcatggagcagctgctgagcagcgtgggcttctgcacggaggtggaagaggacctgattgatgccgtcacggggctcagtggcagcggccccgcctacgcattcacagccctggatgccctggctgatgggggtgtgaagatgggacttccaaggcgcctggcagtccgcctcggggcccaggccctcctgggggctgccaagatgctgctgcactcagaacagcacccaggccagctcaaggacaacgtcagctctcctggtggggccaccatccatgccttgcatgtgctggagagtgggggcttccgctccctgctcatcaacgctgtggaggcctcctgcatccgcacacgggagctgcagtccatggctgaccaggagcaggtgtcaccagccgccatcaagaagaccatcctggacaaggtgaagctggactcccctgcagggaccgctctgtcgccttctggccacaccaagctgctcccccgcagcctggccccagcgggcaaggattgacacgtcctgcctgaccaccatcctgccaccaccttctcttctcttgtcactagggggactagggggtccccaaagtggcccactttctgtggctctgatcagcgcaggggccagccagggacatagccagggaggggccacatcacttcccactggaaatctctgtggtctgcaagtgcttcccagcccagaacaggggtggattccccaacctcaacctcctttcttctctgctcccaaaccatgtcaggaccaccttcctctagagctcgggagcccggagggtcttcacccactcctactccagtatcagctggcacgggctccttcctgagagcaaaggtcaaggaccccctctgtgaaggctcagcagaggtgggatcccacgccccctcccggcccctccctgccctccattcagggagaaacctctccttcccgtgtgagaagggccagagggtccaggcatcccaagtccagcgtgaagggccacagcccctcttggctgccaagcacgcagatcccatggacatttggggaaagggctccttgggctgctggtgaacttctgtggccaccacctcctgctcctgacctccctgggagggtgctatcagttctgtcctggccctttcagttttataagttggtttccagcccccagtgtcctgacttctgtctgccacatgaggagggaggccctgcctgtgtgggagggtggttactgtgggtggaatagtggaggccttcaactgattagacaaggcccgcccacatcttggagggcatctgccttactgattaaaatgtcaatgtaatctaa

SEQ ID NO: 112944 - DNA, 1869 bp, Homo sapiens
tcaggcggtaccgcccggaattagggatcagcgctgagggagccggtgccatctgtgggggctttgggccagggtctccggacagcatgagcgtgggcttcatcggcgctggccagctggcttttgccctggccaagggcttcacagcagcaggcgtcttggctgcccacaagataatggctagctccccagacatggacctggccacagtttctgctctcaggaagatgggggtgaagttgacaccccacaacaaggagacggtgcagcacagtgatgtgctcttcctggctgtgaagccacacatcatccccttcatcctggatgaaataggcgccgacattgaggacagacacattgtggtgtcctgcgcggccggcgtcaccatcagctccattgagaagaagctgtcagcgtttcggccagcccccagggtcatccgctgcatgaccaacactccagtcgtggtgcgggagggggccaccgtgtatgccacaggcacgcacgcccaggtggaggacgggaggctcatggagcagctgctgagcagcgtgggcttctgcacggaggtggaagaggacctgattgatgccgtcacggggctcagtggcagcggccccgcctacgcattcacagccctggatgccctggctgatgggggtgtgaagatgggacttccaaggcgcctggcagtccgcctcggggcccaggccctcctgggggctgccaagatgctgctgcactcagaacagcacccaggccagctcaaggacaacgtcagctctcctggtggggccaccatccatgccttgcatgtgctggagagtgggggcttccgctccctgctcatcaacgctgtggaggcctcctgcatccgcacacgggagctgcagtccatggctgaccaggagcaggtgtcaccagccgccatcaagaagaccatcctggacaaggtgaagctggactcccctgcagggaccgctctgtcgccttctggccacaccaagctgctcccccgcagcctggccccagcgggcaaggattgacacgtcctgcctgaccaccatcctgccaccaccttctcttctcttgtcactagggggactagggggtccccaaagtggcccactttctgtggctctgatcagcgcaggggccagccagggacatagccagggaggggccacatcacttcccactggaaatctctgtggtctgcaagtgcttcccagcccagaacaggggtggattccccaacctcaacctcctttcttctctgctcccaaaccatgtcaggaccaccttcctctagagctcgggagcccggagggtcttcacccactcctactccagtatcagctggcacgggctccttcctgagagcaaaggtcaaggaccccctctgtgaaggctcagcagaggtgggatcccacgccccctcccggcccctccctgccctccattcagggagaaacctctccttcccgtgtgagaagggccagagggtccaggcatcccaagtccagcgtgaagggccacagcccctcttggctgccaagcacgcagatcccatggacatttggggaaagggctccttgggctgctggtgaacttctgtggccaccacctcctgctcctgacctccctgggagggtgctatcagttctgtcctggccctttcagttttataagttggtttccagcccccagtgtcctgacttctgtctgccacatgaggagggaggccctgcctgtgtgggagggtggttactgtgggtggaatagtggaggccttcaactgattagacaaggcccgcccacatcttggagggcatctgccttactgattaaaatgtcaatgtaatctaa

SEQ ID NO: 112945 - DNA, 1883 bp, Homo sapiens
aaagtaggctaggtacgaggctgggtgtgactccgctctacggtggacacagcggccctgggaagcagctccgggctttgggccagggtctccggacagcatgagcgtgggcttcatcggcgctggccagctggcttttgccctggccaagggcttcacagcagcaggcgtcttggctgcccacaagataatggctagctccccagacatggacctggccacagtttctgctctcaggaagatgggggtgaagttgacaccccacaacaaggagacggtgcagcacagtgatgtgctcttcctggctgtgaagccacacatcatccccttcatcctggatgaaataggcgccgacattgaggacagacacattgtggtgtcctgcgcggccggcgtcaccatcagctccattgagaagaagctgtcagcgtttcggccagcccccagggtcatccgctgcatgaccaacactccagtcgtggtgcgggagggggccaccgtgtatgccacaggcacgcacgcccaggtggaggacgggaggctcatggagcagctgctgagcagcgtgggcttctgcacggaggtggaagaggacctgattgatgccgtcacggggctcagtggcagcggccccgcctacgcattcacagccctggatgccctggctgatgggggtgtgaagatgggacttccaaggcgcctggcagtccgcctcggggcccaggccctcctgggggctgccaagatgctgctgcactcagaacagcacccaggccagctcaaggacaacgtcagctctcctggtggggccaccatccatgccttgcatgtgctggagagtgggggcttccgctccctgctcatcaacgctgtggaggcctcctgcatccgcacacgggagctgcagtccatggctgaccaggagcaggtgtcaccagccgccatcaagaagaccatcctggacaaggtgaagctggactcccctgcagggaccgctctgtcgccttctggccacaccaagctgctcccccgcagcctggccccagcgggcaaggattgacacgtcctgcctgaccaccatcctgccaccaccttctcttctcttgtcactagggggactagggggtccccaaagtggcccactttctgtggctctgatcagcgcaggggccagccagggacatagccagggaggggccacatcacttcccactggaaatctctgtggtctgcaagtgcttcccagcccagaacaggggtggattccccaacctcaacctcctttcttctctgctcccaaaccatgtcaggaccaccttcctctagagctcgggagcccggagggtcttcacccactcctactccagtatcagctggcacgggctccttcctgagagcaaaggtcaaggaccccctctgtgaaggctcagcagaggtgggatcccacgccccctcccggcccctccctgccctccattcagggagaaacctctccttcccgtgtgagaagggccagagggtccaggcatcccaagtccagcgtgaagggccacagcccctcttggctgccaagcacgcagatcccatggacatttggggaaagggctccttgggctgctggtgaacttctgtggccaccacctcctgctcctgacctccctgggagggtgctatcagttctgtcctggccctttcagttttataagttggtttccagcccccagtgtcctgacttctgtctgccacatgaggagggaggccctgcctgtgtgggagggtggttactgtgggtggaatagtggaggccttcaactgattagacaaggcccgcccacatcttggagggcatctgccttactgattaaaatgtcaatgtaatctaa

SEQ ID NO: 112946 - DNA, 2024 bp, Homo sapiens
cgacgggggcggggcctgggtgcgggtgccgcgtggcggccgcagcgctgagggagccggtgccatctgtgggggctttgggccagggtctccggacagcatgagcgtgggcttcatcggcgctggccagctggcttttgccctggccaagggcttcacagcagcaggcgtcttggctgcccacaagataatggctagctccccagacatggacctggccacagtttctgctctcaggaagatgggggtgaagttgacaccccacaacaaggagacggtgcagcacagtgatgtgctcttcctggctgtgaagccacacatcatccccttcatcctggatgaaataggcgccgacattgaggacagacacattgtggtgtcctgcgcggccggcgtcaccatcagctccattgagaagaagctgtcagcgtttcggccagcccccagggtcatccgctgcatgaccaacactccagtcgtggtgcgggagggggccaccgtgtatgccacaggcacgcacgcccaggtggaggacgggaggctcatggagcagctgctgagcagcgtgggcttctgcacggaggtggaagaggacctgattgatgccgtcacggggctcagtggcagcggccccgcctacgcattcacagccctggatgccctggctgatgggggtgtgaagatgggacttccaaggcgcctggcagtccgcctcggggcccaggccctcctgggggctgccaagatgctgctgcactcagaacagcacccaggccagctcaaggacaacgtcagctctcctggtggggccaccatccatgccttgcatgtgctggagagtgggggcttccgctccctgctcatcaacgctgtggaggcctcctgcatccgcacacgggagctgcagtccatggctgaccaggagcaggtgtcaccagccgccatcaagaagaccatcctggacaaggtgaagctggactcccctgcagggaccgctctgtcgccttctggccacaccaagctgctcccccgcagcctggccccagcgggcaaggattgacacgtcctgcctgaccaccatcctgccaccaccttctcttctcttgtcactagggggactagggggtccccaaagtggcccactttctgtggctctgatcagcgcaggggccagccagggacatagccagggaggggccacatcacttcccactggaaatctctgtggtctgcaagtgcttcccagcccagaacaggggtggattccccaacctcaacctcctttcttctctgctcccaaaccatgtcaggaccaccttcctctagagctcgggagcccggagggtcttcacccactcctactccagtatcagctggcacgggctccttcctgagagcaaaggtcaaggaccccctctgtgaaggctcagcagaggtgggatcccacgccccctcccggcccctccctgccctccattcagggagaaacctctccttcccgtgtgagaagggccagagggtccaggcatcccaagtccagcgtgaagggccacagcccctcttggctgccaagcacgcagatcccatggacatttggggaaagggctccttgggctgctggtgaacttctgtggccaccacctcctgctcctgacctccctgggagggtgctatcagttctgtcctggccctttcagttttataagttggtttccagcccccagtgtcctgacttctgtctgccacatgaggagggaggccctgcctgtgtgggagggtggttactgtgggtggaatagtggaggccttcaactgattagacaaggcccgcccacatcttggagggcatctgccttactgattaaaatgtcaatgtaatctaaaaataactattatttctttgttaatttaaatactgagcgtttaatattctgaactgtattggatcctccctttttgtttaaaaaaaaatctctggggggggccccggcccctaaatccctaatagggacttttttcaaaag

SEQ ID NO: 112947 - DNA, 1942 bp, Homo sapiens
cgacgggggcggggcctgggtgcgggtgccgcgtggcggccgcagcgctgagggagccggtgccatctgtgggggctttgggccagggtctccggacagcatgagcgtgggcttcatcggcgctggccagctggcttttgccctggccaagggcttcacagcagcaggcgtcttggctgcccacaagataatggctagctccccagacatggacctggccacagtttctgctctcaggaagatgggggtgaagttgacaccccacaacaaggagacggtgcagcacagtgatgtgctcttcctggctgtgaagccacacatcatccccttcatcctggatgaaataggcgccgacattgaggacagacacattgtggtgtcctgcgcggccggcgtcaccatcagctccattgagaagaagctgtcagcgtttcggccagcccccagggtcatccgctgcatgaccaacactccagtcgtggtgcgggagggggccaccgtgtatgccacaggcacgcacgcccaggtggaggacgggaggctcatggagcagctgctgagcagcgtgggcttctgcacggaggtggaagaggacctgattgatgccgtcacggggctcagtggcagcggccccgcctacgcattcacagccctggatgccctggctgatgggggtgtgaagatgggacttccaaggcgcctggcagtccgcctcggggcccaggccctcctgggggctgccaagatgctgctgcactcagaacagcacccaggccagctcaaggacaacgtcagctctcctggtggggccaccatccatgccttgcatgtgctggagagtgggggcttccgctccctgctcatcaacgctgtggaggcctcctgcatccgcacacgggagctgcagtccatggctgaccaggagcaggtgtcaccagccgccatcaagaagaccatcctggacaaggtgaagctggactcccctgcagggaccgctctgtcgccttctggccacaccaagctgctcccccgcagcctggccccagcgggcaaggattgacacgtcctgcctgaccaccatcctgccaccaccttctcttctcttgtcactagggggactagggggtccccaaagtggcccactttctgtggctctgatcagcgcaggggccagccagggacatagccagggaggggccacatcacttcccactggaaatctctgtggtctgcaagtgcttcccagcccagaacaggggtggattccccaacctcaacctcctttcttctctgctcccaaaccatgtcaggaccaccttcctctagagctcgggagcccggagggtcttcacccactcctactccagtatcagctggcacgggctccttcctgagagcaaaggtcaaggaccccctctgtgaaggctcagcagaggtgggatcccacgccccctcccggcccctccctgccctccattcagggagaaacctctccttcccgtgtgagaagggccagagggtccaggcatcccaagtccagcgtgaagggccacagcccctcttggctgccaagcacgcagatcccatggacatttggggaaagggctccttgggctgctggtgaacttctgtggccaccacctcctgctcctgacctccctgggagggtgctatcagttctgtcctggccctttcagttttataagttggtttccagcccccagtgtcctgacttctgtctgccacatgaggagggaggccctgcctgtgtgggagggtggttactgtgggtggaatagtggaggccttcaactgattagacaaggcccgcccacatcttggagggcatctgccttactgattaaaatgtcaatgtaatctaacttagcgtcgagttcctcacttacttttatcctttactcttgtatgatttatactcctt

SEQ ID NO: 112948 - DNA, 2579 bp, Homo sapiens
cgacgggggcggggcctgggtgcgggtgccgcgtggcggccgcagcgctgagggagccggtgccatctgtgggggctttgggccagggtctccggacagcatgagcgtgggcttcatcggcgctggccagctggcttttgccctggccaagggcttcacagcagcaggcgtcttggctgcccacaagataatggctagctccccagacatggacctggccacagtttctgctctcaggaagatgggggtgaagttgacaccccacaacaaggagacggtgcagcacagtgatgtgctcttcctggctgtgaagccacacatcatccccttcatcctggatgaaataggcgccgacattgaggacagacacattgtggtgtcctgcgcggccggcgtcaccatcagctccattgagaagaagctgtcagcgtttcggccagcccccagggtcatccgctgcatgaccaacactccagtcgtggtgcgggagggggccaccgtgtatgccacaggcacgcacgcccaggtggaggacgggaggctcatggagcagctgctgagcagcgtgggcttctgcacggaggtggaagaggacctgattgatgccgtcacggggctcagtggcagcggccccgcctacgcattcacagccctggatgccctggctgatgggggtgtgaagatgggacttccaaggcgcctggcagtccgcctcggggcccaggccctcctgggggctgccaagatgctgctgcactcagaacagcacccaggccagctcaaggacaacgtcagctctcctggtggggccaccatccatgccttgcatgtgctggagagtgggggcttccgctccctgctcatcaacgctgtggaggcctcctgcatccgcacacgggagctgcagtccatggctgaccaggagcaggtgtcaccagccgccatcaagaagaccatcctggacaaggtgaagctggactcccctgcagggaccgctctgtcgccttctggccacaccaagctgctcccccgcagcctggccccagcgggcaaggattgacacgtcctgcctgaccaccatcctgccaccaccttctcttctcttgtcactagggggactagggggtccccaaagtggcccactttctgtggctctgatcagcgcaggggccagccagggacatagccagggaggggccacatcacttcccactggaaatctctgtggtctgcaagtgcttcccagcccagaacaggggtggattccccaacctcaacctcctttcttctctgctcccaaaccatgtcaggaccaccttcctctagagctcgggagcccggagggtcttcacccactcctactccagtatcagctggcacgggctccttcctgagagcaaaggtcaaggaccccctctgtgaaggctcagcagaggtgggatcccacgccccctcccggcccctccctgccctccattcagggagaaacctctccttcccgtgtgagaagggccagagggtccaggcatcccaagtccagcgtgaagggccacagcccctcttggctgccaagcacgcagatcccatggacatttggggaaagggctccttgggctgctggtgaacttctgtggccaccacctcctgctcctgacctccctgggagggtgctatcagttctgtcctggccctttcagttttataagttggtttccagcccccagtgtcctgacttctgtctgccacatgaggagggaggccctgcctgtgtgggagggtggttactgtgggtggaatagtggaggccttcaactgattagacaaggcccgcccacatcttggagggccttgtgctatcagatctgtccatggccctttacagatataataagtcggtacaccagaaccaccagatgtactgacttctgtcatgcacatgacggagggacgccatgacatgatgtgggagggcatggctcaaccatgtgtcgtgggcaactacgtggaggcactttcaacctgattagcaacaaggcccgccccaacatcatagaagaggaaatctgggcataacagaatacaatgtcaacatgtaatctacaacaacagaaacaaaaacacacgaaaagacatccgcagagagacatatgaccagagcaggagaaacggagagagaactcatcatcaacaacggcaaacgccgcgccagcgccccaagcatcagacaaaagagaggaaaccgaagagacaaccaaagacgggagcgaacaacgcacagaacacgcagtaacacgaccaacgaccggcgagaccaaggcgaagcacgaggcgcaggaggacggagagcgacaggaccgggacatcacacttgtgcacacaacccgcgccgacgcaacgccagagagcaccacaagacttcccgcccaaaacaaccaacagattggacaaacagaactcagaaaaccctccacacaccaggtccagcgcatcacagagagaaggacgagaagcagcagaagccgagcgacccgcagacccaacgcgcagccaacgacgccgcacacccgcaggccccggtg

SEQ ID NO: 112949 - DNA, 1560 bp, Homo sapiens
  misc_feature (1428)..(1428): n is a, c, g, or t
cgacgggggcggggcctgggtgcgggtgccgcgtggcggccgcagcgctgagggagccggtgccatctgtgggggctttgggccagggtctccggacagcatgagcgtgggcttcatcggcgctggccagctggcttttgccctggccaagggcttcacagcagcaggcgtcttggctgcccacaagataatggctagctccccagacatggacctggccacagtttctgctctcaggaagatgggggtgaagttgacaccccacaacaaggagacggtgcagcacagtgatgtgctcttcctggctgtgaagccacacatcatccccttcatcctggatgaaataggcgccgacattgaggacagacacattgtggtgtcctgcgcggccggcgtcaccatcagctccattgagaagaagctgtcagcgtttcggccagcccccagggtcatccgctgcatgaccaacactccagtcgtggtgcgggagggggccaccgtgtatgccacaggcacgcacgcccaggtggaggacgggaggctcatggagcagctgctgagcagcgtgggcttctgcacggaggtggaagaggacctgattgatgccgtcacggggctcagtggcagcggccccgcctacgcattcacagccctggatgccctggctgatgggggtgtgaagatgggacttccaaggcgcctggcagtccgcctcggggcccaggccctcctgggggctgccaagatgctgctgcactcagaacagcacccaggccagctcaaggacaacgtcagctctcctggtggggccaccatccatgccttgcatgtgctggagagtgggggcttccgctccctgctcatcaacgctgtggaggcctcctgcatccgcacacgggagctgcagtccatggctgaccaggagcaggtgtcaccagccgccatcaagaagaccatcctggacaaggtgaagctggactcccctgcagggaccgctctgtcgccttctggccacaccaagctgctcccccgcagcctggccccagcgggcaaggattgacacgtcctgcctgaccaccatcctgccaccaccttctcttctcttgtcactagggggactagggggtccccaaagtggcccactttctgtggctctgatcagcgcaggggccagccagggacatagccagggaggggccacatcacttcccactggaaatctctgtggtctgcaagtgcttcccagcccagaacaggggtggattccccaacctcaacctcctttcttctctgctcccaaaccatgtcaggaccaccttcctctagagctcgggagcccggagggtcttcacccactcctactccagtatcagctggcacgggctccttcctgagagcaaaggtcaaggaccccctctgtgaaggcanaaggtggattccggccttccggcctcgctcataaggaaaacctctcggagaaagcaaggcggtcacacgaaggcaccctggaacgacagatggcaggctggggatgacccggcccgcgggcatgcgccctag

SEQ ID NO: 112950 - DNA, 1579 bp, Homo sapiens
cgacgggggcggggcctgggtgcgggtgccgcgtggcggccgcagcgctgagggagccggtgccatctgtgggggctttgggccagggtctccggacagcatgagcgtgggcttcatcggcgctggccagctggcttttgccctggccaagggcttcacagcagcaggcgtcttggctgcccacaagataatggctagctccccagacatggacctggccacagtttctgctctcaggaagatgggggtgaagttgacaccccacaacaaggagacggtgcagcacagtgatgtgctcttcctggctgtgaagccacacatcatccccttcatcctggatgaaataggcgccgacattgaggacagacacattgtggtgtcctgcgcggccggcgtcaccatcagctccattgagaagaagctgtcagcgtttcggccagcccccagggtcatccgctgcatgaccaacactccagtcgtggtgcgggagggggccaccgtgtatgccacaggcacgcacgcccaggtggaggacgggaggctcatggagcagctgctgagcagcgtgggcttctgcacggaggtggaagaggacctgattgatgccgtcacggggctcagtggcagcggccccgcctacgcattcacagccctggatgccctggctgatgggggtgtgaagatgggacttccaaggcgcctggcagtccgcctcggggcccaggccctcctgggggctgccaagatgctgctgcactcagaacagcacccaggccagctcaaggacaacgtcagctctcctggtggggccaccatccatgccttgcatgtgctggagagtgggggcttccgctccctgctcatcaacgctgtggaggcctcctgcatccgcacacgggagctgcagtccatggctgaccaggagcaggtgtcaccagccgccatcaagaagaccatcctggacaaggtgaagctggactcccctgcagggaccgctctgtcgccttctggccacaccaagctgctcccccgcagcctggccccagcgggcaaggattgacacgtcctgcctgaccaccatcctgccaccaccttctcttctcttgtcactagggggactagggggtccccaaagtggcccactttctgtggctctgatcagcgcaggggccagccagggacatagccagggaggggccacatcacttcccactggaaatctctgtggtctgcaagtgcttcccagcccagaacaggggtggattccccaacctcaacctcctttcttctctgctcccaaaccatgtcaggaccaccttcctctagagctcgggagcccggagggtcttcacccactcctactccagtatcagctggcacgggcccctttcagttttataagttggtttccagcccccagtgtcctgacttctgtctgccacatgaggagggaggccctgcctgtgtgggagggtggttactgtgggtggaatagtggaggccttcaactgattagacaaggcccgcccacatcttggagggcatctgccttactgattaaaatgtcaatgtaatctaa

SEQ ID NO: 112951 - DNA, 1719 bp, Homo sapiens
cgacgggggcggggcctgggtgcgggtgccgcgtggcggccgcagcgctgagggagccggtgccatctgtgggggctttgggccagggtctccggacagcatgagcgtgggcttcatcggcgctggccagctggcttttgccctggccaagggcttcacagcagcaggcgtcttggctgcccacaagataatggctagctccccagacatggacctggccacagtttctgctctcaggaagatgggggtgaagttgacaccccacaacaaggagacggtgcagcacagtgatgtgctcttcctggctgtgaagccacacatcatccccttcatcctggatgaaataggcgccgacattgaggacagacacattgtggtgtcctgcgcggccggcgtcaccatcagctccattgagaagaagctgtcagcgtttcggccagcccccagggtcatccgctgcatgaccaacactccagtcgtggtgcgggagggggccaccgtgtatgccacaggcacgcacgcccaggtggaggacgggaggctcatggagcagctgctgagcagcgtgggcttctgcacggaggtggaagaggacctgattgatgccgtcacggggctcagtggcagcggccccgcctacgcattcacagccctggatgccctggctgatgggggtgtgaagatgggacttccaaggcgcctggcagtccgcctcggggcccaggccctcctgggagctgcagtccatggctgaccaggagcaggtgtcaccagccgccatcaagaagaccatcctggacaaggtgaagctggactcccctgcagggaccgctctgtcgccttctggccacaccaagctgctcccccgcagcctggccccagcgggcaaggattgacacgtcctgcctgaccaccatcctgccaccaccttctcttctcttgtcactagggggactagggggtccccaaagtggcccactttctgtggctctgatcagcgcaggggccagccagggacatagccagggaggggccacatcacttcccactggaaatctctgtggtctgcaagtgcttcccagcccagaacaggggtggattccccaacctcaacctcctttcttctctgctcccaaaccatgtcaggaccaccttcctctagagctcgggagcccggagggtcttcacccactcctactccagtatcagctggcacgggctccttcctgagagcaaaggtcaaggaccccctctgtgaaggctcagcagaggtgggatcccacgccccctcccggcccctccctgccctccattcagggagaaacctctccttcccgtgtgagaagggccagagggtccaggcatcccaagtccagcgtgaagggccacagcccctcttggctgccaagcacgcagatcccatggacatttggggaaagggctccttgggctgctggtgaacttctgtggccaccacctcctgctcctgacctccctgggagggtgctatcagttctgtcctggccctttcagttttataagttggtttccagcccccagtgtcctgacttctgtctgccacatgaggagggaggccctgcctgtgtgggagggtggttactgtgggtggaatagtggaggccttcaactgattagacaaggcccgcccacatcttggagggcatctgccttactgattaaaatgtcaatgtaatctaa

SEQ ID NO: 112952 - DNA, 2119 bp, Homo sapiens
cgacgggggcggggcctgggtgcgggtgccgcgtggcggccgcagcgctgaggggtgggtacgacccgcgcacggtagctgggttggggtcgggctccgggaatggtgggcggcggtcgccgggtggggcgcgacggtagcccagttctgggcggggtgggaacccagacgggggacccctaggcgccgggccctccctctccccgtacttttcccccttcccagtcatttcttctgcggaacctccacccctccagtgggtgcgggaccctaggcagcaggccaggcaccgccgctctgactgggggccccgaagcagttaacgggccggacagcaaagtggaaagttagaccagctgggaccaggggaggtgggcacccggctgcgggaggagcggccaggctggcactgcccccctaacttgctctcgatcctgccggtctcgtcccgcagagccggtgccatctgtgggggctttgggccagggtctccggacagcatgagcgtgggcttcatcggcgctggccagctggcttttgccctggccaagggcttcacagcagcaggcgtcttggctgcccacaagataatggctagctccccagacatggacctggccacagtttctgctctcaggaagatgggggtgaagttgacaccccacaacaaggagacggtgcagcacagtgatgtgctcttcctggctgtgaagccacacatcatccccttcatcctggatgaaataggcgccgacattgaggacagacacattgtggtgtcctgcgcggccggcgtcaccatcagctccattgagaagaagctgtcagcgtttcggccagcccccagggtcatccgctgcatgaccaacactccagtcgtggtgcgggagggggccaccgtgtatgccacaggcacgcacgcccaggtggaggacgggaggctcatggagcagctgctgagcagcgtgggcttctgcacggaggtggaagaggacctgattgatgccgtcacggggctcagtggcagcggccccgcctacgcattcacagccctggatgccctggctgatgggggtgtgaagatgggacttccaaggcgcctggcagtccgcctcggggcccaggccctcctgggagctgcagtccatggctgaccaggagcaggtgtcaccagccgccatcaagaagaccatcctggacaaggtgaagctggactcccctgcagggaccgctctgtcgccttctggccacaccaagctgctcccccgcagcctggccccagcgggcaaggattgacacgtcctgcctgaccaccatcctgccaccaccttctcttctcttgtcactagggggactagggggtccccaaagtggcccactttctgtggctctgatcagcgcaggggccagccagggacatagccagggaggggccacatcacttcccactggaaatctctgtggtctgcaagtgcttcccagcccagaacaggggtggattccccaacctcaacctcctttcttctctgctcccaaaccatgtcaggaccaccttcctctagagctcgggagcccggagggtcttcacccactcctactccagtatcagctggcacgggctccttcctgagagcaaaggtcaaggaccccctctgtgaaggctcagcagaggtgggatcccacgccccctcccggcccctccctgccctccattcagggagaaacctctccttcccgtgtgagaagggccagagggtccaggcatcccaagtccagcgtgaagggccacagcccctcttggctgccaagcacgcagatcccatggacatttggggaaagggctccttgggctgctggtgaacttctgtggccaccacctcctgctcctgacctccctgggagggtgctatcagttctgtcctggccctttcagttttataagttggtttccagcccccagtgtcctgacttctgtctgccacatgaggagggaggccctgcctgtgtgggagggtggttactgtgggtggaatagtggaggccttcaactgattagacaaggcccgcccacatcttggagggcatctgccttactgattaaaatgtcaatgtaatctaa

SEQ ID NO: 112953 - DNA, 1858 bp, Homo sapiens
cgacgggggcggggcctgggtgcgggtgccgcgtggcggccgcagcgctgagggagccggtgccatctgtgggggctttgggccagggtctccggacagcatgagcgtgggcttcatcggcgctggccagctggcttttgccctggccaagggcttcacagcagcaggcgtcttggctgcccacaagataatggctagctccccagacatggacctggccacagtttctgctctcaggaagatgggggtgaagttgacaccccacaacaaggagacggtgcagcacagtgatgtgctcttcctggctgtgaagccacacatcatccccttcatcctggatgaaataggcgccgacattgaggacagacagtcaccatcagctccattgagaagaagctgtcagcgtttcggccagcccccagggtcatccgctgcatgaccaacactccagtcgtggtgcgggagggggccaccgtgtatgccacaggcacgcacgcccaggtggaggacgggaggctcatggagcagctgctgagcagcgtgggcttctgcacggaggtggaagaggacctgattgatgccgtcacggggctcagtggcagcggccccgcctacgcattcacagccctggatgccctggctgatgggggtgtgaagatgggacttccaaggcgcctggcagtccgcctcggggcccaggccctcctgggggctgccaagatgctgctgcactcagaacagcacccaggccagctcaaggacaacgtcagctctcctggtggggccaccatccatgccttgcatgtgctggagagtgggggcttccgctccctgctcatcaacgctgtggaggcctcctgcatccgcacacgggagctgcagtccatggctgaccaggagcaggtgtcaccagccgccatcaagaagaccatcctggacaaggtgaagctggactcccctgcagggaccgctctgtcgccttctggccacaccaagctgctcccccgcagcctggccccagcgggcaaggattgacacgtcctgcctgaccaccatcctgccaccaccttctcttctcttgtcactagggggactagggggtccccaaagtggcccactttctgtggctctgatcagcgcaggggccagccagggacatagccagggaggggccacatcacttcccactggaaatctctgtggtctgcaagtgcttcccagcccagaacaggggtggattccccaacctcaacctcctttcttctctgctcccaaaccatgtcaggaccaccttcctctagagctcgggagcccggagggtcttcacccactcctactccagtatcagctggcacgggctccttcctgagagcaaaggtcaaggaccccctctgtgaaggctcagcagaggtgggatcccacgccccctcccggcccctccctgccctccattcagggagaaacctctccttcccgtgtgagaagggccagagggtccaggcatcccaagtccagcgtgaagggccacagcccctcttggctgccaagcacgcagatcccatggacatttggggaaagggctccttgggctgctggtgaacttctgtggccaccacctcctgctcctgacctccctgggagggtgctatcagttctgtcctggccctttcagttttataagttggtttccagcccccagtgtcctgacttctgtctgccacatgaggagggaggccctgcctgtgtgggagggtggttactgtgggtggaatagtggaggccttcaactgattagacaaggcccgcccacatcttggagggcatctgccttactgattaaaatgtcaatgtaatctaa

SEQ ID NO: 112954 - DNA, 1311 bp, Homo sapiens
cgacgggggcggggcctgggtgcgggtgccgcgtggcggccgcagcgctgagggagccggtgccatctgtgggggctttgggccagggtctccggacagcatgagcgtgggcttcatcggcgctggccagctggcttttgccctggccaagggcttcacagcagcaggcgtcttggctgcccacaagataatggctagctccccagacatggacctggccacagtttctgctctcaggaagatgggggtgaagttgacaccccacaacaaggagacggtgcagcacagtgatgtgctcttcctggctgtgaagccacacatcatccccttcatcctggatgaaataggcgccgacattgaggacagacacattgtggtgtcctgcgcggccggcgtcaccatcagctccattgagaagaagctgtcagcgtttcggccagcccccagggtcatccgctgcatgaccaacactccagtcgtggtgcgggagggggccaccgtgtatgccacaggcacgcacgcccaggtggaggacgggaggctcatggagcagctgctgagcagcgtgggcttctgcacggaggtggaagaggacctgattgatgccgtcacggggctcagtggcagcggccccgcctacgcattcacagccctggatgccctggctgatgggggtgtgaagatgggacttccaaggcgcctggcagtccgcctcggggcccaggccctcctgggggctgccaagatgctgctgcactcagaacagcacccaggccagctcaaggacaacgtcagctctcctggtggggccaccatccatgccttgcatgtgctggagagtgggggcttccgctccctgctcatcaacgctgtggaggcctcctgcatccgcacacgcggtgggcccccgcgctgcccgcttccctggtctccagtccttgcatggcagaggcctctctcacacacatctgctcattcacgcactcagcagatacgtattgagctccagcccagtgttgcgcaggacacagggggccccgaggttccctgggttactgtgggcagtgcccctccccaccttccgtttcctgcgaggagggaacatccatagagggacccggatgctgtgccctgtgctccccacataggttcaccattgtcatagctaggagtgtcatttgagccaggggccacaccagtggggtggcgggggtggcagccaccattaggaaacttctgtgggggcccaccttcctcctgcctcggtgggggattaagttagaccagtaggacacgcagcaacatccaggc

SEQ ID NO: 112955 - DNA, 1366 bp, Homo sapiens
tcttagtagcccgggttaatcggacgaggggagcagctgctgagcagcgtgggcttctgcacggaggtggaagaggacctgattgatgccgtcacggggctcagtggcagcggccccgcctacgcattcacagccctggatgccctggctgatgggggtgtgaagatgggacttccaaggcgcctggcagtccgcctcggggcccaggccctcctgggggctgccaagatgctgctgcactcagaacagcacccaggccagctcaaggacaacgtcagctctcctggtggggccaccatccatgccttgcatgtgctggagagtgggggcttccgctccctgctcatcaacgctgtggaggcctcctgcatccgcacacgggagctgcagtccatggctgaccaggagcaggtgtcaccagccgccatcaagaagaccatcctggacaaggtgaagctggactcccctgcagggaccgctctgtcgccttctggccacaccaagctgctcccccgcagcctggccccagcgggcaaggattgacacgtcctgcctgaccaccatcctgccaccaccttctcttctcttgtcactagggggactagggggtccccaaagtggcccactttctgtggctctgatcagcgcaggggccagccagggacatagccagggaggggccacatcacttcccactggaaatctctgtggtctgcaagtgcttcccagcccagaacaggggtggattccccaacctcaacctcctttcttctctgctcccaaaccatgtcaggaccaccttcctctagagctcgggagcccggagggtcttcacccactcctactccagtatcagctggcacgggctccttcctgagagcaaaggtcaaggaccccctctgtgaaggctcagcagaggtgggatcccacgccccctcccggcccctccctgccctccattcagggagaaacctctccttcccgtgtgagaagggccagagggtccaggcatcccaagtccagcgtgaagggccacagcccctcttggctgccaagcacgcagatcccatggacatttggggaaagggctccttgggctgctggtgaacttctgtggccaccacctcctgctcctgacctccctgggagggtgctatcagttctgtcctggccctttcagttttataagttggtttccagcccccagtgtcctgacttctgtctgccacatgaggagggaggccctgcctgtgtgggagggtggttactgtgggtggaatagtggaggccttcaactgattagacaaggcccgcccacatcttggagggcatctgccttactgattaaaatgtcaatgtaatctaa

SEQ ID NO: 112956 - DNA, 1646 bp, Homo sapiens
cgacgggggcggggcctgggtgcgggtgccgcgtggcggccgcagcgctgaggggtgggtacgacccgcgcacgagccggtgccatctgtgggggctttgggccagggtctccggacagcatgagcgtgggcttcatcggcgctggccagctggcttttgccctggccaagggcttcacagcagcaggcgtcttggctgcccacaagataatggctagctccccagacatggacctggccacagtttctgctctcaggaagatgggggtgaagttgacaccccacaacaaggagacggtgcagcacagtgatgtgctcttcctggctgtgaagccacacatcatccccttcatcctggatgaaataggcgccgacattgaggacagacacattgtggtgtcctgcgcggccggcgtcaccatcagctccattgagaagaagctgtcagcgtttcggccagcccccagggtcatccgctgcatgaccaacactccagtcgtggtgcgggagggggccaccgtgtatgccacaggcacgcacgcccaggtggaggacgggaggctcatggagcagctgctgagcagcgtgggcttctgcacggaggtggaagaggacctgattgatgccgtcacggggctcagtggcagcggccccgcctacggagctgcagtccatggctgaccaggagcaggtgtcaccagccgccatcaagaagaccatcctggacaaggtgaagctggactcccctgcagggaccgctctgtcgccttctggccacaccaagctgctcccccgcagcctggccccagcgggcaaggattgacacgtcctgcctgaccaccatcctgccaccaccttctcttctcttgtcactagggggactagggggtccccaaagtggcccactttctgtggctctgatcagcgcaggggccagccagggacatagccagggaggggccacatcacttcccactggaaatctctgtggtctgcaagtgcttcccagcccagaacaggggtggattccccaacctcaacctcctttcttctctgctcccaaaccatgtcaggaccaccttcctctagagctcgggagcccggagggtcttcacccactcctactccagtatcagctggcacgggctccttcctgagagcaaaggtcaaggaccccctctgtgaaggctcagcagaggtgggatcccacgccccctcccggcccctccctgccctccattcagggagaaacctctccttcccgtgtgagaagggccagagggtccaggcatcccaagtccagcgtgaagggccacagcccctcttggctgccaagcacgcagatcccatggacatttggggaaagggctccttgggctgctggtgaacttctgtggccaccacctcctgctcctgacctccctgggagggtgctatcagttctgtcctggccctttcagttttataagttggtttccagcccccagtgtcctgacttctgtctgccacatgaggagggaggccctgcctgtgtgggagggtggttactgtgggtggaatagtggaggccttcaactgattagacaaggcccgcccacatcttggagggcatctgccttactgattaaaatgtcaatgtaatctaa

SEQ ID NO: 112957 - DNA, 1488 bp, Homo sapiens
cgacgggggcggggcctgggtgcgggtgccgcgtggcggccgcagcgctgagggagccggtgccatctgtgggggctttgggccagggtctccggacagcatgagcgtgggcttcatcggcgctggccagctggcttttgccctggccaagggcttcacagcagcaggcgtcttggctgcccacaagataatggctagctccccagacatggacctggccacagtttctgctctcaggaagatgggggtgaagttgacaccccacaacaaggagacggtgcagcacagtgatgtgctcttcctggctgtgaagccacacatcatccccttcatcctggatgaaataggcgccgacattgaggacagacacattgtggtgtcctgcgcggccggcgtcaccatcagctccattgagaagaagctgtcagcgtttcggccagcccccagggtcatccgctgcatgaccaacactccagtcgtggtgcgggagggggccaccgtgtatgccacaggcacgcacgcccaggtggaggacgggaggctcatggagcagctgctgagcagcgtgggcttctgcacggaggtggaagaggacctgattgatgccgtcacggggctcagtggcagcggccccgcctaccctggccccagcgggcaaggattgacacgtcctgcctgaccaccatcctgccaccaccttctcttctcttgtcactagggggactagggggtccccaaagtggcccactttctgtggctctgatcagcgcaggggccagccagggacatagccagggaggggccacatcacttcccactggaaatctctgtggtctgcaagtgcttcccagcccagaacaggggtggattccccaacctcaacctcctttcttctctgctcccaaaccatgtcaggaccaccttcctctagagctcgggagcccggagggtcttcacccactcctactccagtatcagctggcacgggctccttcctgagagcaaaggtcaaggaccccctctgtgaaggctcagcagaggtgggatcccacgccccctcccggcccctccctgccctccattcagggagaaacctctccttcccgtgtgagaagggccagagggtccaggcatcccaagtccagcgtgaagggccacagcccctcttggctgccaagcacgcagatcccatggacatttggggaaagggctccttgggctgctggtgaacttctgtggccaccacctcctgctcctgacctccctgggagggtgctatcagttctgtcctggccctttcagttttataagttggtttccagcccccagtgtcctgacttctgtctgccacatgaggagggaggccctgcctgtgtgggagggtggttactgtgggtggaatagtggaggccttcaactgattagacaaggcccgcccacatcttggagggcatctgccttactgattaaaatgtcaatgtaatctaa

SEQ ID NO: 112958 - DNA, 1096 bp, Homo sapiens
accacaaagattccagtgggaagtgatgtggcccctccctggctgatgggggtgtgaagatgggacttccaaggcgcctggcagtccgcctcggggcccaggccctcctgggagctgcagtccatggctgaccaggagcaggtgtcaccagccgccatcaagaagaccatcctggacaaggtgaagctggactcccctgcagggaccgctctgtcgccttctggccacaccaagctgctcccccgcagcctggccccagcgggcaaggattgacacgtcctgcctgaccaccatcctgccaccaccttctcttctcttgtcactagggggactagggggtccccaaagtggcccactttctgtggctctgatcagcgcaggggccagccagggacatagccagggaggggccacatcacttcccactggaaatctctgtggtctgcaagtgcttcccagcccagaacaggggtggattccccaacctcaacctcctttcttctctgctcccaaaccatgtcaggaccaccttcctctagagctcgggagcccggagggtcttcacccactcctactccagtatcagctggcacgggctccttcctgagagcaaaggtcaaggaccccctctgtgaaggctcagcagaggtgggatcccacgccccctcccggcccctccctgccctccattcagggagaaacctctccttcccgtgtgagaagggccagagggtccaggcatcccaagtccagcgtgaagggccacagcccctcttggctgccaagcacgcagatcccatggacatttggggaaagggctccttgggctgctggtgaacttctgtggccaccacctcctgctcctgacctccctgggagggtgctatcagttctgtcctggccctttcagttttataagttggtttccagcccccagtgtcctgacttctgtctgccacatgaggagggaggccctgcctgtgtgggagggtggttactgtgggtggaatagtggaggccttcaactgattagacaaggcccgcccacatcttggagggcatctgccttactgattaaaatgtcaatgtaatctaa

SEQ ID NO: 112959 - DNA, 207 bp, Homo sapiens
gctctttgattttaaatcagactgaaaattctccatccagttccttgtcttcatgtctagacaattataataaaaacaaaatatccatatctctgcttccacttcccattctgctttctttttctgtgcacagcagattccagagatagtaccagctttgctaaggccactcgctgctaaacacaaaatccacctgtagctcccctt

SEQ ID NO: 112960 - DNA, 290 bp, Homo sapiens
ccggcgtggtggcacatgcctgtaatcccagctactcgggaggttgaggcaggagaattgcttgaacacgggaggcggaggttgcagtgagctgagatcgtaccactgcaatccaacctgggcaacaagagcaaaatcccatctcaaaaaaaaaaaaaataaaaaaaataaagaactctggtgtcacacactcaggttccgatccagatccccactcgctagctgtgtgactttgagcaaactgtttcacctttcttccctcagtctctccatccccaagtgggggtaat

SEQ ID NO: 112961 - DNA, 532 bp, Homo sapiens
cagaaccttcacagacaggtaggaagtgcatacccagaaaagacaggacatgctcaggcagtcctactcactccaagttcagctcatcctaacaaagacaacttgccaaattagatgggcaactcacattcttctcaatccctccccaccggaggaacaagcacctcaactgaaacatgccccagtcaccacccacgtccccaagtcagcaccttgacctggtttccacatctccatcactagcatggaactcttgttggggtcataaagcttacttcttttgctttttgtcttacttcttacctatgtttcacagtttagaaagaacatttcttactaagacaaaaactgtattgtacagacacttggaccttgctgacatgagtcacgttttacaacaaaatgcacatgccttagaaatctggcacataagggcttccaagaccatcaagcagttgttctcaaacttcagtgtgctaaagactgactgaggtgcttatttaaaatgcaaatttgggggccccaaccagag

SEQ ID NO: 112962 - DNA, 130 bp, Homo sapiens
caggcaggatggcccctgtttctcaggccttgggttttattgctaggataccaggctgctagaatccgatggagttatatcgaggggctgaggcatacaggagcgtgaattctgctgagccgggcggatc

SEQ ID NO: 112963 - DNA, 359 bp, Homo sapiens
ctcaaattattactgggggcttcaaagcatttaaatagaattaaattcaagtttatgagtattcatattcctaaatgatacaaaagcaggatctttcctattgagagttatagggcataaatattaaaatctttagtaaggccaggcgcagtagctcacgcctgtaatcctagcactttggaagaccaaggcaagtggatcacctgaggtcaggaattcaagaccagcctggccaacatggtgaaaccccatctctactaaaaataccaaaattagccaggcgtggtggcaggcacctgtagtcccagctgcttgggaggctgaggcaggagaatcgcttgaacccaggaggcagtggt

SEQ ID NO: 112964 - DNA, 736 bp, Homo sapiens
gaggcctttcccacagggtatgagaaagccactgtggtcatttcttcccttctgtcagacataattcctcgtttggcttttccacctctatacagtccgataacggacaggcctttattagtcaaatcacccaagcagtttctcaggctcttggtgttcagtgaactaacggtctttttaaaacacacttcaccaagctcagccaccaacttaaaaaggactggatacttttaccactttcccttctcagaattcgggcttgtcctcaaaatgttacagggtacagcccatttgagctcctgtatagatgctccttttattaggccccagtctcattccagacatcagaccaacttggactgcaccccaaaaacttgtcatccctactgtcttctgtctagtcatactcctattcaccattatcaactactcataaatgccctgctcttctttacactgccggtttacactgtttctccaagccatcacagctgatatctcctggtgctatccccaaaccgccactcttaactcttaaagtaaataaataatctttgctggcagggctatgctgaacccccttgagcactctctaattggatgtcctaggtcctcccaattcttagtcatttaatacctgtttttctccttctcttatttggaccttgtgtcttctgtttagtttctcaattcataacaaaactgtatccaggccatcaccaatcattctatatga

SEQ ID NO: 112965 - DNA, 459 bp, Homo sapiens
catctttattcttttcagtttttttctccgttgcccaggcttggagtgcagtggcgtgatctcggttcactgtaacctccacctcttgggttcaagcgattcttctgcctcagctattgaggaggctaaggcaagagaattgcttgaactcaggaggtggaggttgcagcgagccaagatcgcaccactgcactccagcctggacaacgagagcgaaactccatctcaaacaaacaaacaaaaaaaattgaaaagtgttcatgtacagaagttaaacaaaatgtatcctaaatataaataattaattctgacagagtaactaggaaatgcctcacagaggagctggtttttgaactagaccataaaggataagtaggatttccataggaagaaagagcagtcaaggctgaggaaaagcatgattaaggacaggagcaagatttaaaaaaaaaaaaaaaa

SEQ ID NO: 112966 - DNA, 504 bp, Homo sapiens
gaaatggctgcccactaaaaccgtgtgttaagatgtgatgctagcatccccctttatcatcgtaagaagcagtgtgatgtgatagcttagagcctggatgccagagctagctggcccagtaaccagctgtgtgacctcaggcaagtgataccagctctctgtttccttatctgtagcatggggatgataataggactttattcctagggttgttctgatgatcaattgatatacagaaagtgcctacccggaagatgctatatgagagttagctattattattttcataaagcttgccttgaccatgttaatccagtttaaaagtcctcatgttgacattttaaagattgcgaaggcttctctagacagtttatagcatataaggaatgaacaattgaagaagttaagatcttaacatgtctttaaaaagaggtggagacatgcagaaaatatacatgcaaatgcaaagttctttataacataagttagactgtatcatcaagc

SEQ ID NO: 112967 - DNA, 427 bp, Homo sapiens
tcccataaaactcagtttaaggtgttcttttggaagctttccatgtcacactgtggcaagggccttcccattctggggtggatgcccctctgcctttccccagcatcctatgtggacgtcttgggtcaccttttacaatacatggacatacctggctctcctatttgccttgccttcctgtcacctctttgaagacaggaacttggttttgttcatctctatgccttgagcatttggcttagtgcctggtataagtaaatatttcagagcaaggttgggggtagaggggtcccttattcattcattcattggtttattcaatattttaggagctggggataaaacaaaaccccattctcaagctttcatgaaacttacattctgaaattggcatgggggtgaggaatggagtaaatagacattaaca

SEQ ID NO: 112968 - DNA, 498 bp, Homo sapiens
gtttcatcgggctccattggccaagccttgactcaggcaggcttgaaaccggtagaactgtccagtttttcggtagacagcctgcaaggggccgctgtgtgcccagggtcacagctctgtggagccatgggaggtgggagctggacgctggaggggaaggtcggggccaaactgaacatagcatcacatatccaggggagaaacttggacctggtctatggtaggcggggaggggtctgtgtttgtaaatattccagcagcctggtggaggatgctttggtgggcagaggtggaagaatgggggccgtgacattggaggcagtggtctgtagcagtgggaggggcaatggcagtggcagcagacatagggagattaagggtaaccccagctagtcttggggactggcgtggaggaagagggtggtgtctaggagacgaggagcaagaaggacgaggggctttggggttagacagagtggacagaactccaggttcctg

SEQ ID NO: 112969 - DNA, 469 bp, Homo sapiens
aactaaatccatttgcaatggcccttctggcatggtgaagtaaatggaaatggccccttccatgtcattgataaagacaccacggttcagaacataaagagagaaaattacattctaaacactgaggcggcctcttggccacagttttaccccttgtgctgaattttgtgtcacattaaggattcacactgaaagaaatctctttctataatcctgcaatctagttcaaaagcacacatacataaagcaaccagggaacatacaaaacagggataaagtgacattagcggtggcaggaattcatcaagaaaatactatgtgtcaagtgctcagctaagcattttcccactgaaccctcacagcaaattgggatgtacaatgacactgcagtcctcatcatagggatgaggaaattggggtttcaaggactttaagctgctttcctaagagcatagttcatggagggtta

SEQ ID NO: 112970 - DNA, 824 bp, Homo sapiens
atggtctcaatctcttgacctcgtgatctgcccgttttggtctcccaaagtgatgggattacaggcgtgagccaccgcgccaggctgagatggggtttcaccacgttggccaggctggtctggaactcctgacctcaggtgatccgcctgccttggactcccaaagtgctgggattacagacgtgagccaccgtgcccggccagttctatgagttttgatgaatgtgtcctgcttcttcccaggctccaccatctcttcccctaaaggcaaccaccattctgatttctctcaccaaagactggaccaggtatagttagttactgctgtgcctggcttcactctcactttttttttttttttctttttttgagacatagtctcgctctgtagcccaggctggagtgcagtgtggcacaatctcagctcactgcaaccttcacctcccaggttcaagcgattctcctgcctcagcctctcgagtagctgcgactacaggtgcccaccaccacacctggctaatttttgtatttttagtagagatggggtttcaccttgttggccaggctggtctcgaactcctgacctcaagtgatccacctgcctcagcctcccaaggtgctgggattgcaggccggccttacctggtatggtttttaggttcatgttgatgcctggagtttcagtaattccctcccattcgttgctgagtagcactgcaacacatgcaggcagctatttggggatcttttcacctgttgatgggtgtctggactgtttccagtttttggctgttacaaatgaagcctctgtgagccacgtacaa

SEQ ID NO: 112971 - DNA, 877 bp, Homo sapiens
atggtctcaatctcttgacctcgtgatctgcccgttttggtctcccaaagtgatgggattacaggcgtgagccaccgcgccaggctgagatggggtttcaccacgttggccaggctggtctggaactcctgacctcaggtgatccgcctgccttggactcccaaagtgctgggattacagacgtgagccaccgtgcccggccagttctatgagttttgatgaatgtgtcctgcttcttcccaggctccaccatctcttcccctaaaggcaaccaccattctgatttctctcaccaaagactggaaaaatatcccaatacctggatgtatgcctcacgtgtcccgctggccccagcacccaggtatagttagttactgctgtgcctggcttcactctcactttttttttttttttctttttttgagacatagtctcgctctgtagcccaggctggagtgcagtgtggcacaatctcagctcactgcaaccttcacctcccaggttcaagcgattctcctgcctcagcctctcgagtagctgcgactacaggtgcccaccaccacacctggctaatttttgtatttttagtagagatggggtttcaccttgttggccaggctggtctcgaactcctgacctcaagtgatccacctgcctcagcctcccaaggtgctgggattgcaggccggccttacctggtatggtttttaggttcatgttgatgcctggagtttcagtaattccctcccattcgttgctgagtagcactgcaacacatgcaggcagctatttggggatcttttcacctgttgatgggtgtctggactgtttccagtttttggctgttacaaatgaagcctctgtgagccacgtacaa

SEQ ID NO: 112972 - DNA, 396 bp, Homo sapiens
agtcaattaagtacaaaagtttttactatgactatgcagtgaggtccaaactgtactaaatttgaagttccctgccaaagagaaatgtaagcttccctggtggtataagtcagaatttcatgacatcagccagataaccacaaaagaatatatcttttagtgctagatgcttctaagcctttctccacccaactaaccaacattcacttactgatttacttatttctttaacaaacacactccatttcatagccacattctttcaaagctgacaggttgagatacatctaaaacacaaaatctccaacatacattttcttcttcaatgttgtgagatgtatttttctaaaacactgttctgcacatactaccattccaatattaaaaacaagttag

SEQ ID NO: 112973 - DNA, 606 bp, Homo sapiens
cacagcccttttggcatcacccatttatttaactaggataaaaacgaatattggtatagcgattccacagtttacaaagtgcttttgtatccactgtctcacttgatcaagcaaaaggaaaccagaggaccggagtgctgtcctgagtctaccttgatttgctaggcgacttgagggagacttttagcctcaaagggccacttaagtggaaattctaaaacagtacctattctgatcctaactcaagggaatgctgtgaatatgcatgagataaagacctcccaatatatgaagaactgggtgatttttggagaaagacattatatactcaatttcttttttaattaactttccttgaaagtattgcttaatagtttttacattctccatgtaacagactttctggatctggtgttcagtctgtacaccagatgtagatcttttttaccttctcctagaccttaaaattcctggcaacatgcctccaccctggattggggaataaaaaatgaaaagttttttttttttctttttgactttaaattttattaaagtttgaggtttttcaaactgatgtgctttatttaaaattcaagtgagacattt

SEQ ID NO: 112974 - DNA, 335 bp, Homo sapiens
gggattgacagccacctgtgaagactcacctgctaggatctggctggctgtcttggtcgctgatcatgtccgaagaagtacaccactttcttaatcatgcagcttttaaaaatctcctcagccccacacttgagggtctctctcctagattctaatgtctagccctacacgaatgcagtatgctgcccttgatgtgataggacaacagaggacctgcacacatgctactggtcctgactgtgttttccttccataaacactgttctggcaagctggttttatgtgctgctggaccatttgcttatgtttgcacaataaaccagaaattaaacttt

SEQ ID NO: 112975 - DNA, 713 bp, Homo sapiens
gaaattaattcctttgaattcagcatttcttgaacacctactctgaaccaggtggtgtgcttgacaagggctaactacaaaaaaagaggaaaggcccacagtctaggaaggtaaataaggcttaagtattgtgaattttattgtcttctacatctgctaaaaaattaatttcagtaataattggtgttctgttttagtttataaatgtgaatattcaagtgtccagtactttaatcctttgatgagtattattttagcaattttattttagagtggatagggtgtagggtgtgcttttgcagtcttagtatttttaagcaagcacaaatgcattacactaagatactttatataacctccagaaaatatctgccatttttgtttatgctgctatagaaagttaattaaatgaataccttcacatgaaaaaaatatccatggaatgtgcaatccttatgcctttatacacctttccagttaagcggtgaacttgatgagagcctgtcactgttgctccttaatcagtaggaaggggtcatcttgagtgacatgaggcactctttccctgaggcatttatcacgtagctttcacgccaattgcacctcctgctgacgtggagcttgcaaaactaggaatgataattgtttttatgacaaatgtggattgagttagaaaggtcagtgatagcgttattagaattaagctctgcctg

SEQ ID NO: 112976 - DNA, 440 bp, Homo sapiens
gagagctaaaggaaaagggaactcatatgtattgaatatcagtgactatgtcatatgctgtgttgtgtggtttatctcatttaatcatcacagcagccctgtgaaagatgaatatgattatttttattttttacagatgaagaaccaagatttaggaatataatatatcttgcttaaggtcatactagtgaggaaataaatctacatcagtcttttcaataccatgctagatgtgatgatatcattttagaaccatatgtttgatatatggaccaccatactgaaacctcagggcacatttttgtccactaataatatatatcaaggaatgtcatttcacagatgcatggatacggaaaatgtgtgtgtgtgtgtatatatatgtatgtgtatatatatgtgtgtgtgtatttgtatgtgtgtgtgtgtatacacacaca

SEQ ID NO: 112977 - DNA, 208 bp, Homo sapiens
tgcagcttgctgctgctggtcgtactctgaggtatccccggctgcacccctagactcttagttatcctttcagaccctgtccaggggtaaaacacgtggagaaacgagaagtagaaggtggggaaccctccattgctcttcacctcctgctccccaacccctacaagacagcctgggtatgggaccagcgctactttttttttttttt

SEQ ID NO: 112978 - DNA, 313 bp, Homo sapiens
ttggtaaatgcctctttagctccccatgaacagctgctgtcctttccccactggggcactcaggaggaggtgctcctgccctgcagcctcagccctcaagattcagcctgtcatagcctgatccaagctcagggataaggcagccaaagacctcagagctgcagctccatccccttactcagagttcctctgaataaatcatcacatgggtccagttatgaaaattccttctctgctactcgtgccttgctgtggtaggcagagcacggctttcagggacagacaaagcaggattttgcctcttactgcctga

SEQ ID NO: 112979 - DNA, 186 bp, Homo sapiens
tgctgggattacaggcgtgaaccaccatgcccggccagcacagcactcttgcgtttgtaccgcagcagcaatactttcaacacgctgcagggggacggctcctttgaatggcctttgtcagtgacgatccactcctaaaaaacccctcacaccctggggcctccttgaccatgcctcttttttttt

SEQ ID NO: 112980 - DNA, 241 bp, Homo sapiens
tagacttcatccctgcttccaggtactcacacacaacctggttagagaggtaagatcatgacatatcaaatcgtcagagctcaattaccatggtgtatggatgagtgccacactatgaggaaatggagggcatacacttattagtaataacccatataagtaagctccttactccttcttatgcacccacatagcacttaacagcttacaaagacagatctcattctatccaaaagttcaa

SEQ ID NO: 112981 - DNA, 302 bp, Homo sapiens
catgagttttagagactatcatctggcttgttaatgtccagggaacaactgcagtcagtgaagttaggttaacttccagctgccgggagattgcactccgggaaatcggggaggtgttcagtgagagcgtactgggaggggctggcttcaggatttggatttgtgctgagtgatttgagagagagttctgtttaccttggattgtgggctttcaggacacaggacattctgtgattgaatattttactactttttatccaggaggcaggggagtaggggcacggagtgaggctagagctgtc

SEQ ID NO: 112982 - DNA, 149 bp, Homo sapiens
agcagttgaaagaggaaaagggagtatgtttttatggaaacctcaaatgcccttccacatctcctgtgaattacctctgtgttcaggcagccgagctagacagctgcgaggagaggcgtgtggttttgatgggggccttggaaagaaaa

SEQ ID NO: 112983 - DNA, 794 bp, Homo sapiens
agtttgaaagaaggatgagcaggctctctgccatctgcccaccaacttttcaagttacttttacccaccttcaaaattacatctgcttttagcaagaattactgatgtgataaagatgggagtgttcaccatgcaagggcaggggatcccctgctgctccaccatcagatttgggacaccaccccccccggccccaccagagggcatcagctatgcctagcaattacgcccccgtggctaaattaaactcccattggctaaattaggctcgaagagaggggcacctgctgctaagctgtgtatgttgtcccctaggactcccaccgtttgctgagctccacatgacaacagcagacgacaggccgcactgatcccacctggcttacaggtgctgtcacacaggctcccttgctccttcattcaaccattgtttacatgtcgttcaggactgctgactaaacactttcaagcacagtggacccttgaacaacgcaggttcaaactgtgcaggtccacccacagggatgtttttcaatcagagttataccaagtgtccctgcctctcctgcctcccttcccacttcctccatgtcttcctctctgccaccctgaggcagcaagaccagcccctcctcctcagccactcaacatgaagacaacgaggatgaagacttctatgataatccacttccacttagtaaatgctttctcttatgatattcttaatgacattttattttcccaagcttagtttattgtaagaatacagtataaatacacatacaaaaaaaaaa

SEQ ID NO: 112984 - DNA, 809 bp, Homo sapiens
ctcctgggtacaccagccagcccacggcacagagcctgcctgttggtctctacccacaggggatcccctgctgctccaccatcagatttgggacaccaccccccccggccccaccagagggcatcagctatgcctagcaattacgcccccgtggctaaattaaactcccattggctaaattaggctcgaagagaggggcacctgctgctaagctgtgtatgttgtcccctaggactcccaccgtttgctgagctccacatgacaacagcagacgacaggccgcactgatcccacctggcttacaggtgctgtcacacaggtacgccttcttgtgaatcatcagtcaccatttgcccctcgcagcaaccctgtcttggaggaaggtccttgccgacacccgcctctccccacccttaggctcccttgctccttcattcaaccattgtttacatgtcgttcaggactgctgactaaacactttcaagcacagtggacccttgaacaacgcaggttcaaactgtgcaggtccacccacagggatgtttttcaatcagagttataccaagtgtccctgcctctcctgcctcccttcccacttcctccatgtcttcctctctgccaccctgaggcagcaagaccagcccctcctcctcagccactcaacatgaagacaacgaggatgaagacttctatgataatccacttccacttagtaaatgctttctcttatgatattcttaatgacattttattttcccaagcttagtttattgtaagaatacagtataaatacacatacaaaaaaaaaa

SEQ ID NO: 112985 - DNA, 1039 bp, Homo sapiens
agtttgaaagaaggatgagcaggctctctgccatctgcccaccaacttttcaagttacttttacccaccttcaaaattacatctgcttttagcaagaattactgatgtgataaagatgggagtgttcaccatgcaagggcaggggatcccctgctgctccaccatcagatttgggacaccaccccccccggccccaccagagggcatcagctatgcctagaaggggaccacaacagactcgacaggatccaccggttgggcccaaggcaggaggaagggcggcgcccccaaactcccaggacgcctgcagcaccccccacgcgccgctctccgcctctggggagcatcctgccaccccccgacacacacaccccggctacatcccgccttctcacgcttggtcaggcgctctggagatgtcggagatccaggcttttcctaaagagtcaggattggaaggcggactcccaccgtttgctgagctccacatgacaacagcagacgacaggccgcactgatcccacctggcttacaggtgctgtcacacaggtacgccttcttgtgaatcatcagtcaccatttgcccctcgcagcaaccctgtcttggaggaaggtccttgccgacacccgcctctccccacccttaggctcccttgctccttcattcaaccattgtttacatgtcgttcaggactgctgactaaacactttcaagcacagtggacccttgaacaacgcaggttcaaactgtgcaggtccacccacagggatgtttttcaatcagagttataccaagtgtccctgcctctcctgcctcccttcccacttcctccatgtcttcctctctgccaccctgaggcagcaagaccagcccctcctcctcagccactcaacatgaagacaacgaggatgaagacttctatgataatccacttccacttagtaaatgctttctcttatgatattcttaatgacattttattttcccaagcttagtttattgtaagaatacagtataaatacacatacaaaaaaaaaa

SEQ ID NO: 112986 - DNA, 442 bp, Homo sapiens
tatgtacaaggttattctttgcagaactgttagtaacaataaaaaaccgtaagcaacagaggactccctatatatagcatagtatagaaaggattactggctgggcgtggtgactcacacctataaacccagcactttggaagaccgcagcaggtggttcccttgagcccaggagttcgagaccaacccgggcaacaaaagaaaaccccatctctaaaaaaatacaaaaatcagccaggcatacaccagcatgcctgtagtcccacactttgggaggccgaggcgggcggatcacctgaggtcaggagttcgagaccagcctgaccaacatagagaaaccccgtctctagtaaaaatacaaaactagtcgggcatggtggcacatgcctgtaatcccagccacttgggaggctgaggcaggagaatcgcttgaatccaggag

SEQ ID NO: 112987 - DNA, 628 bp, Homo sapiens
tgctgacatttaaactcaggaaccacaccgtacatttccatttgaaaaaggttttctgtcgtccactaatgcctttaacacatcttcttaatgcctgatattaaatgtagattatttagcttaggaaaggcaaatgaatttcctgtttttcatgtaaattaatatgttccctcttagctgtaaataaaactttatggtaaatacaacttcataaagaatttttctatatcataatgtaaactgaaaatataagtatggttgtacttttcaatacttctaagacatcccatagttgccatggtaatggtataaggagtattattttaaattattttattttattttattttttgagacagggtcttgacctgtcacccaggctggagtgagtgcagtggcaaaatcatagctcactgcagccttgacctcccaggctcaaaccatccccccagcttagcttcccgagtatctgggactacaggcatgtgccaccacacccaactaatttttgtattttttgcagagacagggtttcactatgttgcccaggctggtcttgaactcctgggctcaagcaatcctctagcctcagccacccaaagtgctgggactacaggtgtgagctacc

SEQ ID NO: 112988 - DNA, 296 bp, Homo sapiens
atcaaaggagggtgactgacatttactgcatatttactgtgtgctaggtaccatacaattttctcttgtaataataatgataataacaacaaatggcatttatttagctttattattattataacctatgcatgaaactcattgatttagatacattagttcatttaatccctgtaagaatcattcaagatagatcttattgtcttttttcttttcttgcagatatgagtactattggctagagaagtttagtaactttcctgaagttttacagaagataagtatagagtgggaac

SEQ ID NO: 112989 - DNA, 458 bp, Homo sapiens
catgagggtggcttaggggaactggggaaggccaccacgcaacacagattcccatggcatcacagagggccaagggtcccaaggggactgtctgcctctacccaaggtgtggtccctttttaagcaggttgacccaggaggctccagtttcacactggctgctggggcttatctgataacagacttcccgcattcattctcaggagaaggccttaggtgcccaatcaacagcataatgacccaggcctggagccaggaatcctcacccatagcccattgcctgtggccgactgagagcctttatgggagagttcgtgggcagtctggtggctatggcgacacatgtgtgtgtgcgtctgtgtgggtgaatgcttgagcccgcacccctgggcctgtgtgaggatttgtgtgtgtgtgtgtgtgtgtgtgtgtgtgtgtgtgtgtctatgagtttgtga

SEQ ID NO: 112990 - DNA, 205 bp, Homo sapiens
cttctatcgtgagccccttacactgcttataccacttgagactccccaggctcgaactgatgcccacgcctggccaagctgggccagtcagatggtctctccagggaatctaaaacttgcacctagagggacagatgacagaagggatagaaggggcatccagagccatcgtgagaacagaggaatggcaggttcaggcacagga

SEQ ID NO: 112991 - DNA, 298 bp, Homo sapiens
ctcaagtctgcactttgtgttctttatacacaactctggcagattccatgctgcccctctaataacactgcgtttgcttgcatgccacagtgctttcctgagtgagcaataaagaggtgttagtgacacctcaggtgctcagagctgtcctttccaaccctgagcttgtcgtgtaattgagaggttgtcacctgcttggaggtgggagcatctgtgggaaggttcaggctgtgtccttatcactaaacgaggaggggaggaaggagctgcaccaggctgctagcaacaaagcagggct

SEQ ID NO: 112992 - DNA, 411 bp, Homo sapiens
cgcagagacaagcttttggaaaaatattaatagcaacaaggtatgtctatgagaaaaaccattattattccaaactttcaaaggcgccttggaaaaagggacctttgcagaagaatcggaagttcgaaaggaggagtaacttgctggggatgagaaagagccctgtggctacgtggtgtcaggaagtgggattgtcagcctcagctccttcactgaacaactgtgtgaacttggtgaagtcactgtatctctcttcaccttaactccctcaccagtacagtggaggtgttggttagagaccttcacaagtctcttctagttctaaagttctgtaatcccaactgaaatggatttaaatctatactctcatgagatttttctatgaggcctcagcatcccttctttctcttc

SEQ ID NO: 112993 - DNA, 800 bp, Homo sapiens
gcagcacgggaagaagcagctggacccgctcaccatctacggcatccggtgtcaccttttctataaatttggcatcacagaatccgactggtaccgaatcaagcagagcattgactccaagtgccgcacggcgtggcggcgcaagcagcggggccagagcctggcggtcaagagcttctcgcggagaacgcccaactcgtcctcctactgcccttcagagccgatgatgagcaccccacctcctgccagagagctcctgcagccacagccgcagccgcaggccctgcactacgcgctggccaacgtgcagcaggtgcagatccaccagatcggagaagacggacaggtgcaagtaatcccacagggacacctccacatcgccaaggtgccgcagggggagcaagtccagatcacgcaggacagcgagggcaacctccagatccatcacgtggggcaggacggtcagcttctagaggccacccgcatcccctgcctcctggccccatccgtcttcaaagccagcagtggccaggtgctgcagggtgcacagctgatcgccgtggcctcctcggaccccgcggcagcgggcgtggatgggtcgccactccagggcagcgacatccaggttcagtacgtgcagctggcgccagtgagtgaccacacggccggggcacagacggccgaagccctgcagcccacgctacagccggagatgcagctcgagcacggggccatccagattcagtgagcgggtgcccaatggcaccaggagccctcgccggtccgctacggccggcccc

SEQ ID NO: 112994 - DNA, 312 bp, Homo sapiens
tttcatatgagtggaatttttagtgggaagctcagagaaaaggaagaggagacaatagtaatataggttgcattttgggtgttgtataggagcttcaaaggaatgtgcttagctatatttagaataaatgatcacctagaatagtggttctcaaactcttaaaagttattgaagatcctaaagaactttttctaatgtggcttataactatgtattatttaccatattagaaattagaactaagaaatgtaaaatcacaagaaaatataaaccctcacaatgatgacttcgttatgcatcgggtagactctg

SEQ ID NO: 112995 - DNA, 589 bp, Homo sapiens
aagatagtatatatctgaagtagattctgaaaagttagtatgtatatagtaattctaggaaaaccactaagaaaataactcaaaaatagaaaaaaaactattaaacaaataaaatatttaagtagaaacatatatttaatgcaaaagaaaacaataaagaaggaaaagagtcaaaacaaatgagacaaaaagtaaagtggcagaccaaaatttagctctatcaataatagcattaaatgaaaataatccaattaaaagacaaggattggcagagtaaataaaaaacaaaaagaaaaacaacacatgatttaatcatatgctgtgtagaggggacactttagattcagagatagaaacaagttgaaagtaaaagaatgggaaaagatattacgcaaacagcactcataagagagctagagtggccatcctaataggaaaaataaacctatatatatacacacatatatatatataactacagataatgagagatactttattataatgaaagtggtcaattttatgaggaatgtatatgagttcaaagcataaatgcagcctacaaaagagccatgacttacatgaagca

SEQ ID NO: 112996 - DNA, 451 bp, Homo sapiens
ccaatgcaaagatgtgtgggaaagccaagcaaaaagtaactggaacagacgtgaaggcctgaagtgtgagtgtgctccccttatcctgaccatagttgcagcagcaggtagtgaaagagctcaaggtggttgattaccatctctgactaatctttaatggagtaggaagctatacagttagaggggtatctcctgcaagtcaggcttcaaaataaaaaggtggggggaaaaaccggagccatcaggaactacacattgcagaggagacagacttggtggtttagtgcaggaaagttagtaaacaaaacaaaaaacaactcatcatcaccaccaaccttagtgggggaaaagtcagaatccagagttgccaaaagcacattgttttaaatgtttagtatcacaacaaaaattaaaagacatgtagagaaacaaagtttgacccatactaagg

SEQ ID NO: 112997 - DNA, 539 bp, Homo sapiens
ttcttttcacaaggcacaaagaagatgtcagtgttcagcatctttcatcttgctgatttatctagatcttgagacactcaatctcaaaacaattaaaagcatagtagtctatggctatacacaggctggtgtctttctgctcatgctccttacatattagtaatgtctggtaccatgatattacacaccagtaatgagtcacccctcataatgttacaattttttatgtttaagtagtatatatttgctttagataatgaaacaccccacagaatagaaagatcaagggatgttaggagtcaaataaagctacatagaacaggattggtctctggatctcaaggtaaagctaattaaattgggttgaggcttgtcatttggaaatgatagtaagttttctttcctggctatgaaaaaaataagagagttagttgggttgccatttccagaagcaaagcaatctttatctgcttttttttttttcttttcccccctttctctgttattttaatcttccctgtgcattatgtagcctggct

SEQ ID NO: 112998 - DNA, 603 bp, Homo sapiens
ccacaagatattcccctgaaataggaatcagtggtctgctgtatgagtttcccttttatgtttcttttccacagtttgcagggtaaaagataatactcctctagtttccttctttgtactccccctattatcttctcatgccataagctcaaaaacctatgtattttggatacctacattgattatatgtttatatctaaaatccaactagaatagttaaacaatgatagcaacaataacaacagcaatttaattaattatttaattaaactcatgatcttgaatctcagcaacacagacccacctgcatctccagtgtccattcagtgtctatcttattcatgtatatggaaggtctgatggatttatactgatttaatactttcttcttcttcttgtttgaacccacaagccccatcccgatgtcagaatataaattttttttttttttgctggtcttctttatgcactttgctagaattttcaacagaaagtttctattattaacagccagttgaattcagtaagtatctaccctgcatgaaatatataacacctagtacatgtgtaatataataataatttgtaataaatagtacctgt

SEQ ID NO: 112999 - DNA, 387 bp, Homo sapiens
acctccatactgttttctataatggtgcaccaaactaccttccctccaacagtgtacaaagatttccttttctccatacccttgccaacacttgttatctcttgacttttgataatggctgtcctaagagctgtgaggtgatagctcattgcagtatggatttgcattaccctgacagttaataatgttgagcaccttttcacatacttgtggccatttttatgtattctttggagaaatgtctactaatactttctcaaaaccactgacctagcttatataattgattctcaggagttgagctagcagaggtctgattatattagttcttcacaataaaaaaccaatgatgattcataacaagttttagaattaagtgtatgtggc

SEQ ID NO: 113000 - DNA, 171 bp, Homo sapiens
atatccttttcttgacttttcccacatattcctgtagtttttagagcatctttaagatggctgtttaagtctgtttctagtggatctgccatctaccctttctcagggtcagtttctgttggatttgtagttttcttttggatggaccatacttcactgtttctttgtgtg

SEQ ID NO: 113001 - DNA, 350 bp, Homo sapiens
aaaacgggcactgtctgggggaaatgattcaacaaaccttatttatctggttgttcgtccctggtgtctgggcttaccgggttcttcaccttggagatggttatagggaaggatagaggagcaagtgtttaaagatctacttgttaatattcttctaatattactgtgtacgcatccgccctgccccattctattgacctgagcacctggcattctaaagtatctctgttaactcccccagttggtctggccaaggagtactcggcacgcttggttccagaaacagaataccctgccggctggtgatggtaaaggtagaggcggggttttgtaggggcacagctggcagg

SEQ ID NO: 113002 - DNA, 304 bp, Homo sapiens
ctaatttctagacacagagtcatgaggaaccttgaattaatattttctagaattcctataatcttgcattgtatttttgtactaaaaaagtgataattcaaaaaaatgtatacataaagctcttcctcaatttatgtaatattgttgctattcactttctatctaagagccttaaaaaatgggaggtctgcatccctcttggcctgggcaaggctcccgtaggtaccaggcactctgctttctaacttccttgtatcatttcgtaatttctccaggcaacctaaaggcacagtattatctcaat

SEQ ID NO: 113003 - DNA, 321 bp, Homo sapiens
gaacagtgcctggcacatgggaatcactgtgtgggtatcagctgttgttactattgtcattgttgttattagtgatgaagaaggcagctctggagtcaggaggaaccaggcttcaggcccagctcagctatctactggctgggaggtgtggggcagcttgcctagcctcggtctcttcatctttgaaatgggctgagtagtccagcctaagactattgtgagggtcatgaggcggttggcagagcctggctttggaggaggtaatggcagtgcagggaactgcccaaggtctcagagcaaggtggcgggagcagcactggg

SEQ ID NO: 113004 - DNA, 883 bp, Homo sapiens
gataagaggattggttggttctgtgagctcacactgagagataagctggtacctagttaacaatgggcattaacaaatgccccagagcaagttgatagttaaggatgtagaaaagagttctgagagtatcctataaacctccactggcccatatgcacctttgtggagttagaaacaggtagccctccagaagggcacagagctgagggagacttcgtgaaaatgagaaaaatggagtggaagcagcccagagccaggtgcaggcataaaaccatggaaagcagaccagatgttggttcctacttccctccttgcccagggcacaacctgaacagctacctgtggcatccctgcttaggcagacctctgggataagagtaaatttacagaccaggatctaatcctattatagccgccaactgtgtgccctcagtttcttcatctgtaaaaagacagagtttgacttcatagcctttgaaatataactgcttgaatatacttgctattttaccgcagtttggctctgtctctctctctctctttgtgtgtgtgtgtatgtgtgaaagagaaagagagagagagaaagagagagaaagagaaagagatgccttgtagtacttgaaaattagaattcttgataaaataaagctctaatttgttctagtgtttcttttcaacaaaccaggggttgccaagttttaaaacattttaaaatgcattagaggaagtgagtcagttacgttcttcatacactacaatggaagtacacttagttccaagttatgaatgctgtgaaaaattaggttcttttaataaatacaagatgaaactttcaggctttcaaaattcatgttctttctttccctccttattcatattagat

SEQ ID NO: 113005 - DNA, 240 bp, Homo sapiens
aggtatacatgtgccatggtggtttgctgaaaaaaaatagaatgttttataatttttttattgagaatgcccagttatgccaagcataataaataaaggtcagtagcatttataaaagaaatgcaatgtgggatattggaaaatacctgatagctgatatctggaatcaggcagatgtgaggttagacaccagctctgaggctcactggctacttgaccctggaggaagcatttaggtgc

SEQ ID NO: 113006 - DNA, 210 bp, Homo sapiens
ggataacttgaaacagggataacagagatatcagggagggataacagaggcagttaagttactctttcacgttatcactctgtttaactatttattttaaacacattttaaaaaccagatcaggaacaacacaagtttcaaaaaattcttcagtattagaagtaaagttatcatgaagaatatgttaaaattctcacaaagaatatatta

SEQ ID NO: 113007 - DNA, 433 bp, Homo sapiens
ggagcctggctgggggagaagtgtggtctgaagggtactgggaccctgactgtgccgtgtggcttcattccttcctaagctggttggggcacatggatgcctattacagcattctgtactgtgacttatagctttcaatatgtcttaaaatatttgaaaataaaatgcagtaagtatgcatatgggttaggactgacaataaacaataaaaagtatcttttcagggcaatgaggacatgaacacttttaacccttacccccaatattttctttaacattgtgattagcaaacacacacacacacaaacacacacacacaaacacacgaacacacacgcaaacacacacacacgttctggaccaagcatgccatttcgctgcttagaagagtgtaaatcccgcatgctagctttggcatttgtgcatcctctac

SEQ ID NO: 113008 - DNA, 777 bp, Homo sapiens
ggttgaatgcctgaatgattttggaaaagggagtcaaacaacatttttaagcacctatgatatgccgtatgctcatctatgtactgatagtttggactcttactccatgtgacttacactgtaatgggggcaatgtccagggaactctgccataggtgaggtgcagggctctaaggaaatacagtagaagctccttgggtggtcagagaaaaattcctgggaaaatcatgtttaagctgtgacctaaaggatggaaaaatgatttccagatgaagaaagggcaaagcatcttccacacaacaggaattctcccggataaccatttaaacctggagcatggaatttctattcacctttgtgaatatgcagaaaatatgagagcatattctgtgtatgtcataatgtttagttttgtgtaatttagcgttaggcatcagttagatattcagttggaagttgggtggatctgcaacttaggagagaagtttgaattggatgtgtagatttgaggagttgtcaaagtacaagaggggatgtgtgaggcatgtgtaaggatgagagggatgcataaggcatgtgtaaggatgagatctcccagaaacagtgtgcagactgagggaaaatagaggcaagatgtaaagaaatgccagcaaagagtgaggaaaagagaaaccaagaaagcagtgttgcttgagctgagattgcgaggaagttccaaggcaagtgattggtgagccatgccaccccaacttaggaccaggggtcacatgtttggga

SEQ ID NO: 113009 - DNA, 537 bp, Homo sapiens
aatatataaaaatgataatgcatcataaataaatgggctttatccctgaaatgcaagattgttttaacattcaaaaataaattgaggggacttttattttcacctttgacacataaagaggttggaaacttttattcctgacctttcaacaagaaaaagctgaacaaaccgaaaatcaatgaattttcttggacctgtgagataattgagggctcagggtaaactgccaccagaaatctggaggtgaatacaggtaaacacaaggagtcccagcctaaatggaacagaagctactggagccctaaactgatagggacactaaaaatactaactttgatgaatccctggaggctgaatatggcctagtctgagagtgagaaacagctggagagcctgcatttttgtggattttacttggagttactcataatgaagagctgtgaaaaaccttgatgtttctggcaggggaggaaataagtaaaactttggaaatatggccagaatactctgttataaatgtctgctcagcaagagaaa

SEQ ID NO: 113010 - DNA, 703 bp, Homo sapiens
aagaaagagtgatgtatgttcaagtgttagtgtgcagttgagttgagttgcattaataattagtggcgaccaggcatggtggctcatgcctgtaatcccagcactttgggaggccagggcaggtggatcacctgaggtcgacaccagcctgaccaacatggagaaaccccatctctactaaaaataaagaattagccgggtgtggtggcgcatgcctgtaatcctagctactcgggaggctgaggcaggagaatcgcttgaacctgggaggcagaggttgcggtgagccgaggtcgcaccattgcactccagcctgagcaacaagagtgaaactccgtctcaaaaaataaataaataaataaataaattagtggctactgatcatgtgtttttagaagtcctatggagtactgtttttgtgccagtgaccatgtcagcaacatactattggcagaacttaacatttacttaagatattaaaaaatcagaaatttcagtgactagtaattagcttaagcatggtcttcttccaactcagcatttatatattttttcagctccttggtagtttgatgagctttcttgattttagctcatatttgatatactacttaagaacataaaggttcattgctcagagttcttttggtttgttgagcattctgaatcaaagcaaattagtcaccagttaatataaatggat

SEQ ID NO: 113011 - DNA, 381 bp, Homo sapiens
agcattcctttggacacaaagtagactataaagaaaatttctaaattctgaatgcagtttctcattgattttaattattgctatgttccttttgaaaattttttggctggctctggcaacttatgcctgcagtcccacccagcacattttgaggccaaggcaagtggtttgcttgagcccagcagttcaagaccagcctgggtaacatggcgaaaccatgtctctacaaaaaatacaaaagatagggcttggtggcatgcatttgtagtcccagctactcaagaggctgaggctggagggatcgcttgagcccaggaagttgagactgtaatgagctatgattgtgccactgcaatccttggctgcaaagtgagatcctat

SEQ ID NO: 113012 - DNA, 305 bp, Homo sapiens
attccacttaacatcacataccagaggtttctacaaggtttcaacttttaccatagctctcaaagaaagttattattaagcagacaatgccaatacatagacaaatctatttctcagcaaatcatgaaaagctcctaaatttttcctaagagaatataggaggaggaagatgccactatccacacctattttctttttcaacagagtatttattacccagttcctatctcaagtcccaagcagccttgccagaaacagcaaagtttctagtctgtagggacagtctatgtctcatcacacagtat

SEQ ID NO: 113013 - DNA, 475 bp, Homo sapiens
ccccaggaagtcactcacaggaatacacagttgcccagttgtgctcaccaacctcctccttcagtatccctggccctgtggatttaaatacccttcagccctgtgcatgtgtcccgtgtacttagagctagcctcccagcgagatgtaggcaaattttccctcagttcaactgatttaggagattaagtgcgtccatttaatttccctgttaatgtgaaggcttattgcacgaagaattgcaaacacccactgcctggggctctgcacccataggctgtgctgttgtgtgagtgcagcttccttgccctgatctgccacaagtgcagcttcagtggaaagctgtaggggctgctgtgggcagtgagggaggagggcataagagggctcccgagccaccacaccttcccatgggaatgggccagatcatccttgctaatgactggctttgggctgaccttttgtcattaagaaact

SEQ ID NO: 113014 - DNA, 230 bp, Homo sapiens
ccaaggacagccaagcactgctgaagaacaacaacctgataaacttaaacttccaaatatcaagaataattaaaataaaaattagcacagtgtggtactactgcaggatacaaaaatgacaattagaatagagagtgtggaaacagacccacaaatatctgccttatgagaaaggtaacacttatggtacagtaggaaagaatgacctttttttttttttttttgagata

SEQ ID NO: 113015 - DNA, 247 bp, Homo sapiens
aggtggcagggatggaactcctgcctaggtggagcccagagaatttggtgtgggaacagctgcagtggagcatggccagggacgccccaatgctcgccacactcctgagtgggctttgccctttattggatgttggacctggacagagcagggctatcttgcccatggaactgggccagtcttgtcttagcacccccctgtctacttgcctctcctgggatccctacatggccatgcccgcttgcag

SEQ ID NO: 113016 - DNA, 615 bp, Homo sapiens
gacggagtttcgccatgttggccaggctggtctcgaactcctgacctcatgtgattcacctgtctcagcctcccaaagtgctgggattacaggcatgagccactgcacccggcctattcaataaacatgtattcagtctgtacctactgttctagggactgtggacagagcactgagcaagataggaaaaaaccagcacgtactctgggtgagtgtcagcagagccggtctcagggggcatgagccatgcaattacacactcggtttcatgctgtacggtggccattttgaaatccttaataatttttcaacaagagccctcaagtttcattttggaacgggccctgcaaattacgtagccggtcctgtgtgtcaggccaaactagcagataaggaaatgaggcacagagagggaaacaactccaccaaggttcacacaggatgcaagccacacagctgggattgaaacccaggttagactgggtgcagtggctcatgcctgtaatcccagtactttgggaggccaaggcggatggatcatctaaagtcaggagttcaagaccagcctgaccaacatggtaaaactccatctctactaaaaatacaaaaattagc

SEQ ID NO: 113017 - DNA, 360 bp, Homo sapiens
ggtgtgcagagaaagatgtttccagggaagctgagagaaggaagctcattagccagtgcagagctgggcttggaggcctttcctctagtcctgcaaggagctgggagctgtcacactgctcaccatgtccctttctgctcaaattccccaggatggattctgccccctgcactcaagaaaacacagggggccgggcgcggtggctcacgcctgttatcccagcactttgggaggccaagaaaggcggatcacgaggtcaggagatagagaccatcctggctaacacggtgaaaccccgtctctactaaaaatacaaaaaaattagccgggcgtggtggtgggtgcctgtggttccggcta

SEQ ID NO: 113018 - DNA, 1837 bp, Homo sapiens
aaaaaaaaaaaaacagtgggttggaataatcttataatctccctcagcattctcctgctttaaaggcactactcattagaaggaagagctgaaggagaagacggactcctctccatcatgggaaaggaaggaggctaagtgacttccaggaacagctgctaacttccctgatttcacagccctcattttcatgctcatcttttccctaccaccgtctggctcctcagagtgtgtgagctccctagtaggtgcagtagtaatagtaggcaccctttgctgttattgttatgaaaactgtcagctccaggatggtgctggaggtgacgatgatgttgatgacagggttgttaggaatggagttagtggcaagtggagctacagatgggcccacgggtatgagagctactaacaggaactttgactcaatttggcaaaatcgtatttcaaatctaaattctctttccaccagctccttttgctataagggaaagccaagtggaaacgtagaggcatgtgcacccagatctcctgaaaagggcaataggagagggtagcagggaggagacaatcctctactgagctgaactggaaacgcctgattgtcatttcttccctgctttgccactgacgcccgcagcagctgatcaggaaggtatcagatgccttcactagctgtcactaacacctgcctcctgaatcctgatcggggagatggtgtcatcgggccctccacataaaatatttagtggcacttgcttcccaaagaggcaagcgtggcctctccttggcatcaggaacgctccgagttacatgtgctgggagactctcttgttcaggcgagagtcctggagcagcatacctggtttgagacttggagtaggagagagggaaactggtagaacagagactaggcaagttttggctcttgagaatgcatgtgacaagtgacttcatgcactaaacagagagggatgtgacagaaagaagaaagcatcattattaagagaaaactcctgaggttgacactagcagaaaattggggataggaggaagtcacactgggtatgcaaagtcaaatgcatgtttgtttaccagtgtctaccaaactgaggatgggaaattcattctaagacagatgatgggatggatggaggtgaggagctggaaataatgacaaataaattgctaataacaaaggctaatgtatcttaaacacttaagatggccatgaactgttctaagtgcttttatatgtattaactgatttcattgtaataatcctatgacgtagctactagtactaaacctattttatatagatagttagataacatcatagaatggctaagtaccttgaccaagtgtacacagctataggctccatttgcgtccaggcacctaagttcagagctcatgcatttaattgttatatcgcactgcctctcaccagaggcacaaaggtgggctccatcctcccttactcagaatgtggataggagtcctgatctttgcccactgggctctgcttggaacagccacttagtcacatcaatttggcatagaaagatgaaggctctcaacgtgcccttgaagtcagctgtcttcatgaaggccacactcccaaggtggggtgcaaacctcccctcactgcaggagactgtgcctcctcttgactccagtgtccaatgacagctgctcccaggcgggcagtccctgagtcctgtgagatgaattcacttggctggttatcaggagtggcctgtcccaaagcaaatgctgcatgagggtgagaggaaaacagcccagctggagtggtctgtttagaactactggcctg

SEQ ID NO: 113019 - DNA, 805 bp, Homo sapiens
gagcacagggtgccagtttatcccatcattggtgttgcttttttaagttcataattaacctaaatttcagaggctggtaatttctggctttaccccaaattcatggactgtaccctatttagagcctactatatctcttatttttcactacacaatctattttttattgtatctttatagcatatttagaggtagatatgggactatgtaagtttagtacggtttgctgaactttggaatgtttttataatcataatattttgatcaagatggaaccttagaattttcctctcatttggattagaatgttaattctatactaggtagttcttgtggctagactgttgcacttttgaaggcagatttaagagttccactttcatgtggtccagccagctttcttctgtgtctcagaggtctccttactctgctagctgcctttacttttagggattaatggtatggaatagtggctataattgcaagcatattaattaccacaagtggaaaataagttctaattatgtattctatattaacttcatataggaaaaaacaatttttaccttctgactgtagatgttataatgataattttaaaaggcaccacagaagagggagtgggaaattgtttagctacatgaggatcatcctttacaaagggccattgtgaggtttcttttggtaattataaattgtagctatgtgtttaggtggagaggctttttttcttgataagaaacatttggggttatttaacttaggaacttaaaatactttgaattttgcaacttaagtgacatgg

SEQ ID NO: 113020 - DNA, 281 bp, Homo sapiens
cacttatccccattcatatcccctttggacctagggagaaggtactatttataggtgatcacctgagtttattgtcccttgtgctgtgccagaaataaaggtccccacctgctcttattagctctactaacaggataaggaaagtggccctcagagagctactgcttttgtgacaaacaaatgatacaagaaaaaaaaagtggctttttaattttagtgacctggggcaggacttccaaatgaaagtttatttctaaaaactaaaaggtaaatttaatata

SEQ ID NO: 113021 - DNA, 1703 bp, Homo sapiens
cagtctcggttagcttcacttcagcgggaacctgcccactaaggaggccgattctttccggctcgagcaggtccggacccgcccctctggcgtctagcagtctcggaggcctgcccgtatagttcagggccggacagcgagcggcggcgacttgccagtaagggtttggagtcatcagcaggtttaattttggaggaactttacaggtttggctccagcagctgctgttgccaccaccactagttcaagcaccatgcagtttacctcaatatcaaattctttgacctccactgctgctattgggctctcatttacaacttcaacgactaccaccgccactttcaccaccaacactactaccacaatcaccagtggctttactgtgaaccaaaaccaactgttatcaagagggtttgaaaaccttgtaccttatacttcaactgttagtgtagtagcaactcctgtgatgacatatggtcatctggagggtcttataaatgagtggaaccttgagctggaagatcaagagaagtactttcttctccaggccactcaggtcaatgcttgggaccatacattgattgagaatggtgagatgattcgtattttacatggagaagtgaacaaagtgaaactggatcagaaaagattggaacaagaattggattttatcctgtcacagcagcaggaactagaatttctgttgacttatttagaggagtctacgcgcgaccagagtggacttcattatctgcaggatgcagatgaggagcatgtggagacctccaccagatctgcagaattctgaatgcccatatggactccctgcagtggattgatcggaattcaggcatgctgcgaaggaaggtagaagtggtaacacgggttttcgaggattatcgtcacgaggagcatgcacacaatgtcaacactgctttttagtgaatgaccatatcttcagcatgtcgtttctggattattacctacaaattctgatgttaaatagagtagtatttatacttaatatttcatcttgatcataatgaattgtgcatcctttttttcatttaagtattgtactgttgagaattataccttagttttgtttttagtattagaaaatcaaaattatactagcccctttgtccagacagcaacctcttagatgctgactctatatgtgtaatttatgtcttactctccctggcatcagtacacatcatcctcctcactccagttgaatcatagggtgatgtctgccaaaagtacatgccaacctatatagtgctagatactgtaaagtctcttcttctcaaaggaacctactgtctagtttgagatataattaatgcttgtctgcataaaaacaatatagataatataaagaagtgcagtatgaattatagaaagtgtgttatagagattcagagcagggaggaaaagttagggtagattattattaaagggttaaggaaaggtaagtttcaaggaatttggttatttttaatgtatggatatactggcattttatttggttttagcatatgatttatagttggtgatttccgtatatttgtttgtttttctttttttttgtttgtttgttttgttttgttttaaataagccttgttcttaggtttggaacagtctggtctcctgtgtttcatgtttcacctaagtcataaataaaggtaatgtccta

SEQ ID NO: 113022 - DNA, 1875 bp, Homo sapiens
cagtctcggttagcttcacttcagcgggaacctgcccactaaggaggccgattctttccggctcgagcaggtccggacccgcccctctggcgtctagcagtctcggaggcctgcccgtatagttcagggccggacagcgagcggcggcgacttgccagtaaggtttggctccagcagctgctgttgccaccaccactagttcaagcaccatgcagtttacctcaatatcaaattctttgacctccactgctgctattgggctctcatttacaacttcaacgactaccaccgccactttcaccaccaacactactaccacaatcaccagtggctttactgtgaaccaaaaccaactgttatcaagagggtttgaaaaccttgtaccttatacttcaactgttagattcgtattttacatggagaagtgaacaaagtgaaactggatcagaaaagattggaacaagaattggattttatcctgtcacagcagcaggaactagaatttctgttgacttatttagaggagtctacgcgcgaccagagtggacttcattatctgcaggatgcagatgaggagcatgtggagacctccaccagatctgcagaattctgaatgcccatatggactccctgcagtggattgatcggaattcaggcatgctgcgaaggaaggtagaagtggtaacacgggttttcgaggattatcgtcacgaggagcatgcacacaatgtcaacactgctttttagtgaatgaccatatcttcagcatgtcgtttctggattattacctacaaattctgatgttaaatagagtagtatttatacttaatatttcatcttgatcataatgaattgtgcatcctttttttcatttaagtattgtactgttgagaattataccttagttttgtttttagtattagaaaatcaaaattatactagcccctttgtccagacagcaacctcttagatgctgactctatatgtgtaatttatgtcttactctccctggcatcagtacacatcatcctcctcactccagttgaatcatagggtgatgtctgccaaaagtacatgccaacctatatagtgctagatactgtaaagtctcttcttctcaaaggaacctactgtctagtttgagatataattaatgcttgtctgcataaaaacaatatagataatataaagaagtgcagtatgaattatagaaagtgtgttatagagattcagagcagggaggaaaagttagggtagattattattaaagggttaaggaaaggtaagtttcaaggaatttggttatttttaatgtatggatatactggcattttatttggttttagcatatgatttatagttggtgatttccgtatatttgtttgtttttctttttttttgtttgtttgttttgttttgttttaaataagccttgttcttaggtttggaacagtctggtctcctgtgtttcatgtttcacctaagtcataaataaaggtaatgtcctaaaaaaaaacatgtaatactgaaattaactattaaaagtttttaagtgactagagctcagtaacctataatttattgagctaaattttctgttgtactgattgcacacgaccatcgtggcgggtacacattacacgaagaaatatttttgaaatgaatattagcaacgattagtcttatgagcagactaaatgccaaaattgacatggactcttttttttctactcaaacttttccaagcagcagcttcttatccagtaagtttttgtaaccacgcagaattatagaatgtgaaaataatccagaactcatataatcttgtgaattatttctgtagatacacaacttttaagtataatctttagtaat

SEQ ID NO: 113023 - DNA, 150 bp, Homo sapiens
tgctgggccctgccagactcggagcccctgccagtgtgtgtatatcaaggcagggcggggggttgtcttgctctccagaggcaatggaacctgcctctaggcctcccttttcccttctcatctcctcacccctccttttttatgttagat

SEQ ID NO: 113024 - DNA, 260 bp, Homo sapiens
cggagctgttcatgttcggccatcttgccagccacctgtttcttgttcttgaagttcattgagattcttcaatctgtaagtacataatttttttcagatttggaaacttttcatgatttaaaaaaatctattaaagacatgctttattaatacaaacacaaactataaaggactaagaaatataaatatctgtgtcataagcaaacattcaggatcgacagaatgatcaaaggagactgcatcaaattggattcctatgg

SEQ ID NO: 113025 - DNA, 274 bp, Homo sapiens
ctggatgtgctccccaagaaccagagtccacagctgagctgagagcaggcaaatgatcacaacttgattttttttaaatcctgcaatagcatgaataaagtggcacaaatccaagtcctaaagtctatttttgaacctgcaaagctagagggtcttgtcttgagatccttggtgaccctaccacagtactcacattccaatgaggccctgtcaaaaaccagccttaggctgtgcacggtggctcaaacctgtaatcccagcactttgggggtgg

SEQ ID NO: 113026 - DNA, 150 bp, Homo sapiens
agtttctggtgtgtgtgtgtgtgtgtgtgtgtgtgtatttatttatgcaatggtagcattatttgtaattgtaaaataccagaaactatattgattgtatacacacacacatacacaatggagtagtctacagcttagaataagggagat

SEQ ID NO: 113027 - DNA, 591 bp, Homo sapiens
ttttgtctgtactgcaagttaaaccaattctattattatccttaccttgcctccttctcttagatgcttattattaaaaccataaaactaccttatttacactgatacttcaaaacttgattcaaccacatatgaaaaagaggctaaagggactttcagttgggtgtatcagcccaattctctatcacagcctcctcccctctggttattttgcaagtccattccaggcatagcgatacgtggaacagtcactgtgagaaatgtggcaggggcggcaacagatcctagatctagatgtcatggttcttctgagaagtcagagtagaatcaaacagaaaactatcactacattaaaaatatcctggacgtattagcaaacaaatgcatgcatttattcacggaataaaaatcaaaggtgccacatttgtaaccttatgcttctagcttagctacatgaaataaaaagctatttgaaatcaactacaaatgcaataaagcatagattttccaaataaatcttatttgctgtcaaaccataactcactcataaatcatacaatattttcactttgtaatacaataaaaatgatt

SEQ ID NO: 113028 - DNA, 213 bp, Homo sapiens
acatatggaatgcttcaatgctggcttaaccagcccttcttctctgaaataatagtgcaaatttatttagcttctttcctccttgaagattctcaaacattctataagttatgagtagagatgttccctagagagatagaaaaagaacatagcagaaaggggcagtaaacatttccagcccttcaatgatgttagaaactatttgaattcagg

SEQ ID NO: 113029 - DNA, 324 bp, Homo sapiens
ctcctaacaaatgggtttggagtaacactcccagctctcctggctcagagaagtagaaagaaacacactagacttcatttgaagggcatgctttagagtaggctccccctacacaagtctttataacataccactgacttgtaaacccctaaatgaaggactgcttatacacaatcattttccttttaacatttctgcacatttctcacaatgtacaagtctatgtttgactcagtgtgcatctggaggcaatgtttcacagcagttgagcagaagctatgaagtttggggacagaaaaggtcccagtgatgctgctgttattc

SEQ ID NO: 113030 - DNA, 644 bp, Homo sapiens
aaaagaacctaggtgaatattggggcaggctccctgatgaaatgatatatattcttaaaataaacttttcatctttgcatatacgtttatatgccgagttttctccaaccttgtcttacagcactttgtatactacattctagccatactaaactcttgcagttcctgagacatgtgctgtatcctatttcttctggtccttttctcattgattaactacctggagcatacttttaattcagtgtcagtctgctttgcaatctttacttaagtcctaggtaaccattttgtcatctagcaagcttgccttgacatcttacctctgttcccctaggaatattcacaccattggctctcaaatctacatgtgctgtgaatttcttctattctagaggttgatacgcttttctgcacaaggccagctaatttaggctttgtgggccagatagtctcttgttgctcgcttttgctgttgtagtgtgaaatcagccatagacagtttataagcaagtgagtgtggccgtgttccaattaacctttatttacaaaaacataaaatgggccgagcgcggtggctcacgcctgtaatcccagcactttgggaggcagaggcgggcggatcatgaggttaggagatcgagacc

SEQ ID NO: 113031 - DNA, 764 bp, Homo sapiens
cgctgtggctcatgcctgtaatcccagcactttgggaggccaaggcgggtggatcacaaggtcaggaactcaagaccagcctggccagcatggtgaaaccctgtctctactaaaaatacaaaaattagctggccatggtggcacgtgcctgtaatcccagctactcaggaggctgaagcagaaaaactgtttgaaccgggacccgggaggcgaaggttgcagtgagctgagatcgtgccactgcactgcagcctgggctacagagcgagactccgtctcaaaaaagaaaaaaaaaagaataccacagaagtgatgttggttctcctcatggtgtcctattgggggcagtgtcctatcaggaggcactgtcctatcacggtgttagggtgcctcattcctgggggcaaacttctatcacttggtttgggtggattctgccaggtttctccattgtgaagttactattccacctttgtaactaataaatatcttgtagggaaatacttcgagactatgtaaatatttgtttcccaaacatttagccactagctttaacaaccattaatgattcctgcttgagataattattattgtgatggttgccaaacagtgttttttctatttccatcattccatatatattaattggaattctgtaagacctttcttttctcacttttaattcaattacagtgaaaggatacaaagaaagtcagcaaacgggctcatgggtatttgtcttattctatgggtactacaggttg

SEQ ID NO: 113032 - DNA, 314 bp, Homo sapiens
ctatttttctggcattttaggctggaactgttagagtaagaagccccaccctgtgactgggtatttctgtattgaactcggtgtgtttgtttccagtcttcccgtgcacatctctacctctctgtctgaggtcacagtagaaagagaaaccaagtcagcagggactcagctgactcctcctttcaggatttccttggtagtttccaaattctttcctctacaccaggagcgtgtgttctctcgcccctctaccccctattctctcccatcctccctgtttctctttctttctcaaccaggtctggtctaacaaa

SEQ ID NO: 113033 - DNA, 335 bp, Homo sapiens
ggaaaggaccaggagactgggttggtactggttcctgcgggctggagggggtggagtagggagtgttgtgaaagtttcaagcacagaggactgaatggaagcctcacaatgcaacctaaggactttggattcttgcttttgagtacatgcactgtgtgtgtgtgtgtgtgtgtgtgtgtgtgtgtgtgtgtgtgtgtgtgtaaatggtgtagtttgttggctgtcagccttactaggaggctggtttggagcctgttgccttagctctgtggggtgatgatgggaatagtgaaaaagagggtgacaaaagcagagagtctcaaagaggggacaga

SEQ ID NO: 113034 - DNA, 321 bp, Homo sapiens
gcccgcctcggcctcccaaagtgctgggattacaggtgtgagccacgacgcctggctgatatgtatttttataattattttaggtgatatataaataaaaagattacacagaaagtcactgtgtttagttgtcttagtgtatattttgcagctagtttttcttggagtgctcactgctccaagctgggtattctgtgggtgctttattaagatttatttatatggcagttagttgcacctgcactaaaattttttctaggttaggctgcaaaataaatatacaaagaagtagcttttttaaatgctaggaataaccagttt

SEQ ID NO: 113035 - DNA, 452 bp, Homo sapiens
tattactagtttcgtacctggaaaacccctggtccttttaaccaggaaactcatcattgtctgtcctttgagggaaaaagccgcagcgtattacacaaagagatcatgcctcagactgtgcggaatgccactctgttaaaagatgagatcctggcttcacacttgaatcagtcctgtgaaaactgtgtgaatattgagaaggaggggcaaagaaatataaaaaatggagcttacagggtaacagtaagctacctgcacatcacagaaattctgctctttagagagcttcagtccaagactatcaacccagtaactcctctgatccaatcctagttgggctgaagaatgtaccactgcagtgtagcatttttcaggtggtcataatgtggagacagttagtaaagggaaggttacaagctcagaaaaatgcagcattcactgacagccacaca

SEQ ID NO: 113036 - DNA, 388 bp, Homo sapiens
tgtgtggaaaggcagtgagtcagccaggaacatgctgggggctggggagggtcccaccagcaaggcggacaagcccaggaggcggttctgggccttggagaaaagctggggtaggggagagatattaggtgtccttccattttcatgttacttaacagctactggagtggaggagactgccctagtggtatgcagaatgataagaaaggaggtataagaaaggagggataagaaaggagggaatgggagggacagaggaagagggggtcctggagatgggcagtcagagctaagtagtgggggcttcaaggagggatggtcgtgggtgctggtatttattgagtgtttgctgtgtgccgggtaccctctgtgtggattcacttacccc

SEQ ID NO: 113037 - DNA, 426 bp, Homo sapiens
gtcttagtgctctgcagtgctcgccctcactgggaagcttcaacctcgggagggtggttcagtgggaacagtaggagcctgagaccaaaaaaacactcagcattttgaagaaataatttgattcattaatttctgcattcatttagcaatatttatggagtttctgccacatggcaggcactggggtggatataaaggaaatagggacaaaaccgcactgaaccagtctctcggccaaacagttaccaaggaattatgatgaagtgaatggcagggtccccggccagggtgtgtgtgtgcatgggaagggtcccctaaaccagctggggaggccaggaagacctctctgtcaggaagtggcgtctcaacaggttaatccagaggggtcggtggcgattagccaggaagagtctggccgccctgtaa

SEQ ID NO: 113038 - DNA, 513 bp, Homo sapiens
agagtttgaacagggtgtcatgactctggagggaggaaaaaggagacatcatggaaaaaaatagatcccgagtattcatttgcgagtagaaaagagagcagttcaagtgaattatataatgcactgccaagactgaaatgaaaatgcataggtcttgagtatttccattggtcatgagataaggggacatttaatgacaggcaacccattttctttactgtgtcctatatattccaactaaagtgtccacatctttggattttctatcagaattcagtaatttcaataaaatggctcaaattatccttatttagaaaatatatttacagttaaaaaattctcatttcaaattcttgcaccaaaagagaaaacctacttgaattactcaagctgatcaggtatgctgaaatgtttctccaggaagtgctattgaaaatatggtcacaactgattctacttactggtctacttagtgttaagtataactgaaatgttctggactctcctccctgg

SEQ ID NO: 113039 - DNA, 124 bp, Homo sapiens
atttaagtatccgataagtggtaactatggtgacagttgtctgcctgtgtttgctaatgatgaacgtattcattccctcactcattgattcactgagcaaatatatactaaggatgctctaagg

SEQ ID NO: 113040 - DNA, 302 bp, Homo sapiens
agattggagcagtctagaaccacggagagctcagggatcatcttatgcaacacccctccctgttcatggaagaggaagctggagcatggggacagcggtgtcccctgggtggtggttggctggaaccagaaccctggcccagggctgctccattcatgtgggccagccttgatggctacgtccacaaactcactcctgggcctctcccaccaccacggggcctcaccttgatcttccaggtcgatccttcaccccagatgctctgggccattagaggaggggtcaggctgtcctctgagtcc

SEQ ID NO: 113041 - DNA, 336 bp, Homo sapiens
gcccacgccccattcaggtcctggcacagtgaggccaaccccacggctctaaaattataaacccaccatgagcagaagcccctatgcctccctgtttcccccacggcacatcctgccttcctacaaaccatcagacggacttattactttctttgcattctgcatcccctatagaatgccgcctccacgaggccaggggacttgcatatttcgttcaccgattgatccccactcaccagaacggagcctggcacctagcaggctctcagtgagatttgcaaaataaagaaggggttagagaaatgctgggctggaaaatgtcagcttgggacttgc

SEQ ID NO: 113042 - DNA, 1679 bp, Homo sapiens
accgggaactcggaggcggggagcggctgggaagtggccgtggtggttggccgcggtggagctagcaggcgggcgggcgggagcgggcgccggagtggagaaaggagccagcggtgggcagcgctgctgggatggcgcgggccgggccggcgtggctgctgctggcaatctgggtggtcctgccatcatggctgtcctctgcaaaggtctcctcgctcattgagagaatctctgaccccaaggacttgaaaaaactgctcagaacccggaataatgtactggtgctttactccaaatctgaggtggcagctgaaaatcatctcaggttactgtccacagtggcccaggcggtgaaaggacaagggaccatctgctgggtggactgtggtgatgcagagagtagaaaattgtgcaagaagatgaaagttgacctgagcccgaaggacaaaaaggttgaattattccattaccaggatggtgcatttcatactgaatataaccgagctgtgacatttaagtccatagtggcctttttgaaggatccaaaagggcccccactgtgggaggaagatcctggagccaaagatgttgtccaccttgacagtgaaaaggacttcagacggctcctgaagaaggaagagaagccgctcctgatcatgttttatgccccctggtgcagcatgtgcaagaggatgatgccgcatttccagaaggctgcgactcagctgcgaggccacgccgtgctggccgggatgaatgtctactcctctgaatttgaaaacatcaaggaggagtacagcgtgcgcggcttccccaccatctgctattttgagaaaggacggttcttgttccagtatgacaactatgggtccacagctgaggacattgtggagtggctgaagaaggtgtggccactgtaagaaaatgaagccggagtttgagaaggcagcagaagccctccatggagaagcggatctgtcgatgccactgtcaacaaggccctggcagaaagattccacatctcagagtttcctacgttgaagtattttaagaatggagagaaatacgcagtgcctgtgctcaggacaaagaagaagtttctcgagtggatgcaaaaccctgaggcccccccgcccccagagcccacgtgggaagagcagcagacaagcgtgttgcacctggtgggggacaacttccgggagaccctgaagaagaagaaacacaccttggtcatgttctacgccccttggtgcccacactgtaagaaggtcattccgcactttactgctactgctgatgccttcaaagatgaccgaaagattgcctgtgccgctgttgactgtgtcaaagacaagaaccaagacctgtgccagcaggaggcggtcaagggctaccccactttccactactaccactatgggaagttcgcagaaaagtatgacagcgaccgcacagaattgggatttaccaattatattcgagccctccgggagggagaccatgaaagactagggaaaaagaaggaagagttataattcctgcctcagaaaaagcttttccattacactgtgaatgatacctgttttgttgtttctgaatttccacatgttctgaagacaaattttttatagccgcttatggccattttgtacaattttgaaataaaattaaaccattta

SEQ ID NO: 113043 - DNA, 608 bp, Homo sapiens
accgggaactcggaggcggggagcggctgggaagtggccgtggtggttggccgcggtggagctagcaggcgggcgggcgggagcgggcgccggagtggagaaaggagccagcggtgggcagcgctgctgggatggcgcgggccgggccggcgtggctgctgctggcaatctgggtggtcctgccatcatggctgtcctctgcaaaggtctcctcgctcattgagagaatctctgaccccaaggacttgaaaaaactgctcagaacccggaataatgtactggtgctttactccaaatctgaggtggcagctgaaaatcatctcaggttactgtccacagtggcccaggcggtgaaaggacaagggaccatctgctgggtggactgtggtgatgcagagagtagaaaattgtgcaagaagatgaaagttgacctgagcccgaaggacaaaaaggttgaattattccattaccagtaagtacacatgggcatttccaatttccaagtaagtgccaaacgctttcattggtattttcagcgaacagcaatttttagttagattaattttatttcagaatggttttcttcctgtgtttacaattatttcttt

SEQ ID NO: 113044 - DNA, 1835 bp, Homo sapiens
accgggaactcggaggcggggagcggctgggaagtggccgtggtggttggccgcggtggagctagcaggcgggcgggcgggagcgggcgccggagtggagaaaggagccagcggtgggcagcgctgctgggatggcgcgggccgggccggcgtggctgctgctggcaatctgggtggtcctgccatcatggctgtcctctgcaaaggtctcctcgctcattgagagaatctctgaccccaaggacttgaaaaaactgctcagaacccggaataatgtactggtgctttactccaaatctgaggtggcagctgaaaatcatctcaggttactgtccacagtggcccaggcggtgaaaggacaagggaccatctgctgggtggactgtggtgatgcagagagtagaaaattgtgcaagaagatgaaagttgacctgagcccgaaggacaaaaaggttgaattattccattaccaggatggtgcatttcatactgaatataaccgagctgtgacatttaagtccatagtggcctttttgaaggatccaaaagggcccccactgtgggaggaagatcctggagccaaagatgttgtccaccttgacagtgaaaaggacttcagacggctcctgaagaaggaagagaagccgctcctgatcatgttttatgccccctggtgcagcatgtgcaagaggatgatgccgcatttccagaaggctgcgactcagctgcgaggccacgccgtgctggccgggatgaatgtctactcctctgaatttgaaaacatcaaggaggagtacagcgtgcgcggcttccccaccatctgctattttgagaaaggacggttcttgttccagtatgacaactatgggtccacagctgaggacattgtggagtggctgaagaatccgcagccgccacagccccaggtccctgagactccctgggcagatgagggcggctccgtttatcacctgaccgatgaagactttgaccagtttgtgaaggaacactcctctgtcctcgtcatgttccacgccccatggtgtggccactgtaagaaaatgaagccggagtttgagaaggcagcagaagccctccatggagaagcggatagctctggtgtccttgcagctgtcgatgccactgtcaacaaggccctggcagaaagattccacatctcagagtttcctacgttgaagtattttaagaatggagagaaatacgcagtgcctgtgctcaggacaaagaagaagtttctcgagtggatgcaaaaccctgaggcccccccgcccccagagcccacgtgggaagagcagcagacaagcgtgttgcacctggtgggggacaacttccgggagaccctgaagaagaagaaacacaccttggtcatgttctacgccccttggtgcccacactgtaagaaggtcattccgcactttactgctactgctgatgccttcaaagatgaccgaaagattgcctgtgccgctgttgactgtgtcaaagacaagaaccaagacctgtgccagcaggaggcggtcaagggctaccccactttccactactaccactatgggaagttcgcagaaaagtatgacagcgaccgcacagaattgggatttaccaattatattcgagccctccgggagggagaccatgaaagactagggaaaaagaaggaagagttataattcctgcctcagaaaaagcttttccattacactgtgaatgatacctgttttgttgtttctgaatttccacatgttctgaagacaaattttttatagccgcttatggccattttgtacaattttgaaataaaattaaaccattta

SEQ ID NO: 113045 - DNA, 1913 bp, Homo sapiens
accgggaactcggaggcggggagcggctgggaagtggccgtggtggttggccgcggtggagctagcaggcgggcgggcgggagcgggcgccggagtggagaaaggagccagcggtgggcagcgctgctgggatggcgcgggccgggccggcgtggctgctgctggcaatctgggtggtcctgccatcatggctgtcctctgcaaaggtctcctcgctcattgagagaatctctgaccccaaggacttgaaaaaactgctcagaacccggaataatgtactggtgctttactccaaatctgaggtggcagctgaaaatcatctcaggttactgtccacagtggcccaggcggtgaaaggacaagggaccatctgctgggtggactgtggtgatgcagagagtagaaaattgtgcaagaagatgaaagttgacctgagcccgaaggacaaaaaggttgaattattccattaccaggatggtgcatttcatactgaatataaccgagctgtgacatttaagtccatagtggcctttttgaaggatccaaaagggcccccactgtgggaggaagatcctggagccaaagatgttgtccaccttgacagtgaaaaggacttcagacggctcctgaagaaggaagagaagccgctcctgatcatgttttatgccccctggtgcagcatgtgcaagaggatgatgccgcatttccagaaggctgcgactcagctgcgaggccacgccgtgctggccgggatgaatgtctactcctctgaatttgaaaacatcaaggaggagtacagcgtgcgcggcttccccaccatctgctattttgagaaaggacggttcttgttccagtatgacaactatgggtccacagctgaggacattgtggagtggctgaagaatccgcagccgccacagccccaggtccctgagactccctgggcagatgagggcggctccgtttatcacctgaccgatgaagactttgaccagtttgtgaaggaacactcctctgtcctcgtcatgttccacgccccatggtgtggccactgtaagaaaatgaagccggagtttgagaaggcagcagaagccctccatggagaagcggatagctctggtgtccttgcagctgtcgatgccactgtcaacaaggccctggcagaaagattccacatctcagagtttcctacgttgaagtattttaagaatggagagaaatacgcagtgcctgtgctcaggacaaagaagaagtttctcgagtggatgcaaaaccctgaggcccccccgcccccagagcccacgtgggaagagcagcagacaagcgtgttgcacctggtgggggacaacttccgggagaccctgaagaagaagaaacacaccttggtcatgttctacgccccttggtgcccacactgtaagaaggtcattccgcactttactgctactgctgatgccttcaaagatgaccgaaagattgcctgtgccgctgttgactgtgtcaaagacaagaaccaagacctgtgccagcaggaggcggtcaagggctaccccactttccactactaccactatgggaagttcgcagaaaagtatgacagcgaccgcacagaattgggatttaccaattatattcgagccctccgggagggagaccatgaaagactagggaaaaagaaggaagagttataattcctgcctcagaaaaagcttttccattacactgtgaatgatacctgttttgttgtttctgaatttccacatgttctgaagacaaattttttatagccgcttatggccattttgtacaattttgaaataaaattaaaccatttattcgtcttttagccttggcactccagtatactttctcttgcgcttgcagggaagccacattgccacaggtcatcttca

SEQ ID NO: 113046 - DNA, 1893 bp, Homo sapiens
ggcgggcactgggtgctacgcgggagacagcgggcgtcccggtgccctcgccgccaagcgctcccggacgcaggggcaggaggcagctgtggggcgccgggagatccctggcagggtgcttacgccacggccacaactttgcggggatgcaggtcggggcacagccggtcgggcaggacgccggcgggctgcggggtgagctccgctccagactccgagccctgcacctgtgtggtcctgccatcatggctgtcctctgcaaaggtctcctcgctcattgagagaatctctgaccccaaggacttgaaaaaactgctcagaacccggaataatgtactggtgctttactccaaatctgaggtggcagctgaaaatcatctcaggttactgtccacagtggcccaggcggtgaaaggacaagggaccatctgctgggtggactgtggtgatgcagagagtagaaaattgtgcaagaagatgaaagttgacctgagcccgaaggacaaaaaggttgaattattccattaccaggatggtgcatttcatactgaatataaccgagctgtgacatttaagtccatagtggcctttttgaaggatccaaaagggcccccactgtgggaggaagatcctggagccaaagatgttgtccaccttgacagtgaaaaggacttcagacggctcctgaagaaggaagagaagccgctcctgatcatgttttatgccccctggtgcagcatgtgcaagaggatgatgccgcatttccagaaggctgcgactcagctgcgaggccacgccgtgctggccgggatgaatgtctactcctctgaatttgaaaacatcaaggaggagtacagcgtgcgcggcttccccaccatctgctattttgagaaaggacggttcttgttccagtatgacaactatgggtccacagctgaggacattgtggagtggctgaagaatccgcagccgccacagccccaggtccctgagactccctgggcagatgagggcggctccgtttatcacctgaccgatgaagactttgaccagtttgtgaaggaacactcctctgtcctcgtcatgttccacgccccatggtgtggccactgtaagaaaatgaagccggagtttgagaaggcagcagaagccctccatggagaagcggatagctctggtgtccttgcagctgtcgatgccactgtcaacaaggccctggcagaaagattccacatctcagagtttcctacgttgaagtattttaagaatggagagaaatacgcagtgcctgtgctcaggacaaagaagaagtttctcgagtggatgcaaaaccctgaggcccccccgcccccagagcccacgtgggaagagcagcagacaagcgtgttgcacctggtgggggacaacttccgggagaccctgaagaagaagaaacacaccttggtcatgttctacgccccttggtgcccacactgtaagaaggtcattccgcactttactgctactgctgatgccttcaaagatgaccgaaagattgcctgtgccgctgttgactgtgtcaaagacaagaaccaagacctgtgccagcaggaggcggtcaagggctaccccactttccactactaccactatgggaagttcgcagaaaagtatgacagcgaccgcacagaattgggatttaccaattatattcgagccctccgggagggagaccatgaaagactagggaaaaagaaggaagagttataattcctgcctcagaaaaagcttttccattacactgtgaatgatacctgttttgttgtttctgaatttccacatgttctgaagacaaattttttatagccgcttatggccattttgtacaattttgaaataaaattaaaccattta

SEQ ID NO: 113047 - DNA, 1723 bp, Homo sapiens
cgattcttctggggcccagccagaagctggaactcacagtcattggctccttgatccccaggtggtcctgccatcatggctgtcctctgcaaaggtctcctcgctcattgagagaatctctgaccccaaggacttgaaaaaactgctcagaacccggaataatgtactggtgctttactccaaatctgaggtggcagctgaaaatcatctcaggttactgtccacagtggcccaggcggtgaaaggacaagggaccatctgctgggtggactgtggtgatgcagagagtagaaaattgtgcaagaagatgaaagttgacctgagcccgaaggacaaaaaggttgaattattccattaccaggatggtgcatttcatactgaatataaccgagctgtgacatttaagtccatagtggcctttttgaaggatccaaaagggcccccactgtgggaggaagatcctggagccaaagatgttgtccaccttgacagtgaaaaggacttcagacggctcctgaagaaggaagagaagccgctcctgatcatgttttatgccccctggtgcagcatgtgcaagaggatgatgccgcatttccagaaggctgcgactcagctgcgaggccacgccgtgctggccgggatgaatgtctactcctctgaatttgaaaacatcaaggaggagtacagcgtgcgcggcttccccaccatctgctattttgagaaaggacggttcttgttccagtatgacaactatgggtccacagctgaggacattgtggagtggctgaagaatccgcagccgccacagccccaggtccctgagactccctgggcagatgagggcggctccgtttatcacctgaccgatgaagactttgaccagtttgtgaaggaacactcctctgtcctcgtcatgttccacgccccatggtgtggccactgtaagaaaatgaagccggagtttgagaaggcagcagaagccctccatggagaagcggatagctctggtgtccttgcagctgtcgatgccactgtcaacaaggccctggcagaaagattccacatctcagagtttcctacgttgaagtattttaagaatggagagaaatacgcagtgcctgtgctcaggacaaagaagaagtttctcgagtggatgcaaaaccctgaggcccccccgcccccagagcccacgtgggaagagcagcagacaagcgtgttgcacctggtgggggacaacttccgggagaccctgaagaagaagaaacacaccttggtcatgttctacgccccttggtgcccacactgtaagaaggtcattccgcactttactgctactgctgatgccttcaaagatgaccgaaagattgcctgtgccgctgttgactgtgtcaaagacaagaaccaagacctgtgccagcaggaggcggtcaagggctaccccactttccactactaccactatgggaagttcgcagaaaagtatgacagcgaccgcacagaattgggatttaccaattatattcgagccctccgggagggagaccatgaaagactagggaaaaagaaggaagagttataattcctgcctcagaaaaagcttttccattacactgtgaatgatacctgttttgttgtttctgaatttccacatgttctgaagacaaattttttatagccgcttatggccattttgtacaattttgaaataaaattaaaccattta

SEQ ID NO: 113048 - DNA, 1606 bp, Homo sapiens
accgggaactcggaggcggggagcggctgggaagtggccgtggtggttggccgcggtggagctagcaggcgggcgggcgggagcgggcgccggagtggagaaaggagccagcggtgggcagcgctgctgggatggcgcgggccgggccggcgtggctgctgctggcaatctgggtggtcctgccatcatggctgtcctctgcaaaggtctcctcgctcattgagagaatctctgaccccaaggacttgaaaaaactgctcagaacccggaataatgtactggtgctttactccaaatctgaggtggcagctgaaaatcatctcaggttactgtccacagtggcccaggcggtgaaaggacaagggaccatctgctgggtggactgtggtgatgcagagagtagaaaattgtgcaagaagatgaaagttgacctgagcccgaaggacaaaaaggttgaattattccattaccaggatggtgcatttcatactgaatataaccgagctgtgacatttaagtccatagtggcctttttgaaggatccaaaagggcccccactgtgggaggaagatcctggagccaaagatgttgtccaccttgacagtgaaaaggacttcagacggctcctgaagaaggaagagaagccgctcctgatcatgttttatgccccctggtgcagcatgtgcaagaggatgatgccgcatttccagaaggctgcgactcagctgcgaggccacgccgaaaggacggttcttgttccagtatgacaactatgggtccacagctgaggacattgtggagtggctgaagaaggtgtggccactgtaagaaaatgaagccggagtttgagaaggcagcagaagccctccatggagaagcggatagctctggtgtccttgcagctgtcgatgccactgtcaacaaggccctggcagaaagattccacatctcagagtttcctacgttgaagtattttaagaatggagagaaatacgcagtgcctgtgctcaggacaaagaagaagtttctcgagtggatgcaaaaccctgaggcccccccgcccccagagcccacgtgggaagagcagcagacaagcgtgttgcacctggtgggggacaacttccgggagaccctgaagaagaagaaacacaccttggtcatgttctacgccccttggtgcccacactgtaagaaggtcattccgcactttactgctactgctgatgccttcaaagatgaccgaaagattgcctgtgccgctgttgactgtgtcaaagacaagaaccaagacctgtgccagcaggaggcggtcaagggctaccccactttccactactaccactatgggaagttcgcagaaaagtatgacagcgaccgcacagaattgggatttaccaattatattcgagccctccgggagggagaccatgaaagactagggaaaaagaaggaagagttataattcctgcctcagaaaaagcttttccattacactgtgaatgatacctgttttgttgtttctgaatttccacatgttctgaagacaaattttttatagccgcttatggccattttgtacaattttgaaataaaattaaaccattta

SEQ ID NO: 113049 - DNA, 1780 bp, Homo sapiens
accgggaactcggaggcggggagcggctgggaagtggccgtggtggttggccgcggtggagctagcaggcgggcgggcgggagcgggcgccggagtggagaaaggagccagcggtgggcagcgctgctgggatggcgcgggccgggccggcgtggctgctgctggcaatctgggtggtcctgccatcatggctgtcctctgcaaaggtctcctcgctcattgagagaatctctgaccccaaggacttgaaaaaactgctcagaacccggaataatgtactggtgctttactccaaatctgaggtggcagctgaaaatcatctcaggttactgtccacagtggcccaggcggtgaaaggacaagggaccatctgctgggtggactgtggtgatgcagagagtagaaaattgtgcaagaagatgaaagttgacctgagcccgaaggacaaaaaggttgaattattccattaccaggatggtgcatttcatactgaatataaccgagctgtgacatttaagtccatagtggcctttttgaaggatccaaaagggcccccactgtgggaggaagatcctggagccaaagatgttgtccaccttgacagtgaaaaggacttcagacggctcctgaagaaggaagagaagccgctcctgatcatgttttatgccccctggtgcagcatgtgcaagaggatgatgccgcatttccagaaggctgcgactcagctgcgaggccacgccgtgctggccgggatgaatgtctactcctctgaatttgaaaacatcaaggaggagtacagcgtgcgcggcttccccaccatctgctattttgagaaaggacggttcttgttccagtatgacaactatgggtccacagctgaggacattgtggagtggctgaagaatccgcagccgccacagccccaggtccctgagactccctgggcagatgagggcggctccgtttatcacctgaccgatgaagactttgaccagtttgtgaaggaacactcctctgtcctcgtcatgttccacgccccatggtgtggccactgtaagaaaatgaagccggagtttgagaaggcagcagaagccctccatggagaagcggatagctctggtgtccttgcagctgtcgatgccactgtcaacaaggccctggcagaaagattccacatctcagagtttcctacgttgaagtattttaagaatggagagaaatacgcagtgcctgtgctcaggacaaagaagaagtttctcgagtggatgcaaaaccctgaggcccccccgcccccagagcccacgtgggaagagcagcagacaagcgtgttgcacctggtgggggacaacttccgggagaccctgaagaagaagaaacacaccttggtcatgttctacgccccttggtgcccacactgtaagaaggtcattccgcactttactgctactgctgatgccttcaaagatgaccgaaagattgcctgtgccgctgttgactgtgtcaaagacaagaaccaagacctgtgccagcaggaggcggtcaagggctaccccactttccactactaccactatgggaagttcgcagaaaagtatgacagcgaccgcacagaattgggatttaccaattatattcgagccctccgggagggagaccatgaaagactagggaaaaagaaggaagagttataattcctgcatttccacatgttctgaagacaaattttttatagccgcttatggccattttgtacaattttgaaataaaattaaaccattta

SEQ ID NO: 113050 - DNA, 2259 bp, Homo sapiens
accgggaactcggaggcggggagcggctgggaagtggccgtggtggttggccgcggtggagctagcaggcgggcgggcgggagcgggcgccggagtggagaaaggagccagcggtgggcagcgctgctgggatggcgcgggccgggccggcgtggctgctgctggcaatctgggtggtcctgccatcatggctgtcctctgcaaaggtctcctcgctcattgagagaatctctgaccccaaggacttgaaaaaactgctcagaacccggaataatgtactggtgctttactccaaatctgaggtggcagctgaaaatcatctcaggttactgtccacagtggcccaggcggtgaaaggacaagggaccatctgctgggtggactgtggtgatgcagagagtagaaaattgtgcaagaagatgaaagttgacctgagcccgaaggacaaaaaggttgaattattccattaccaggatggtgcatttcatactgaatataaccgagctgtgacatttaagtccatagtggcctttttgaaggatccaaaagggcccccactgtgggaggaagatcctggagccaaagatgttgtccaccttgacagtgaaaaggacttcagacggctcctgaagaaggaagagaagccgctcctgatcatgttttatgccccctggtgcagcatgtgcaagaggatgatgccgcatttccagaaggctgcgactcagctgcgaggccacgccgtgctggccgggatgaatgtctactcctctgaatttgaaaacatcaaggaggagtacagcgtgcgcggcttccccaccatctgctattttgagaaaggacggttcttgttccagtatgacaactatgggtccacagctgaggacattgtggagtggctgaagaatccgcagccgccacagccccaggtccctgagactccctgggcagatgagggcggctccgtttatcacctgaccgatgaagactttgaccagtttgtgaaggaacactcctctgtcctcgtcatgttccacgccccatggtgtggccactgtaagaaaatgaagccggagtttgagaaggcagcagaagccctccatggagaagcggatagctctggtgtccttgcagctgtcgatgccactgtcaacaaggccctggcagaaagattccacatctcagagtttcctacgttgaagtattttaagaatggagagaaatacgcagtgcctgtgctcaggacaaagaagaagtttctcgagtggatgcaaaaccctgaggcccccccgcccccagagcccacgtgggaagagcagcagacaagcgtgttgcacctggtgggggacaacttccgggagaccctgaagaagaagaaacacaccttggtcatgttctacgccccttggtgcccacactgtaagaaggtcattccgcactttactgctactgctgatgccttcaaagatgaccgaaagattgcctgtgccgctgttgactgtgtcaaagacaagaaccaagacctgtgccagcaggaggcggtcaagggctaccccactttccactactaccactatgggaagttcgcagaaaagtatgacagcgaccgcacagtaagtgggggagaggcgtctgcccagagctctctctctgctgatgggcagggaaacttccactgaggaggggcagcactgggcagcatcccagaaactgcagaagtcagctggaacactgcaccgagaggcccaggccctgggcctggctgaggcttgacattgttggaggagagtcccaaggggttgccacagatgtcctgtccccagaggcaggctggactccagatgccgagggttttctcacttgctggtcggggctggtgcaagccacgcagaccctctccaccttgcagaagtctgcccacctctccctgtcataggagtgaccccctggaggggctgggggtgtggggagagagagtgcacagccagctcagggattaaagctctttctctctctctctctcccacttccctgcaggaattgggatttaccaattatattcgagccctccgggagggagaccatgaaagactagggaaaaagaaggaagagttataattcctgcctcagaaaaagcttttccattacactgtgaatgatacctgttttgttgtttctgaatttccacatgttctgaagacaaattttttatagccgcttatggccattttgtacaattttgaaataaaattaaaccattta

SEQ ID NO: 113051 - DNA, 1197 bp, Homo sapiens
accgggaactcggaggcggggagcggctgggaagtggccgtggtggttggccgcggtggagctagcaggcgggcgggcgggagcgggcgccggagtggagaaaggagccagcggtgggcagcgctgctgggatggcgcgggccgggccggcgtggctgctgctggcaatctgggtggtcctgccatcatggctgtcctctgcaaaggtctcctcgctcattgagagaatctctgaccccaaggacttgaaaaaactgctcagaacccggaataatgtactggtgctttactccaaatctgaggtggcagctgaaaatcatctcaggttactgtccacagtggcccaggcggtgaaaggacaagggaccatctgctgggtggactgtggtgatgcagagagtagaaaattgtgcaagaagatgaaagttgacctgagcccgaaggacaaaaaggttgaattattccattaccaggatggtgcatttcatactgaatataaccgagctgtgacatttaagtccatagtggcctttttgaaggatccaaaagggcccccactgtgggaggaagatcctggagccaaagatgttgtccaccttgacagtgaaaaggacttcagacggctcctgaagaaggaagagaagccgctcctgatcatgttttatgccccctggtgcagcatgtgcaagaggatgatgccgcatttccagaaggctgcgactcagctgcgaggccacgccgtgctggccgggatgaatgtctactcctctgaatttgaaaacatcaaggaggagtacagcgtgcgcggcttccccaccatctgctattttgagaaaggacggttcttgttccagtatgacaactatgggtccacagctgaggacattgtggagtggctgaagaatccgcagccgccacagccccaggtccctgagactccctgggcagatgagggcggctccgtttatcacctgaccgatgaagactttgaccagtttgtgaaggaacactcctctgtcctcgtcatgttccacgccccatgtgagtggaactttgctcctccccctccacaccctcccctctctcagagtaggatgagtgtggcgctttgcaatgtgaacccaggaagcacttattttttggatgccaggacccatgctaagccaggggatgcagtggtgacaggcgaggtcccca

SEQ ID NO: 113052 - DNA, 1546 bp, Homo sapiens
accgggaactcggaggcggggagcggctgggaagtggccgtggtggttggccgcggtggagctagcaggcgggcgggcgggagcgggcgccggagtggagaaaggagccagcggtgggcagcgctgctgggatggcgcgggccgggccggcgtggctgctgctggcaatctgggtggtcctgccatcatggctgtcctctgcaaaggtctcctcgctcattgagagaatctctgaccccaaggacttgaaaaaactgctcagaacccggaataatgtactggtgctttactccaaatctgaggtggcagctgaaaatcatctcaggttactgtccacagtggcccaggcggtgaaaggacaagggaccatctgctgggtggactgtggtgatgcagagagtagaaaattgtgcaagaagatgaaagttgacctgagcccgaaggacaaaaaggttgaattattccattaccaggatggtgcatttcatactgaatataaccgagctgtgacatttaagtccatagtggcctttttgaaggatccaaaagggcccccactgtgggaggaagatcctggagccaaagatgttgtccaccttgacagtgaaaaggacttcagacggctcctgaagaaggaagagaagccgctcctgatcatgttttatgccccctggtgcagcatgtgcaagaggatgatgccgcatttccagaaggctgcgactcagctgcgaggccacgccgtgctggccgggatgaatgtctactcctctgaatttgaaaacatcaaggaggagtacagcgtgcgcggcttccccaccatctgctattttgagaaaggacggttcttgttccagtatgacaaaaggccctggcagaaagattccacatctcagagtttcctacgttgaagtattttaagaatggagagaaatacgcagtgcctgtgctcaggacaaagaagaagtttctcgagtggatgcaaaaccctgaggcccccccgcccccagagcccacgtgggaagagcagcagacaagcgtgttgcacctggtgggggacaacttccgggagaccctgaagaagaagaaacacaccttggtcatgttctacgccccttggtgcccacactgtaagaaggtcattccgcactttactgctactgctgatgccttcaaagatgaccgaaagattgcctgtgccgctgttgactgtgtcaaagacaagaaccaagacctgtgccagcaggaggcggtcaagggctaccccactttccactactaccactatgggaagttcgcagaaaagtatgacagcgaccgcacagaattgggatttaccaattatattcgagccctccgggagggagaccatgaaagactagggaaaaagaaggaagagttataattcctgcctcagaaaaagcttttccattacactgtgaatgatacctgttttgttgtttctgaatttccacatgttctgaagacaaattttttatagccgcttatggccattttgtacaattttgaaataaaattaaaccattta

SEQ ID NO: 113053 - DNA, 929 bp, Homo sapiens
agatcgagaccatcctggctaacacagtgaaaccccatctctattgaaaaagtacaaaaaaaattagccgggcgtggtggcgggtgcctgtagtcccagctacgtgggaggctgaagcaggagaatggcatgaacccaggaggcggagcttgcgggtgtggccactgtaagaaaatgaagccggagtttgagaaggcagcagaagccctccatggagaagcggatctgtcgatgccactgtcaacaaggccctggcagaaagattccacatctcagagtttcctacgttgaagtattttaagaatggagagaaatacgcagtgcctgtgctcaggacaaagaagaagtttctcgagtggatgcaaaaccctgaggcccccccgcccccagagcccacgtgggaagagcagcagacaagcgtgttgcacctggtgggggacaacttccgggagaccctgaagaagaagaaacacaccttggtcatgttctacgccccttggtgcccacactgtaagaaggtcattccgcactttactgctactgctgatgccttcaaagatgaccgaaagattgcctgtgccgctgttgactgtgtcaaagacaagaaccaagacctgtgccagcaggaggcggtcaagggctaccccactttccactactaccactatgggaagttcgcagaaaagtatgacagcgaccgcacagaattgggatttaccaattatattcgagccctccgggagggagaccatgaaagactagggaaaaagaaggaagagttataattcctgcctcagaaaaagcttttccattacactgtgaatgatacctgttttgttgtttctgaatttccacatgttctgaagacaaattttttatagccgcttatggccattttgtacaattttgaaataaaattaaaccattta

SEQ ID NO: 113054 - DNA, 1019 bp, Homo sapiens
accgggaactcggaggcggggagcggctgggaagtggccgtggtggttggccgcggtggagctagcaggcgggcgggcgggagcgggcgccggagtggagaaaggagccagcggtgggcagcgctgctgggatggcgcgggccgggccggcgtggctgctgctggcaatctgggtggtcctgccatcatggctgtcctctgcaaaggtctcctcgctcattgagagaatctctgaccccaaggacttgaaaaaactgctcagaacccggaataatgtactggtgctttactccaaatctgaggtggcagctgaaaatcatctcaggttactgtccacagtggcccaggcggtgaaaggacaagggaccatctgctgggtggactgtggtgatgcagagagtagaaaattgtgcaagaagatgaaagttgacctgagcccgaaggacaaaaaggttgaattattccattaccaggatggtgcatttcatactgaatataaccgagctgtgacatttaagtccatagtggcctttttgaaggatccaaaagggcccccactgtgggaggaagatcctggagccaaagatgttgtccaccttgacagtgaaaaggacttcagacggctcctgaagaaggaagagaagccgctcctgatcatgttttatgccccctggtgcagcatgtgcaagaggatgatgccgcatttccagaaggctgcgactcagctgcgaggccacgccgtgctggccgggatgaatgtctactcctctgaatttgaaaacatcaaggaggagtacagcgtgcgcggcttccccaccatctgctattttgagaaaggacggttcttgttccagtatgacaactatgggtccacagctgaggacattgtggagtggctgaagaatccgcagccgccacagccccaggtccctgagactccctgggcagatgagggcggctccgtttatcacctgaccgatgaagactttgaccttcagcctcgaggatcctctagagca

SEQ ID NO: 113055 - DNA, 542 bp, Homo sapiens
gcggccgcccgccttataaagcagtttgggaggctcgcgccggagatcgcgccaggcgaggaggagagctcgggcgagcggcgagcacaggccacgggagctgagcgcagcagagagcagccggagtccgcgcctgactccgcgcgggtcctgagccggccgcagcttgccaggatccccggcgtccttctcgcgccgcttcacgaagagggcgccttcgccgctcgcccagccggagtgcgcacgggcccgctggaaaccgcactcgccgctccctgggcaggccggggcacccgggcacgcagggcgcgcctggcgagcgccccgggaggtgagcagtggtcgcgggcagcgggcagccgctcagcggggacccgccagggctgggggcgcccgagtccgagggggacgacgcttctcgcacccgccacgacccccttgggcacccactcccgggtaagcaaaccaagcgctcctccatacctttcccccgcagcactccgaagagttcccctttgcggagcgaagcctcgggagcctgg

SEQ ID NO: 113056 - DNA, 2358 bp, Homo sapiens
gcggccgcccgccttataaagcagtttgggaggctcgcgccggagatcgcgccaggcgaggaggagagctcgggcgagcggcgagcacaggccacgggagctgagcgcagcagagagcagccggagtccgcgcctgactccgcgcgggtcctgagccggccgcagcttgccaggatccccggcgtccttctcgcgccgcttcacgaagagggcgccttcgccgctcgcccagccggagtgcgcacgggcccgctggaaaccgcactcgccgctccctgggcaggccggggcacccgggcacgcagggcgcgcctggcgagcgccccgggaggtgagcagtggtcgcgggcagcgggcagccgctcagcggggacccgccagggctgggggcgcccgagtccgagggggacgacgcttctcgcacccgccacgacccccttgggcacccactcccgggcggcgtgcaggaccagcggcggccgtgcaggcggaggacttcggcgcggctcctcctgggtgtgaccccgggcgcgcccgccgcgcgacgatgagggcgcggccgcaggtctgcgaggcgctgctcttcgccctggcgctccagaccggcgtgtgctatggcatcaagtggctggcgctgtccaagacaccatcggccctggcactgaaccagacgcaacactgcaagcagctggagggtctggtgtctgcacaggtgcagctgtgccgcagcaacctggagctcatgcacacggtggtgcacgccgcccgcgaggtcatgaaggcctgtcgccgggcctttgccgacatgcgctggaactgctcctccattgagctcgcccccaactatttgcttgacctggagagagggacccgggagtcggccttcgtgtatgcgctgtcggccgccgccatcagccacgccatcgcccgggcctgcacctccggcgacctgcccggctgctcctgcggccccgtcccaggtgagccacccgggcccgggaaccgctggggaggatgtgcggacaacctcagctacgggctcctcatgggggccaagttttccgatgctcctatgaaggtgaaaaaaacaggatcccaagccaataaactgatgcgtctacacaacagtgaagtggggagacaggctctgcgcgcctctctggaaatgaagtgtaagtgccatggggtgtctggctcctgctccatccgcacctgctggaaggggctgcaggagctgcaggatgtggctgctgacctcaagacccgatacctgtcggccaccaaggtagtgcaccgacccatgggcacccgcaagcacctggtgcccaaggacctggatatccggcctgtgaaggactcggaactcgtctatctgcagagctcacctgacttctgcatgaagaatgagaaggtgggctcccacgggacacaagacaggcagtgcaacaagacttccaacggaagcgacagctgcgaccttatgtgctgcgggcgtggctacaacccctacacagaccgcgtggtcgagcggtgccactgtaagtaccactggtgctgctacgtcacctgccgcaggtgtgagcgtaccgtggagcgctatgtctgcaagtgaggccctgccctccgccccacgcaggagcgaggactctgctcaaggaccctcagcaactggggccaggggcctggagacactccatggagctctgcttgtgaattccagatgccaggcatgggaggcggcttgtgctttgccttcacttggaagccaccaggaacagaaggtctggccaccctggaaggagggcaggacatcaaaggaaaccgacaagattaaaaataacttggcagcctgaggctctggagtgcccacaggctggtgtaaggagcggggcttgggatcggtgagactgatacagacttgacctttcagggccacagagaccagcctccgggaaggggtctgcccgccttcttcagaatgttctgcgggaccccctggcccaccctggggtctgagcctgctgggcccaccacatggaatcactagcttgggttgtaaatgttttcttttgttttttgctttttcttcctttgggatgtggaagctacagaaatatttataaaacatagctttttctttggggtggcacttctcaattcctctttatatattttatatatataaatatatatgtatatatataatgatctctattttaaaactagctttttaagcagctgtatgaaataaatgctgagtgagccccagcccgcccctgcagttcccggcctcgtcaagtgaactcggcagaccctggggctggcagagggagctctccagtttccgggcaaaaaaaa

SEQ ID NO: 113057 - DNA, 2233 bp, Homo sapiens
gcggccgcccgccttataaagcagtttgggaggctcgcgccggagatcgcgccaggcgaggaggagagctcgggcgagcggcgagcacaggccacgggagctgagcgcagcagagagcagccggagtccgcgcctgactccgcgcgggtcctgagccggccgcagcttgccaggatccccggcgtccttctcgcgccgcttcacgaagagggcgccttcgccgctcgcccagccggagtgcgcacgggcccgctggaaaccgcactcgccgctccctgggcaggccggggcacccgggcacgcagggcgcgcctggcgagcgccccgggaggcggcgtgcaggaccagcggcggccgtgcaggcggaggacttcggcgcggctcctcctgggtgtgaccccgggcgcgcccgccgcgcgacgatgagggcgcggccgcaggtctgcgaggcgctgctcttcgccctggcgctccagaccggcgtgtgctatggcatcaagtggctggcgctgtccaagacaccatcggccctggcactgaaccagacgcaacactgcaagcagctggagggtctggtgtctgcacaggtgcagctgtgccgcagcaacctggagctcatgcacacggtggtgcacgccgcccgcgaggtcatgaaggcctgtcgccgggcctttgccgacatgcgctggaactgctcctccattgagctcgcccccaactatttgcttgacctggagagagggacccgggagtcggccttcgtgtatgcgctgtcggccgccgccatcagccacgccatcgcccgggcctgcacctccggcgacctgcccggctgctcctgcggccccgtcccaggtgagccacccgggcccgggaaccgctggggaggatgtgcggacaacctcagctacgggctcctcatgggggccaagttttccgatgctcctatgaaggtgaaaaaaacaggatcccaagccaataaactgatgcgtctacacaacagtgaagtggggagacaggctctgcgcgcctctctggaaatgaagtgtaagtgccatggggtgtctggctcctgctccatccgcacctgctggaaggggctgcaggagctgcaggatgtggctgctgacctcaagacccgatacctgtcggccaccaaggtagtgcaccgacccatgggcacccgcaagcacctggtgcccaaggacctggatatccggcctgtgaaggactcggaactcgtctatctgcagagctcacctgacttctgcatgaagaatgagaaggtgggctcccacgggacacaagacaggcagtgcaacaagacttccaacggaagcgacagctgcgaccttatgtgctgcgggcgtggctacaacccctacacagaccgcgtggtcgagcggtgccactgtaagtaccactggtgctgctacgtcacctgccgcaggtgtgagcgtaccgtggagcgctatgtctgcaagtgaggccctgccctccgccccacgcaggagcgaggactctgctcaaggaccctcagcaactggggccaggggcctggagacactccatggagctctgcttgtgaattccagatgccaggcatgggaggcggcttgtgctttgccttcacttggaagccaccaggaacagaaggtctggccaccctggaaggagggcaggacatcaaaggaaaccgacaagattaaaaataacttggcagcctgaggctctggagtgcccacaggctggtgtaaggagcggggcttgggatcggtgagactgatacagacttgacctttcagggccacagagaccagcctccgggaaggggtctgcccgccttcttcagaatgttctgcgggaccccctggcccaccctggggtctgagcctgctgggcccaccacatggaatcactagcttgggttgtaaatgttttcttttgttttttgctttttcttcctttgggatgtggaagctacagaaatatttataaaacatagctttttctttggggtggcacttctcaattcctctttatatattttatatatataaatatatatgtatatatataatgatctctattttaaaactagctttttaagcagctgtatgaaataaatgctgagtgagccccagcccgcccctgcagttcccggcctcgtcaagtgaactcggcagaccctggggctggcagagggagctctccagtttccgggcaaaaaaaa

SEQ ID NO: 113058 - DNA, 2005 bp, Homo sapiens
gcggccgcccgccttataaagcagtttgggaggctcgcgccggagatcgcgccaggcgaggaggagagctcgggcgagcggcgagcacaggccacgggagctgagcgcagcagagagcagccggagtccgcgcctgactccgcgcgggtcctgagccggccgcagcttgccaggatccccggcgtccttctcgcgccgcttcacgaagagggcgccttcgccgctcgcccagccggagtgcgcacgggcccgctggaaaccgcactcgccgctccctgggcaggccggggcacccgggcacgcagggcgcgcctggcgagcgccccgggaggtgagcagtggtcgcgggcagcgggcagccgctcagcggggacccgccagggctgggggcgcccgagtccgagggggacgacgcttctcgcacccgccacgacccccttgggcacccactcccgggcggcgtgcaggaccagcggcggccgtgcaggcggaggacttcggcgcggctcctcctgggtgtgaccccgggcgcgcccgccgcgcgacgatgagggcgcggccgcaggtctgcgaggcgctgctcttcgccctggcgctccagaccggcgtgtgctatggcatcaagtggctggcgctgtccaagacaccatcggccctggcactgaaccagacgcaacactgcaagcagctggagggtctggtgtctgcacaggtgcagctgtgccgcagcaacctggagctcatgcacacggtggtgcacgccgcccgcgaggtcatgaaggcctgtcgccgggcctttgccgacatgcgctggaactgctcctccattgagctcgcccccaactatttgcttgacctggagagagggacccgggagtcggccttcgtgtatgcgtgctgacctcaagacccgatacctgtcggccaccaaggtagtgcaccgacccatgggcacccgcaagcacctggtgcccaaggacctggatatccggcctgtgaaggactcggaactcgtctatctgcagagctcacctgacttctgcatgaagaatgagaaggtgggctcccacgggacacaagacaggcagtgcaacaagacttccaacggaagcgacagctgcgaccttatgtgctgcgggcgtggctacaacccctacacagaccgcgtggtcgagcggtgccactgtaagtaccactggtgctgctacgtcacctgccgcaggtgtgagcgtaccgtggagcgctatgtctgcaagtgaggccctgccctccgccccacgcaggagcgaggactctgctcaaggaccctcagcaactggggccaggggcctggagacactccatggagctctgcttgtgaattccagatgccaggcatgggaggcggcttgtgctttgccttcacttggaagccaccaggaacagaaggtctggccaccctggaaggagggcaggacatcaaaggaaaccgacaagattaaaaataacttggcagcctgaggctctggagtgcccacaggctggtgtaaggagcggggcttgggatcggtgagactgatacagacttgacctttcagggccacagagaccagcctccgggaaggggtctgcccgccttcttcagaatgttctgcgggaccccctggcccaccctggggtctgagcctgctgggcccaccacatggaatcactagcttgggttgtaaatgttttcttttgttttttgctttttcttcctttgggatgtggaagctacagaaatatttataaaacatagctttttctttggggtggcacttctcaattcctctttatatattttatatatataaatatatatgtatatatataatgatctctattttaaaactagctttttaagcagctgtatgaaataaatgctgagtgagccccagcccgcccctgcagttcccggcctcgtcaagtgaactcggcagaccctggggctggcagagggagctctccagtttccgggcaaaaaaaa

SEQ ID NO: 113059 - DNA, 2205 bp, Homo sapiens
cgctgtgtctgcccggtctctcctgggtctccggttctgccgcctcctgtccctccttccggctgccccggccagaggggctcgaaggcgcgttggggcccggggccacgctgggagacacgccttcggccgcgcctaattcgagccaggcgcgggacgcgtcccccggccgggcggagcgggaggggacgcccgccgcgctcggcctccccgggccccgacccctcctttgtaatttgaataaaacgcctcccccgcccgcgcgccgccttaacccgccgcctccgctctccccggctgcaggcggcgtgcaggaccagcggcggccgtgcaggcggaggacttcggcgcggctcctcctgggtgtgaccccgggcgcgcccgccgcgcgacgatgagggcgcggccgcaggtctgcgaggcgctgctcttcgccctggcgctccagaccggcgtgtgctatggcatcaagtggctggcgctgtccaagacaccatcggccctggcactgaaccagacgcaacactgcaagcagctggagggtctggtgtctgcacaggtgcagctgtgccgcagcaacctggagctcatgcacacggtggtgcacgccgcccgcgaggtcatgaaggcctgtcgccgggcctttgccgacatgcgctggaactgctcctccattgagctcgcccccaactatttgcttgacctggagagagggacccgggagtcggccttcgtgtatgcgctgtcggccgccgccatcagccacgccatcgcccgggcctgcacctccggcgacctgcccggctgctcctgcggccccgtcccaggtgagccacccgggcccgggaaccgctggggaggatgtgcggacaacctcagctacgggctcctcatgggggccaagttttccgatgctcctatgaaggtgaaaaaaacaggatcccaagccaataaactgatgcgtctacacaacagtgaagtggggagacaggctctgcgcgcctctctggaaatgaagtgtaagtgccatggggtgtctggctcctgctccatccgcacctgctggaaggggctgcaggagctgcaggatgtggctgctgacctcaagacccgatacctgtcggccaccaaggtagtgcaccgacccatgggcacccgcaagcacctggtgcccaaggacctggatatccggcctgtgaaggactcggaactcgtctatctgcagagctcacctgacttctgcatgaagaatgagaaggtgggctcccacgggacacaagacaggcagtgcaacaagacttccaacggaagcgacagctgcgaccttatgtgctgcgggcgtggctacaacccctacacagaccgcgtggtcgagcggtgccactgtaagtaccactggtgctgctacgtcacctgccgcaggtgtgagcgtaccgtggagcgctatgtctgcaagtgaggccctgccctccgccccacgcaggagcgaggactctgctcaaggaccctcagcaactggggccaggggcctggagacactccatggagctctgcttgtgaattccagatgccaggcatgggaggcggcttgtgctttgccttcacttggaagccaccaggaacagaaggtctggccaccctggaaggagggcaggacatcaaaggaaaccgacaagattaaaaataacttggcagcctgaggctctggagtgcccacaggctggtgtaaggagcggggcttgggatcggtgagactgatacagacttgacctttcagggccacagagaccagcctccgggaaggggtctgcccgccttcttcagaatgttctgcgggaccccctggcccaccctggggtctgagcctgctgggcccaccacatggaatcactagcttgggttgtaaatgttttcttttgttttttgctttttcttcctttgggatgtggaagctacagaaatatttataaaacatagctttttctttggggtggcacttctcaattcctctttatatattttatatatataaatatatatgtatatatataatgatctctattttaaaactagctttttaagcagctgtatgaaataaatgctgagtgagccccagcccgcccctgcagttcccggcctcgtcaagtgaactcggcagaccctggggctggcagagggagctctccagtttccgggcaaaaaaaa

SEQ ID NO: 113060 - DNA, 2314 bp, Homo sapiens
gcggccgcccgccttataaagcagtttgggaggctcgcgccggagatcgcgccaggcgaggaggagagctcgggcgagcggcgagcacaggccacgggagctgagcgcagcagagagcagccggagtccgcgcctgactccgcgcgggtcctgagccggccgcagcttgccaggatccccggcgtccttctcgcgccgcttcacgaagagggcgccttcgccgctcgcccagccggagtgcgcacgggcccgctggaaaccgcactcgccgctccctgggcaggccggggcacccgggcacgcagggcgcgcctggcgagcgccccgggagggataagccccagctccgggtcctcgactctgctgcctcgcctggactcctgattcctcattcctctcctttccgtcccaggcggcgtgcaggaccagcggcggccgtgcaggcggaggacttcggcgcggctcctcctgggtgtgaccccgggcgcgcccgccgcgcgacgatgagggcgcggccgcaggtctgcgaggcgctgctcttcgccctggcgctccagaccggcgtgtgctatggcatcaagtggctggcgctgtccaagacaccatcggccctggcactgaaccagacgcaacactgcaagcagctggagggtctggtgtctgcacaggtgcagctgtgccgcagcaacctggagctcatgcacacggtggtgcacgccgcccgcgaggtcatgaaggcctgtcgccgggcctttgccgacatgcgctggaactgctcctccattgagctcgcccccaactatttgcttgacctggagagagggacccgggagtcggccttcgtgtatgcgctgtcggccgccgccatcagccacgccatcgcccgggcctgcacctccggcgacctgcccggctgctcctgcggccccgtcccaggtgagccacccgggcccgggaaccgctggggaggatgtgcggacaacctcagctacgggctcctcatgggggccaagttttccgatgctcctatgaaggtgaaaaaaacaggatcccaagccaataaactgatgcgtctacacaacagtgaagtggggagacaggctctgcgcgcctctctggaaatgaagtgtaagtgccatggggtgtctggctcctgctccatccgcacctgctggaaggggctgcaggagctgcaggatgtggctgctgacctcaagacccgatacctgtcggccaccaaggtagtgcaccgacccatgggcacccgcaagcacctggtgcccaaggacctggatatccggcctgtgaaggactcggaactcgtctatctgcagagctcacctgacttctgcatgaagaatgagaaggtgggctcccacgggacacaagacaggcagtgcaacaagacttccaacggaagcgacagctgcgaccttatgtgctgcgggcgtggctacaacccctacacagaccgcgtggtcgagcggtgccactgtaagtaccactggtgctgctacgtcacctgccgcaggtgtgagcgtaccgtggagcgctatgtctgcaagtgaggccctgccctccgccccacgcaggagcgaggactctgctcaaggaccctcagcaactggggccaggggcctggagacactccatggagctctgcttgtgaattccagatgccaggcatgggaggcggcttgtgctttgccttcacttggaagccaccaggaacagaaggtctggccaccctggaaggagggcaggacatcaaaggaaaccgacaagattaaaaataacttggcagcctgaggctctggagtgcccacaggctggtgtaaggagcggggcttgggatcggtgagactgatacagacttgacctttcagggccacagagaccagcctccgggaaggggtctgcccgccttcttcagaatgttctgcgggaccccctggcccaccctggggtctgagcctgctgggcccaccacatggaatcactagcttgggttgtaaatgttttcttttgttttttgctttttcttcctttgggatgtggaagctacagaaatatttataaaacatagctttttctttggggtggcacttctcaattcctctttatatattttatatatataaatatatatgtatatatataatgatctctattttaaaactagctttttaagcagctgtatgaaataaatgctgagtgagccccagcccgcccctgcagttcccggcctcgtcaagtgaactcggcagaccctggggctggcagagggagctctccagtttccgggcaaaaaaaa

SEQ ID NO: 113061 - DNA, 2437 bp, Homo sapiens
gcggccgcccgccttataaagcagtttgggaggctcgcgccggagatcgcgccaggcgaggaggagagctcgggcgagcggcgagcacaggccacgggagctgagcgcagcagagagcagccggagtccgcgcctgactccgcgcgggtcctgagccggccgcagcttgccaggatccccggcgtccttctcgcgccgcttcacgaagagggcgccttcgccgctcgcccagccggagtgcgcacgggcccgctggaaaccgcactcgccgctccctgggcaggccggggcacccgggcacgcagggcgcgcctggcgagcgccccgggaggtgagcagtggtcgcgggcagcgggcagccgctcagcggggacccgccagggctgggggcgcccgagtccgagggggacgacgcttctcgcacccgccacgacccccttgggcacccactcccgggcggcgtgcaggaccagcggcggccgtgcaggcggaggacttcggcgcggctcctcctgggtgtgaccccgggcgcgcccgccgcgcgacgatgagggcgcggccgcaggtctgcgaggcgctgctcttcgccctggcgctccagaccggcgtgtgctatggcatcaagtggctggcgctgtccaagacaccatcggccctggcactgaaccagacgcaacactgcaagcagctggagggtctggtgtctgcacaggtgcagctgtgccgcagcaacctggagctcatgcacacggtggtgcacgccgcccgcgaggtcatgaaggcctgtcgccgggcctttgccgacatgcgctggaactgctcctccattgagctcgcccccaactatttgcttgacctggagagagggacccgggagtcggccttcgtgtatgcgctgtcggccgccgccatcagccacgccatcgcccgggcctgcacctccggcgacctgcccggctgctcctgcggccccgtcccaggtgagccacccgggcccgggaaccgctggggaggatgtgcggacaacctcagctacgggctcctcatgggggccaagttttccgatgctcctatgaaggtgaaaaaaacaggatcccaagccaataaactgatgcgtctacacaacagtgaagtggggagacaggctctgcgcgcctctctggaaatgaagtgtaagtgccatggggtgtctggctcctgctccatccgcacctgctggaaggggctgcaggagctgcaggatgtggctgctgacctcaagacccgatacctgtcggccaccaaggtagtgcaccgacccatgggcacccgcaagcacctggtgcccaaggacctggatatccggcctgtgaaggactcggaactcgtctatctgcagagctcacctgacttctgcatgaagaatgagaaggtgggctcccacgggacacaagacaggcagtgcaacaagacttccaacggaagcgacagctgcgaccttatgtgctgcgggcgtggctacaacccctacacagaccgcgtggtcgagcggtgccactgtaagtaccactggtgctgctacgtcacctgccgcaggtgtgagcgtaccgtggagcgctatgtctgcaagtgaggccctgccctccgccccacgcaggagcgaggactctgctcaaggaccctcagcaactggggccaggggcctggagacactccatggagctctgcttgtgaattccagatgccaggcatgggaggcggcttgtgctttgccttcacttggaagccaccaggaacagaaggtctggccaccctggaaggagggcaggacatcaaaggaaaccgacaagattaaaaataacttggcagcctgaggctctggagtgcccacaggctggtgtaaggagcggggcttgggatcggtgagactgatacagacttgacctttcagggccacagagaccagcctccgggaaggggtctgcccgccttcttcagaatgttctgcgggaccccctggcccaccctggggtctgagcctgctgggcccaccacatggaatcactagcttgggttgtaaatgttttcttttgttttttgctttttcttcctttgggatgtggaagctacagaaatatttataaaacatagctttttctttggggtggcacttctcaattcctctttatatattttatatatataaatatatatgtatatatataatgatctctattttaaaactagctttttaagcagctgtatgaaataaatgctgagtgagccccagcccgcccctgcaaaaaaaaaaaaaaaatataaatctcttggggggggcccgggcccaatttcccttataggagccgttacaaatcacttggccgcgttttacaacgtcggactggaaaaacctggcgttcccaaattaatcgctttggagaaaacccctttttccaat

SEQ ID NO: 113062 - DNA, 676 bp, Homo sapiens
tccgggttcaagcgattctgcctcatcctcccgagtagctaggattataggggcacgccaccactcctggctagtttttgtatttttagtagagacgaggtttcactggtcttgaactgatcacccgaggtcaggcctcccaaaatgctggaattacaggaatgagcaaccacacccagccctgttttcaaaatcttaagtgaaactcaaagctgatgtagacccactctttctttcgagtgagcccccagtgagactttctctggcaaacagtagactgtgtgctggcagtgggcacaggctgatttcccagctcactcctggaagccacctcactcctccctctttccaccgctggaaaccacctcactcctcctttccacggctggtccctctccatgttcctgtacccagtccatcacctctctattaacttttgaacctctcgtctctgtttctaacatcatctactcctagctcaatctactcctatctctctgagaccctacagccgcctcccacagatctgcatccattcacccaacctcccctcctcctggctgtcagaatgaccttttttgttctttttaagggttttacttaattagcttgatttaatcattccacattgtgtgaaaacatcatatcatactccataaatatatacgattataat

SEQ ID NO: 113063 - DNA, 242 bp, Homo sapiens
ttttcattaaaaaattagaagattaaaatggagcagagaaattaaaatctgaaaacaacttctctagtagaatcctaacaaacagtctggagacaaagtaaagaatctcaaagacagctcaaaagataaaagatgttacactgatactgtggaatttaagaaagatttctggatagaaggtaagaaaaagggtagtggtactcagtttccaattcatttctcttctactcatatcttcccca

SEQ ID NO: 113064 - DNA, 410 bp, Homo sapiens
tcggtctacatgtctgcttgaggacgccagtccggcggctgcggtcttccagcctcggtgacagagcgagactccatctcaaaaaaaacagaaaaaccaaaaaaaacatactgttgaatgaaaagcaagttacagattatgtactgcttatgtaacgtttttatttatttgttttgtttttctccttggtgggcattggaaaatggaacattcttaaatggacacattcatactaatagcatcttcatgttctgtctttttaaatgcacacacacagacacacacatatgcggaagaaagggacacactggaaggatacactctaaattcctgaaagtggttacctctgaagagactgggagagtaattgatttggactggggttgaggggagtgcaagggggcttcaat

SEQ ID NO: 113065 - DNA, 725 bp, Homo sapiens
tgggaggccacataaaacccagtcctactccgaacttcagtttccgtattttaataacctggtcatcctttctgggaaatacctagcacaaagactggctcatgaggaagtgctcagtaaatcttaagaacatgaatagcccagtctgcaatcttcactggggtccttcacaccctagtcccagtcagctgagactgcccccgcccaagcaccaccatacaaccaggtctcccaagtccaccaagctctatcatgccccaggaatttgcacacactgtttactcttcctagaatgtctgtcctccctatctctacccagtcagtgcctacttctcctattataatccagctcaggcattccagcccatggaaagcagagggttcccacagaacccacccactccaccatctatatttatcatattgtagattgttgcaccttgctatgggtctgtgtcctggagcagactgtgagctcttccaggtcgcaaaccttgcagccccaccacctgcaagaggcctggcctcaggaaggtttattgaatgaagaaaaggactgagtgacccaaaaactcagaaaccaaaagggatcattccaaactgtcaaaaggaaaaagcaaccccgccacctgctggactgactgcttggtcttcattgagtgttcttgatgggaatgtgaacttcaaagtcaaagagtgctcggggcctataatcccagcacttt

SEQ ID NO: 113066 - DNA, 258 bp, Homo sapiens
aacggggttgattacctgctaaaacaaaacaaaactcaacatgctttatgattttaacaggacccagagtctcatagtatactatatgaaatgtccaggaaacaatttaaaactacccaaagtgataaggaccaggaaaacatgaccagttctcaagggaaaagataagacaatgttggaactggaaaaaaaaaactccgaagcatctattataatcatcctgcgtgacataaaggtgaatgctcttacaatgaatgg

SEQ ID NO: 113067 - DNA, 156 bp, Homo sapiens
tgcttctcagctggccagtggtcacacctgattggaaggtgaaaagactttgcgttctacttccaaaagttttcacatttgtcacactgtcctaaccctatcagctttgttgctatcattgtagtgaggcctgcctagggatgataagtgaaggat

SEQ ID NO: 113068 - DNA, 268 bp, Homo sapiens
tgtcaggcagcatcaagctctctaattcacctaattggtgtccaaatttaacagcattattcacaacataacttgaacaaggagattaaaactgaatttttgataggaaatttgtataacaagtgctgtgcccctcaaggagcatgttcttcctctcagttcttattgctcattagaaagagacaaggctgggccaggtgtggtggttcatgcctgtaatcccagcacttggggaggtggaagcaggaggatcgcttgagcccaggag

SEQ ID NO: 113069 - DNA, 772 bp, Homo sapiens
caggaatcctttttcctagtcagctttcttttagttctccacagtgacttcctcaaaaccttctccttacactagttcattttaaagaaaaggatacctatgttcattttaatatcataatggatagaaaatcttatttacttccaggagatagattatcatatgagaactcccttgaaattccaatactcaactacatgtttaactctatccatatttgtccttttatcctgtcctcctgtcctgtctgaagctaatgcctatacttgggctcttagtctcacccctgccaccttctcagggactaatggttagcagcgatcctctaactcagtcctttatttccgattccacttgctctttcccagtcacattaaaatgtgctcaaatctccttatctttgaaagaaatactctggacccctttagctgccaccttaccgcactgtgtccattcacagccaagcctcttgaaagcattaactgccctcagtgtctacttccctactcattttccagccctctgcccccaccacagctgctttcaccaaattaccaacaacctcctggttgctgaaaatcagaggatgttcttagttcttcacttgaccaccccctttttgaaaaaaagaatttgcttgacgtctgtagtttcgcattcctggtttttcccttgcctctctggctcctccttgtcagtccctgttcaaagaggcagtgctgtctggattagtggtcagccatggtacttaagaacctgggcttgggagaca

SEQ ID NO: 113070 - DNA, 635 bp, Homo sapiens
gggtcccatcatttacatgacttgaatggagcaatttctgtattcagtgtccctcttgttaaacttcagattatgaggtgatggaatttggcccccttggatcaggattaatcatttatatccatgacggcaagtggcaatgcccagatctggctaccggggaaatcactgtgagcagggctccaatttctgcctgctgctggggcagtgtggtatgggagaaagagaacaaagatgctgggtgtgagctggatttcactgcttagtaggcatcttaatagtcagattttagtgccttttaaagtaaattgcgataaaatatacataaaatttatcattttgaccgtttaaaaagatataattcagtgatattaaggacattcacaatgttgagcaaccatcactgctctgcatttccagaacttttttttactatcccagacagaaactctgtatcctttagaaaataaattcccattctctccttaccccagcccctggtaacctctagtctactttctgtctctatgaatttgcctattctaggtaccatgtataagtgaaaacatgcaatattcatctgtccttttgtgtgtctggcttgttttacttaatgttttcaaggttcatccatg

SEQ ID NO: 113071 - DNA, 345 bp, Homo sapiens
tgacatatttaaagtgctgaaagaaaaaaacttttatcctagaatagtatatccagcaaatatatccttcaagatgaacttttcactagactaagaaaaaaaacagggaagattcaaataaaattgcaaataaaaaaggagacattacaatggatacaacagaaatacaaaggattataagagactattatgaaaaagtataaaccaacaagctgaacaatctaaaatcaataaacaaatctcttgattcatacagcctagcaagactgtattataaaaaaatagaaaattttggccaggcacgacggctcatgcccgtaatctcagcactttgggaggccgaga

SEQ ID NO: 113072 - DNA, 1146 bp, Homo sapiens
ggcatcccatttagagaattcgggaaggttccctgcaagcttctgtgggaccactagcaccagtgggcacatcgagagcaaacacatcggagacaaatttttctttctttgtgaactctgccttaactcaaagattcctgtcatgacttaaagagaaactttcacaatgtctggagcccttgatgtcctgcaaatgaaggaggaggatgtccttaagctccttgcagtgggaatccaattaggtggcaccaaattgacttccaaatggaacagtacatctataaaaggaaagtgatggcatctacagcataaatctgaagaggacctgggagaagcttctgctggcaggtcatgccattgttgtcattgaaaactctgctgatgtcagtgtcatatcctccaggaatactggccagaaggctatgctgaagtttgctgctgccactggagccactccaattgctggccacttcactcctggaaccttcctaaccagatccaggcagcctactgggagccacggcttcttgtggtttctgaccccagggctgaccaccagtctctcacagaggcatcttgtgttaacccacctgccattgctttatgcaacacagattctcctctgtgccattggacattgccatcacatgcaacaacaagggagctccctcagtgggtcagatgtggtagatgctggcctgggaagttctgcacatgcgtggcaccatttcctgcaacacccatgggaggtaatgtctaatctctacttctacagagatcctgaagagactgaaaaagaagagcaggctgctgctgaaaaggctgtgaccaagaaggaatttcagggtaaatggactgtttcagctcctgagttcactgttactcagcctgaagttgcagactggtctgaaggcatgcaggtgccctctgtgcctattcagcagtttctactgaagactggaaggctcagcctgccatggaagactggtccacagctccactgctcaggccactgaatgggtaggagcaaccactgaatggtcttaagctgttcttgcacggactcttaagcaacatgaaaataaggttgacagaaaataaacatcagtttctaaaaaataaaaaataaaattctgtgatgcaaag

SEQ ID NO: 113073 - DNA, 1035 bp, Homo sapiens
tctctaataaccaccgctacagattcctgtcatgacttaaagagaaactttcacaatgtctggagcccttgatgtcctgcaaatgaaggaggaggatgtccttaagctccttgcagtgggaatccaattaggtggcaccaaattgacttccaaatggaacagtacatctataaaaggaaagtgatggcatctacagcataaatctgaagaggacctgggagaagcttctgctggcaggtcatgccattgttgtcattgaaaactctgctgatgtcagtgtcatatcctccaggaatactggccagaaggctatgctgaagtttgctgctgccactggagccactccaattgctggccacttcactcctggaaccttcctaaccagatccaggcagcctactgggagccacggcttcttgtggtttctgaccccagggctgaccaccagtctctcacagaggcatcttgtgttaacccacctgccattgctttatgcaacacagattctcctctgtgccattggacattgccatcacatgcaacaacaagggagctccctcagtgggtcagatgtggtagatgctggcctgggaagttctgcacatgcgtggcaccatttcctgcaacacccatgggaggtaatgtctaatctctacttctacagagatcctgaagagactgaaaaagaagagcaggctgctgctgaaaaggctgtgaccaagaaggaatttcagggtaaatggactgtttcagctcctgagttcactgttactcagcctgaagttgcagactggtctgaaggcatgcaggtgccctctgtgcctattcagcagtttctactgaagactggaaggctcagcctgccatggaagactggtccacagctccactgctcaggccactgaatgggtaggagcaaccactgaatggtcttaagctgttcttgcacggactcttaagcaacatgaaaataaggttgacagaaaataaacatcagtttctaaaaaataaaaaataaaattctgtgatgcaaag

SEQ ID NO: 113074 - DNA, 823 bp, Homo sapiens
cacaaacacacaaaattaagattaaaaaatattggaaacgacatatccccaaatgatagccaagcacttcgtttgcagatgcggtctttggcgcttcctacagatgtgccagcttgattcctaccaagccctaccaagcaggagttaatactctccccatttcacaaagggggaaattgaggcacagagggcagcacgtgggatgcaggaacccagaacccctagtcctttcttgggctcgacgggatggaccagcccctggagggggtccaacccctcccaacggcctgggaagccacggccaggctgggcggaaccgtgggtgtccctggcgccccaaggtgccaattaaatattcgtggccgtctggggccagagctgtggaccgcggcatggccgagccggggccggagcccgggcgtgcctggcgggtgctcgccctgtgcggggtggccgtgttcctggctgcggcagcagccggcggggccctggtagcctggaatctggccgcctcggctgctcggggacctcgctgcccggagccaggggccaatgccacggcgccgcccggggacccgccgcctggggtcgacgacctgcggcgccggctggcagaggctgccgagcgggaggaggccctagccaggcagctggaccaggcggaaagtatccggcacgagttggagaaggcattaaaggcctgtgaaggccgccaggtaggtgggccgggtagagggggagctcgggaatccagaatgttgagataagagacggcctgcccacacaactccagggttccctccctgtgcctcggtttccccag

SEQ ID NO: 113075 - DNA, 225 bp, Homo sapiens
ctgcacgccccctctcctgtgtccctccctgcactaacacacatctaatttattttacttattacaccttttatttattggggtgtccttgcactagaatgagaattctatgaaggcagagagctttgtctagtttgttcattgtgcattccaatgaaattgttgagtgaatgaatccatgaggacacatttgagcagggatctgaaagttgaaatgttacctgg

SEQ ID NO: 113076 - DNA, 311 bp, Homo sapiens
tgcaaaggaaatggtcacactcttggttgaccttagcttagtgggtaagcccaatgagcaaagagaacaaaaacctgaggagtgttggaaaaggggaaactcatcttccaaagtattttgcttctatgagaaagggaatccattacataacattcttggtttctctctgctccctctttcacttctaccagacagaaggagtgaattttctgactagaaatttaaaggacaggaactagcatctgtgctttggtcccttcctcctttttttctttgggatttgcctgtctgcagagagaacacagcctgtt

SEQ ID NO: 113077 - DNA, 341 bp, Homo sapiens
tttaagtaaattgacaatttataattgtatatatttatagtgtacaacgtgatgttataatttatgcatacaatgtggaataattaaatgaagctaattagcatatccatcatctcaatagttaacatttttttgtggtgagaatatttgaaatttactctcagcaatttgaaatgctctattattaagtatattgaccatttcttaacttggggtctaattaatttgtgagccacctaaaatcctactaagtttcctttgcttaagttagttggtgttattttctcttctatggaattaagacttaaagctgaaatattacataactatacatttaagtt

SEQ ID NO: 113078 - DNA, 403 bp, Homo sapiens
caaatccacttgacagaaataccaaggaaaagtagctgagtctggtggaaaaaccagaatcttaggaattgagcaggagtctggggaaaagcgtgaacaggcacgcaggcctcagagatagcttcacccattagcccagggtttctggcaggtctctgctgttagactttggttgtccccttgctcagagatactaaacagctgagctgctagtagactatattttcaagttttgagaacactgccgcctctcttgtaagcaccatccagctggaatgttgagacttgggccagttttcagaggtgccaatggcagaatcaaagccacacaccaggaatttttgttttgttttctacttgatctctgtccctagcagattattggtggtgactgtttatgcaa

SEQ ID NO: 113079 - DNA, 342 bp, Homo sapiens
acggtgggagagggatgcctgtatgctgatatggttgacgcctgtatggttgaattgggtctaccattcctcatctaattagctatggtctattaaggtgcatagctacacacaaatattggtactacgttcaattcagaggaagaagatattgcattcttgagagtagacaagaacaccctgaatttggggtcactgtatcataagtcatattatcaggtctctctaggaaggcttagaggaagatttccaggatacacttgtgacaacattgaaggcttccttcttccccaaagggacccgatctcccctcagtcaagaagctccaagtctctgaactgg

SEQ ID NO: 113080 - DNA, 238 bp, Homo sapiens
taggagttcaggaccagtctgggcaacatagtgagaccccacctctacaaaaaaagaaaaatcagccaggtgtggtggcacatgcctgcgaccccagcatcttgggacgctgaggcagggggttgcttgagcccaggagtttgaggctatgattgttctactgcactccagcctgggagacagtaagttcttttctcaaaaaaaaaaaaaaaaaaaagccaggcgcagtggctcatgc

SEQ ID NO: 113081 - DNA, 2874 bp, Homo sapiens
cggaaatggagggggtcgctttcctcaccttcctcgctgcgcgggcggcggttggtaaccggtcagaccagcccgagagggacctggtgcctgtacccaggcttctgtcgctctgtcgcctgcgctatgccctgctgtagtcacaggagctgtagagaggaccccggtacatctgaaagccgggaaatggacccagtggcctttgaggatgtggctgtgaacttcacccaggaagagtggacattgctggatatttcccagaagaatctcttcagggaagtgatgctggaaactttcaggaacctgacctctataggaaaaaaatggagtgaccagaacattgaatatgagtaccaaaaccccagaagaagcttcaggagtctcatagaagagaaagtcaatgaaattaaagaagacagtcattgtggagaaacttttacccaggttccagatgacagactgaacttccaggagaagaaagcttctcctgaagtaaaatcatgtgacagctttgtgtgtgcagaagttggcataggtaactcatcttttaatatgagcatcagaggtgacactggacacaaggcatatgagtatcaggaatatggaccaaagccatataagtgtcaacaacctaaaaataagaaagccttcaggtatcgcccatccattagaacacaagaaagggatcacactggagagaaaccctatgcttgtaaagtctgtggaaaaacctttattttccattcaagcattcgaagacacatggtaatgcacagtggggatggaacttataaatgtaaattttgtgggaaagccttccattctttcagtttatatcttatccatgaaagaactcacactggagagaaaccatatgaatgtaaacaatgtggtaaatcctttacttattctgctacccttcaaatacatgaaagaactcacactggggagaagccctatgaatgtagcaaatgtgataaagcatttcatagttctagttcctatcatagacatgaaagaagtcacatgggagagaagccttatcaatgcaaagaatgtggaaaagcatttgcatataccagttctcttcgtagacatgaaaggacccactctgggaaaaaaccgtatgaatgtaagcaatatggggaaggcttatcctatcttataagttttcaaacacacataagaatgaactctggagaaagaccttataaatgtaagatatgtgggaaaggcttttattctgccaagtcatttcaaacacatgaaaaaactcacactggagagaaacgctataaatgcaagcaatgtggtaaagccttcaatctttccagttcctttcgatatcatgaaaggattcacactggagagaaaccctatgagtgtaagcagtgtgggaaagccttcagatctgcctcacagcttcgagtgcacggtgggactcacactggagagaaaccctatgaatgtaaggaatgtgggaaagccttcagatctacctcacaccttcgagtgcatggtaggactcatactggagagaaaccctatgaatgtaaggaatgtgggaaagccttcagatatgtgaagcaccttcaaattcatgaaaggacagaaaaacacataagaatgccctctggagaaagaccttataaatgtagtatatgtgagaaaggcttttattctgccaagtcatttcaaacacatgaaaaaactcacactggagagaaaccctatgaatgcaaccaatgtggtaaagccttcagatgttgcaattcccttcgatatcatgaaaggactcacactggagagaaaccctatgagtgtaagcaatgtgggaaagccttcagatctgcctcacaccttcgaatgcatgaaaggactcacactggagagaaaccctatgagtgtaagcaatgtgggaaagccttcagttgtgcctcaaaccttcgaaagcatggtaggactcacactggagagaaaccctatgagtgtaagcaatgtgggaaagccttcagatctgcctcaaaccttcagatgcatgaaaggactcacactggagagaaaccctatgaatgtaaggaatgcgaaaaagcattctgtaaattctcttcttttcaaatacatgaaaggaagcacagaggagagaagccctatgaatgtaagcattgtgggaatggattcacatctgccaagattcttcaaatacatgcaagaacacacattggagagaaacactatgaatgtaaggaatgcggaaaagcattcaattatttttcttccttgcatatacacgcaaggactcatatgggagagaagccatatgaatgtaaggattgtgggaaagcattcagctagcctggttccttttatggacatgaatagactcacactggaaggaagcactatgaatgcaagcaatgtggcaaaactttcacattttccagttcttttcgatatcatgaaaggactcacactggggagaaaccctatcaatgtaagcagtgtgggaaagccttcattccttttacttcttttcaatgtcatgaaaggactcacacgggagagaaaccctatgagtgtattctagttccgtttgatatcatgaaaggacttacactggagtgaaaccctatgaatgtaagcaatgtgggaaagccttcagatgtgcctcgcaccttcaacggcatggaagggttcacacttgggagaaactctatgaatgtaagcagtatgggaaagccttcagatctgccaagattctttgaatacagataattaatgtaaacaattatcataagtatactaacatgttattctttttaaataagaaggtataataaaatatcccattggttttatgtattagatcaaaaa

SEQ ID NO: 113082 - DNA, 919 bp, Homo sapiens
cggaaatggagggggtcgctttcctcaccttcctcgctgcgcgggcggcggttggtaaccggtcagaccagcccgagagggacctggtgcctgtacccaggcttctgtcgctctgtcgcctgcgctatgccctgctgtagtcacaggagctgtagagaggaccccggtacatctgaaagccgggaaatggtgcgtgtgcgggaccagatgtcgtgagacgggggaggggctgcctggaacaggcgggaaccggctgtggcgggacccgggcctccctgtgggcgactccggggtctgggaccgagtcctccttgagcagttcggccctcggtccccttggccgctggacggggctgggccagcagccaggacccgggcgtcctgtcccgtccctgcgcggcgactgcggccgcggcccctgccccggagccctctctgggcagttccgctcccgcagccccgcgtctccccagattgtgcggaagcaacgggagggtcatggaggcatcctgactcgggtgtggggttcgtgcgtgggaggagcagtggtctgtggggcccccagtccccactttctcctgttaaaaattaaactgaggtacgttaacaattaaagagttcatttgagcaaacagcgattcacgaatgagaaacaccccgtcctgggttgtggtttgtcaacggaaaaagccaaactatgtaaaataaagaagtttattcagagccgaataggagagaccttggccgagggaaacacaaccccaagcagcctggagtaagtggtcccgaggcggctcaagacagtttggttttattcatttcagagagacaggaattgcagggaaaatgatgaatcagtgcctgaaaggtgtaagttccattggcagaaagggtgggacctgtggaaggggggttagaa

SEQ ID NO: 113083 - DNA, 389 bp, Homo sapiens
cggaaatggagggggtcgctttcctcaccttcctcgctgcgcgggcggcggttggtaaccggtcagaccagcccgagagggacctggtgcctgtacccaggcttctgtcgctctgtcgcctgcgctatgccctgctgtagtcacaggagctgtagagaggaccccggtacatctgaaagccgggaaatggacccagtggcctttgaggatgtggctgtgaacttcacccaggaagagtggacattgctggatatttcccagaagaatctcttcagggaagtgatgctggaaactttcaggaacctgacctctataggaaatggagtgaccagaacattgaatatgagtaccaaggacagtcattgtggagcttttacccaggttccagt

SEQ ID NO: 113084 - DNA, 2820 bp, Homo sapiens
cggaaatggagggggtcgctttcctcaccttcctcgctgcgcgggcggcggttggtaaccggtcagaccagcccgagagggacctggtgcctgtacccaggcttctgtcgctctgtcgcctgcgctatgccctgctgtagtcacaggagctgtagagaggaccccggtacatctgaaagccgggaaatggacccagtggcctttgaggatgtggctgtgaacttcacccaggaagagtggacattgctggatatttcccagaagaatctcttcagggaagtgatgctggaaactttcaggaacctgacctctataggaaaaaaatggagtgaccagaacattgaatatgagtaccaaaaccccagaagaagcttcaggagtctcatagaagagaaagtcaatgaaattaaagaagacagtcattgtggagaaacttttacccaggttccagatgacagactgaacttccaggagaagaaagcttctcctgaatttaatatgagcatcagaggtgacactggacacaaggcatatgagtatcaggaatatggaccaaagccatataagtgtcaacaacctaaaaataagaaagccttcaggtatcgcccatccattagaacacaagaaagggatcacactggagagaaaccctatgcttgtaaagtctgtggaaaaacctttattttccattcaagcattcgaagacacatggtaatgcacagtggggatggaacttataaatgtaaattttgtgggaaagccttccattctttcagtttatatcttatccatgaaagaactcacactggagagaaaccatatgaatgtaaacaatgtggtaaatcctttacttattctgctacccttcaaatacatgaaagaactcacactggggagaagccctatgaatgtagcaaatgtgataaagcatttcatagttctagttcctatcatagacatgaaagaagtcacatgggagagaagccttatcaatgcaaagaatgtggaaaagcatttgcatataccagttctcttcgtagacatgaaaggacccactctgggaaaaaaccgtatgaatgtaagcaatatggggaaggcttatcctatcttataagttttcaaacacacataagaatgaactctggagaaagaccttataaatgtaagatatgtgggaaaggcttttattctgccaagtcatttcaaacacatgaaaaaactcacactggagagaaacgctataaatgcaagcaatgtggtaaagccttcaatctttccagttcctttcgatatcatgaaaggattcacactggagagaaaccctatgagtgtaagcagtgtgggaaagccttcagatctgcctcacagcttcgagtgcacggtgggactcacactggagagaaaccctatgaatgtaaggaatgtgggaaagccttcagatctacctcacaccttcgagtgcatggtaggactcatactggagagaaaccctatgaatgtaaggaatgtgggaaagccttcagatatgtgaagcaccttcaaattcatgaaaggacagaaaaacacataagaatgccctctggagaaagaccttataaatgtagtatatgtgagaaaggcttttattctgccaagtcatttcaaacacatgaaaaaactcacactggagagaaaccctatgaatgcaaccaatgtggtaaagccttcagatgttgcaattcccttcgatatcatgaaaggactcacactggagagaaaccctatgagtgtaagcaatgtgggaaagccttcagatctgcctcacaccttcgaatgcatgaaaggactcacactggagagaaaccctatgagtgtaagcaatgtgggaaagccttcagttgtgcctcaaaccttcgaaagcatggtaggactcacactggagagaaaccctatgagtgtaagcaatgtgggaaagccttcagatctgcctcaaaccttcagatgcatgaaaggactcacactggagagaaaccctatgaatgtaaggaatgcgaaaaagcattctgtaaattctcttcttttcaaatacatgaaaggaagcacagaggagagaagccctatgaatgtaagcattgtgggaatggattcacatctgccaagattcttcaaatacatgcaagaacacacattggagagaaacactatgaatgtaaggaatgcggaaaagcattcaattatttttcttccttgcatatacacgcaaggactcatatgggagagaagccatatgaatgtaaggattgtgggaaagcattcagctagcctggttccttttatggacatgaatagactcacactggaaggaagcactatgaatgcaagcaatgtggcaaaactttcacattttccagttcttttcgatatcatgaaaggactcacactggggagaaaccctatcaatgtaagcagtgtgggaaagccttcattccttttacttcttttcaatgtcatgaaaggactcacacgggagagaaaccctatgagtgtattctagttccgtttgatatcatgaaaggacttacactggagtgaaaccctatgaatgtaagcaatgtgggaaagccttcagatgtgcctcgcaccttcaacggcatggaagggttcacacttgggagaaactctatgaatgtaagcagtatgggaaagccttcagatctgccaagattctttgaatacagataattaatgtaaacaattatcataagtatactaacatgttattctttttaaataagaaggtataataaaatatcccattggttttatgtattagatcaaaaa

SEQ ID NO: 113085 - DNA, 2784 bp, Homo sapiens
tggagtccacagcatcctgagaacttcttgggaatagagtctaggcctccagtgctgtcactctcacccatcttcctctacacatgtgagatgtttcaggacccagtggcctttgaggatgtggctgtgaacttcacccaggaagagtggacattgctggatatttcccagaagaatctcttcagggaagtgatgctggaaactttcaggaacctgacctctataggaaaaaaatggagtgaccagaacattgaatatgagtaccaaaaccccagaagaagcttcaggagtctcatagaagagaaagtcaatgaaattaaagaagacagtcattgtggagaaacttttacccaggttccagatgacagactgaacttccaggagaagaaagcttctcctgaagtaaaatcatgtgacagctttgtgtgtgcagaagttggcataggtaactcatcttttaatatgagcatcagaggtgacactggacacaaggcatatgagtatcaggaatatggaccaaagccatataagtgtcaacaacctaaaaataagaaagccttcaggtatcgcccatccattagaacacaagaaagggatcacactggagagaaaccctatgcttgtaaagtctgtggaaaaacctttattttccattcaagcattcgaagacacatggtaatgcacagtggggatggaacttataaatgtaaattttgtgggaaagccttccattctttcagtttatatcttatccatgaaagaactcacactggagagaaaccatatgaatgtaaacaatgtggtaaatcctttacttattctgctacccttcaaatacatgaaagaactcacactggggagaagccctatgaatgtagcaaatgtgataaagcatttcatagttctagttcctatcatagacatgaaagaagtcacatgggagagaagccttatcaatgcaaagaatgtggaaaagcatttgcatataccagttctcttcgtagacatgaaaggacccactctgggaaaaaaccgtatgaatgtaagcaatatggggaaggcttatcctatcttataagttttcaaacacacataagaatgaactctggagaaagaccttataaatgtaagatatgtgggaaaggcttttattctgccaagtcatttcaaacacatgaaaaaactcacactggagagaaacgctataaatgcaagcaatgtggtaaagccttcaatctttccagttcctttcgatatcatgaaaggattcacactggagagaaaccctatgagtgtaagcagtgtgggaaagccttcagatctgcctcacagcttcgagtgcacggtgggactcacactggagagaaaccctatgaatgtaaggaatgtgggaaagccttcagatctacctcacaccttcgagtgcatggtaggactcatactggagagaaaccctatgaatgtaaggaatgtgggaaagccttcagatatgtgaagcaccttcaaattcatgaaaggacagaaaaacacataagaatgccctctggagaaagaccttataaatgtagtatatgtgagaaaggcttttattctgccaagtcatttcaaacacatgaaaaaactcacactggagagaaaccctatgaatgcaaccaatgtggtaaagccttcagatgttgcaattcccttcgatatcatgaaaggactcacactggagagaaaccctatgagtgtaagcaatgtgggaaagccttcagatctgcctcacaccttcgaatgcatgaaaggactcacactggagagaaaccctatgagtgtaagcaatgtgggaaagccttcagttgtgcctcaaaccttcgaaagcatggtaggactcacactggagagaaaccctatgagtgtaagcaatgtgggaaagccttcagatctgcctcaaaccttcagatgcatgaaaggactcacactggagagaaaccctatgaatgtaaggaatgcgaaaaagcattctgtaaattctcttcttttcaaatacatgaaaggaagcacagaggagagaagccctatgaatgtaagcattgtgggaatggattcacatctgccaagattcttcaaatacatgcaagaacacacattggagagaaacactatgaatgtaaggaatgcggaaaagcattcaattatttttcttccttgcatatacacgcaaggactcatatgggagagaagccatatgaatgtaaggattgtgggaaagcattcagctagcctggttccttttatggacatgaatagactcacactggaaggaagcactatgaatgcaagcaatgtggcaaaactttcacattttccagttcttttcgatatcatgaaaggactcacactggggagaaaccctatcaatgtaagcagtgtgggaaagccttcattccttttacttcttttcaatgtcatgaaaggactcacacgggagagaaaccctatgagtgtattctagttccgtttgatatcatgaaaggacttacactggagtgaaaccctatgaatgtaagcaatgtgggaaagccttcagatgtgcctcgcaccttcaacggcatggaagggttcacacttgggagaaactctatgaatgtaagcagtatgggaaagccttcagatctgccaagattctttgaatacagataattaatgtaaacaattatcataagtatactaacatgttattctttttaaataagaaggtataataaaatatcccattggttttatgtattagatcaaaaa

SEQ ID NO: 113086 - DNA, 237 bp, Homo sapiens
cctccaaaagtgctgggattacaggcatgagccactgcacccggccacactttttttttttccttgttgtaccagctaattctctggcacattgaattatagtgatggaagcagtcatctttatcttgtaactgatttttaaaggaatcctttttgtttgtttgtttgttttgtttgtttgttttgagatggagtctcacagtgtagcctgggctggagtgcagtggtgcaatctca

SEQ ID NO: 113087 - DNA, 4638 bp, Homo sapiens
ggtggagccgagcggtgcggagcagatctggtggttctccggagagcagcttccttgggtgttacatgagccaagccctcactgtacagaagagtgagagctgaaacctgttccctgagctgatcagaaggacatcccttggcccctccatctgggctcctgtggataggaggggctgggtgagcaggccagctgggctatggtgtggtgcctcggcctggccgtcctcagcctggtcatcagccagggggctgacggtcgagggaagcctgaggtggtatcggtggtgggccgggctggggagagtgtggtgctgggctgtgacctgctgcccccggccggccggccccccctgcatgtcatcgagtggctgcgctttggattcctgcttcccatcttcatccagttcggcctctactctccccgaattgaccctgattacgtgggacgagtccggctgcagaagggggcctctctccagattgagggtctccgggtggaagaccagggctggtacgagtgccgcgtgttcttcctggaccagcacatccctgaagacgattttgctaacggctcctgggtgcatctgacagtcaattcaccccctcaattccaggagacacctcctgctgtgttggaagtgcaggaactggagcctgtgaccctgcgttgtgtggcccgtggcagccccctgcctcatgtgacgtggaagctccgaggaaaggaccttggccagggccagggccaggtgcaagtgcagaacgggacgctgcggatccgccgggtagagcgaggcagctctggggtctacacctgccaagcctccagcactgagggcagcgccacccacgccacccagctgctagtgctaggacccccagtcatcgtggtgccccccaagaacagcacagtcaatgcctcccaggatgtttcattggcctgccatgctgaggcataccctgctaacctcacctacagctggttccaggacaacatcaatgtcttccacattagccgcctgcagccccgggtgcggatcctggtggacgggagcctgcggctgctggccacccagcctgatgatgccggctgctacacctgtgtgcccagcaatggcctcctgcatccaccctcagcctctgcctacctcactgtgctctacccagcccaggtgacagctatgcctcctgagacacccctgcccataggcatgccgggggtgatccgctgcccggttcgtgccaaccccccactgctctttgtcagctggaccaaggatggaaaggccctgcagctggacaagttccctggctggtcccagggcacagaaggctcactgatcatcgccctggggaacgaggatgccctgggagaatactcctgcaccccctacaacagtcttggtaccgccgggccctctcctgtgacccgcgtgctgctcaaggctcccccagcttttatagagcggcccaaggaagaatatttccaagaagtagggcgggagctgctcatcccctgctccgcccaaggggaccctcctcctgttgtctcttggaccaagggctcaccagtggttctgtaggtgggccgggggctgcaaggccaggcccaggtggacagcaacagcagcctcatcctgcgaccattgaccaaggaggcccacgggcactgggaatgcagtgccagcaatgctgtggcccgagtggccacctccacgaacgtctacgtgctgggcactagccctcatgttgtcaccaatgtgtccgtggtggctttgcccaagggtgccaatgtctcctgggagcctggctttgatggtggttatctgcagagattcagtgtctggtacaccccactggccaagcgtcctgaccgaatgcaccatgactgggtgtccttggcagtgcctgtgggggctgctcacctcctagtgccagggctgcagccccacacccagtaccagttcagcgtgctagctcagaacaagctggggagtggtcccttcagcgaaatcgtcttgtctgctccggaagggcttcctaccacgccagctgcacccgggcttcccccaacagagataccgcctcccctgtcccctccgcggggtctggtggcagtgaggacaccccggggggtactcctgcattgggatcccccagagctggtccctaagagactggatggctacgtcttggaaggccggcaaggctcccagggctgggaggtgctggacccggctgtggcaggcacagaaacagagctgctggtgccaggcctcatcaaggatgttctctacgagttccgcctcgtggccttcgcgggcagcttcgtcagcgaccccagcaacacggccaacgtctccacttccggtctggaggtctacccttcgcgcacgcagctgccgggcctcctgcctcagcccgtgctggccggcgtggtgggcggagtctgctttctgggagtggccgtccttgtgagcatcctggccggctgcctcctgaaccggcgcagggctgcccgccgccgccgcaagcgcctccgccaagatccacctcttatcttctctccgaccgggaagtcagctgcaccctctgctctgggctcaggcagtcctgacagcgtggcgaagctgaagctccagggatccccagtccccagcctgcgccagagtctgctctggggggatcctgccggaactcccagcccccacccggatcctccatctagccggggacccttacctctggagcccatttgccggggcccagacgggcgctttgtgatggggcccactgtggcggccccccaggaaaggtcaggccgggagcaggcagaacctcggactccagcccagcgtctggcccggtcctttgactgtagcagcagcagccccagtggggcaccccagcccctctgcattgaagacatcagccctgtggcaccccctccagcagccccacccagtcccttgccaggtcctggacccctgctccagtacctgagcctgcccttcttccgagagatgaatgtggatggggactggcccccgcttgaggagcccagccctgctgcacccccagattacatggatacccggcgctgtcccacctcatctttccttcgttctccagaaacccctcctgtatcccccagggaatcacttcctggggctgtggtaggggctggggccactgcagagcccccttacacagccctggctgactggacactgagggagcggctgctgccaggccttctccctgctgcccctcgaggcagcctcaccagccagagcagtgggcgaggcagcgcttcgttcctgcggcccccctccacagccccctctgcaggaggcagctacctcagccctgctccaggagacaccagcagctgggccagtggccctgagagatggccccgaagggagcatgtggtgacagtcagcaagaggaggaacacatctgtggacgagaactatgagtgggactcagaattccctggggacatggaattgctggagactttgcacctgggcttggccagctcccggctcagacctgaagctgagccagagctaggtgtgaagactccagaggagggctgcctcctgaacactgcccatgttactggccctgaggcccgctgtgctgcccttcgggaggaattcctggccttccgccgccgccgagatgctactagggctcggctaccagcctatcgacagccagtcccccaccccgaacaggccactctgctgtgaacatccctaatgtgaggctgtgaaaaggcatatggacctgcaaaggaggcccccaaccagacagacctagtttcaaacgagggcactgcccctgcctgcccctttggtgcccaggcacagaccctgatagtgggtttgggtcaccttggtatggaatgtatgtgctgaccccctaggtgagtctggggattggaacagggatcttaggtctgcctctctctctctctctctctctctctctctctctgtgtgtgtgtgtgtgtgtgtgaagttttttacaggtgaataaacaaagtttgaaagatgtttctgtgtgttatctgtctttgagagagtgccaggaaaatccctggacccttaaagaagaggagaatcttcttgaataaatggaggtgcattcagcattcattcaagaaacatttattgagtgcttacggaggccagctactaaaggccagccactgaagtagatactgagaaaatacaaagctctggaagcacgcctttgcccttgaggagttctttctagtcagtgaggcggacaaagaaatagttaccgtatgataagttccgtgataaagctatgtgttggttattgtagcacaaaggaagatgttgcattcaaggccacctttagtgaacgctaatatcgtgtgctgggacaaatgccacatattgggggggagtcctcaggaccctcacagatagatggtggtaataatagtattcactatgtgccaggcactgctctaagccctataggtggactgtttagttctctacaattctatgaattaggtagtactattagctctgttctatagaccagggaactcaagcatagaatgcacaacagtcacacagcaggtaaagggtag

SEQ ID NO: 113088 - DNA, 3579 bp, Homo sapiens
ggacatcagtcacacacatccagaagtaagatatcctgttgcccaactctcactaaccttgaccgtgctgcctccctctctggggctctgggaggaagaatgttctgcagaggtttgtacatctctgagagtcctgcctaagcctgccagcccttactacaccaccattttcctccagcccctacccactggggaacagaaacagagccagagaggaattgagagatggagagagaatgaggtagagacaggcttggtgagtgtttagctagggggagtgagggagagtgaggtgagacatggcatgacagggagcacagagagagggagtagccagccttagatgtaagagagggcccctcccaatgccagatctggcttgcaggctcccccagcttttatagagcggcccaaggaagaatatttccaagaagtagggcgggagctgctcatcccctgctccgcccaaggggaccctcctcctgttgtctcttggaccaagggctcaccagtggttctgtaggtgggccgggggctgcaaggccaggcccaggtggacagcaacagcagcctcatcctgcgaccattgaccaaggaggcccacgggcactgggaatgcagtgccagcaatgctgtggcccgagtggccacctccacgaacgtctacgtgctgggcactagccctcatgttgtcaccaatgtgtccgtggtggctttgcccaagggtgccaatgtctcctgggagcctggctttgatggtggttatctgcagagattcagtgtctggtacaccccactggccaagcgtcctgaccgaatgcaccatgactgggtgtccttggcagtgcctgtgggggctgctcacctcctagtgccagggctgcagccccacacccagtaccagttcagcgtgctagctcagaacaagctggggagtggtcccttcagcgaaatcgtcttgtctgctccggaagggcttcctaccacgccagctgcacccgggcttcccccaacagagataccgcctcccctgtcccctccgcggggtctggtggcagtgaggacaccccggggggtactcctgcattgggatcccccagagctggtccctaagagactggatggctacgtcttggaaggccggcaaggctcccagggctgggaggtgctggacccggctgtggcaggcacagaaacagagctgctggtgccaggcctcatcaaggatgttctctacgagttccgcctcgtggccttcgcgggcagcttcgtcagcgaccccagcaacacggccaacgtctccacttccggtctggaggtctacccttcgcgcacgcagctgccgggcctcctgcctcagcccgtgctggccggcgtggtgggcggagtctgctttctgggagtggccgtccttgtgagcatcctggccggctgcctcctgaaccggcgcagggctgcccgccgccgccgcaagcgcctccgccaagatccacctcttatcttctctccgaccgggaagtcagctgcaccctctgctctgggctcaggcagtcctgacagcgtggcgaagctgaagctccagggatccccagtccccagcctgcgccagagtctgctctggggggatcctgccggaactcccagcccccacccggatcctccatctagccggggacccttacctctggagcccatttgccggggcccagacgggcgctttgtgatggggcccactgtggcggccccccaggaaaggtcaggccgggagcaggcagaacctcggactccagcccagcgtctggcccggtcctttgactgtagcagcagcagccccagtggggcaccccagcccctctgcattgaagacatcagccctgtggcaccccctccagcagccccacccagtcccttgccaggtcctggacccctgctccagtacctgagcctgcccttcttccgagagatgaatgtggatggggactggcccccgcttgaggagcccagccctgctgcacccccagattacatggatacccggcgctgtcccacctcatctttccttcgttctccagaaacccctcctgtatcccccagggaatcacttcctggggctgtggtaggggctggggccactgcagagcccccttacacagccctggctgactggacactgagggagcggctgctgccaggccttctccctgctgcccctcgaggcagcctcaccagccagagcagtgggcgaggcagcgcttcgttcctgcggcccccctccacagccccctctgcaggaggcagctacctcagccctgctccaggagacaccagcagctgggccagtggccctgagagatggccccgaagggagcatgtggtgacagtcagcaagaggaggaacacatctgtggacgagaactatgagtgggactcagaattccctggggacatggaattgctggagactttgcacctgggcttggccagctcccggctcagacctgaagctgagccagagctaggtgtgaagactccagaggagggctgcctcctgaacactgcccatgttactggccctgaggcccgctgtgctgcccttcgggaggaattcctggccttccgccgccgccgagatgctactagggctcggctaccagcctatcgacagccagtcccccaccccgaacaggccactctgctgtgaacatccctaatgtgaggctgtgaaaaggcatatggacctgcaaaggaggcccccaaccagacagacctagtttcaaacgagggcactgcccctgcctgcccctttggtgcccaggcacagaccctgatagtgggtttgggtcaccttggtatggaatgtatgtgctgaccccctaggtgagtctggggattggaacagggatcttaggtctgcctctctctctctctctctctctctctctctctctgtgtgtgtgtgtgtgtgtgtgaagttttttacaggtgaataaacaaagtttgaaagatgtttctgtgtgttatctgtctttgagagagtgccaggaaaatccctggacccttaaagaagaggagaatcttcttgaataaatggaggtgcattcagcattcattcaagaaacatttattgagtgcttacggaggccagctactaaaggccagccactgaagtagatactgagaaaatacaaagctctggaagcacgcctttgcccttgaggagttctttctagtcagtgaggcggacaaagaaatagttaccgtatgataagttccgtgataaagctatgtgttggttattgtagcacaaaggaagatgttgcattcaaggccacctttagtgaacgctaatatcgtgtgctgggacaaatgccacatattgggggggagtcctcaggaccctcacagatagatggtggtaataatagtattcactatgtgccaggcactgctctaagccctataggtggactgtttagttctctacaattctatgaattaggtagtactattagctctgttctatagaccagggaactcaagcatagaatgcacaacagtcacacagcaggtaaagggtag

SEQ ID NO: 113089 - DNA, 4617 bp, Homo sapiens
ggtggagccgagcggtgcggagcagatctggtggttctccggagagcagcttccttgggtgttacatgagccaagccctcactgtacagaagagtgagagctgaaacctgttccctgagctgatcagaaggacatcccttggcccctccatctgggctcctgtggataggaggggctgggtgagcaggccagctgggctatggtgtggtgcctcggcctggccgtcctcagcctggtcatcagccagggggctgacggtcgagggaagcctgaggtggtatcggtggtgggccgggctggggagagtgtggtgctgggctgtgacctgctgcccccggccggccggccccccctgcatgtcatcgagtggctgcgctttggattcctgcttcccatcttcatccagttcggcctctactctccccgaattgaccctgattacgtgggacgagtccggctgcagaagggggcctctctccagattgagggtctccgggtggaagaccagggctggtacgagtgccgcgtgttcttcctggaccagcacatccctgaagacgattttgctaacggctcctgggtgcatctgacagtcaattcaccccctcaattccaggagacacctcctgctgtgttggaagtgcaggaactggagcctgtgaccctgcgttgtgtggcccgtggcagccccctgcctcatgtgacgtggaagctccgaggaaaggaccttggccagggccagggccaggtgcaagtgcagaacgggacgctgcggatccgccgggtagagcgaggcagctctggggtctacacctgccaagcctccagcactgagggcagcgccacccacgccacccagctgctagtgctaggacccccagtcatcgtggtgccccccaagaacagcacagtcaatgcctcccaggatgtttcattggcctgccatgctgaggcataccctgctaacctcacctacagctggttccaggacaacatcaatgtcttccacattagccgcctgcagccccgggtgcggatcctggtggacgggagcctgcggctgctggccacccagcctgatgatgccggctgctacacctgtgtgcccagcaatggcctcctgcatccaccctcagcctctgcctacctcactgtgctctacccagcccaggtgacagctatgcctcctgagacacccctgcccataggcatgccgggggtgatccgctgcccggttcgtgccaaccccccactgctctttgtcagctggaccaaggatggaaaggccctgcagctggacaagttccctggctggtcccagggcacagaaggctcactgatcatcgccctggggaacgaggatgccctgggagaatactcctgcaccccctacaacagtcttggtaccgccgggccctctcctgtgacccgcgtgctgctcaaggctcccccagcttttatagagcggcccaaggaagaatatttccaagaagtagggcgggagctgctcatcccctgctccgcccaaggggaccctcctcctgttgtctcttggaccaaggtgggccgggggctgcaaggccaggcccaggtggacagcaacagcagcctcatcctgcgaccattgaccaaggaggcccacgggcactgggaatgcagtgccagcaatgctgtggcccgagtggccacctccacgaacgtctacgtgctgggcactagccctcatgttgtcaccaatgtgtccgtggtggctttgcccaagggtgccaatgtctcctgggagcctggctttgatggtggttatctgcagagattcagtgtctggtacaccccactggccaagcgtcctgaccgaatgcaccatgactgggtgtccttggcagtgcctgtgggggctgctcacctcctagtgccagggctgcagccccacacccagtaccagttcagcgtgctagctcagaacaagctggggagtggtcccttcagcgaaatcgtcttgtctgctccggaagggcttcctaccacgccagctgcacccgggcttcccccaacagagataccgcctcccctgtcccctccgcggggtctggtggcagtgaggacaccccggggggtactcctgcattgggatcccccagagctggtccctaagagactggatggctacgtcttggaaggccggcaaggctcccagggctgggaggtgctggacccggctgtggcaggcacagaaacagagctgctggtgccaggcctcatcaaggatgttctctacgagttccgcctcgtggccttcgcgggcagcttcgtcagcgaccccagcaacacggccaacgtctccacttccggtctggaggtctacccttcgcgcacgcagctgccgggcctcctgcctcagcccgtgctggccggcgtggtgggcggagtctgctttctgggagtggccgtccttgtgagcatcctggccggctgcctcctgaaccggcgcagggctgcccgccgccgccgcaagcgcctccgccaagatccacctcttatcttctctccgaccgggaagtcagctgcaccctctgctctgggctcaggcagtcctgacagcgtggcgaagctgaagctccagggatccccagtccccagcctgcgccagagtctgctctggggggatcctgccggaactcccagcccccacccggatcctccatctagccggggacccttacctctggagcccatttgccggggcccagacgggcgctttgtgatggggcccactgtggcggccccccaggaaaggtcaggccgggagcaggcagaacctcggactccagcccagcgtctggcccggtcctttgactgtagcagcagcagccccagtggggcaccccagcccctctgcattgaagacatcagccctgtggcaccccctccagcagccccacccagtcccttgccaggtcctggacccctgctccagtacctgagcctgcccttcttccgagagatgaatgtggatggggactggcccccgcttgaggagcccagccctgctgcacccccagattacatggatacccggcgctgtcccacctcatctttccttcgttctccagaaacccctcctgtatcccccagggaatcacttcctggggctgtggtaggggctggggccactgcagagcccccttacacagccctggctgactggacactgagggagcggctgctgccaggccttctccctgctgcccctcgaggcagcctcaccagccagagcagtgggcgaggcagcgcttcgttcctgcggcccccctccacagccccctctgcaggaggcagctacctcagccctgctccaggagacaccagcagctgggccagtggccctgagagatggccccgaagggagcatgtggtgacagtcagcaagaggaggaacacatctgtggacgagaactatgagtgggactcagaattccctggggacatggaattgctggagactttgcacctgggcttggccagctcccggctcagacctgaagctgagccagagctaggtgtgaagactccagaggagggctgcctcctgaacactgcccatgttactggccctgaggcccgctgtgctgcccttcgggaggaattcctggccttccgccgccgccgagatgctactagggctcggctaccagcctatcgacagccagtcccccaccccgaacaggccactctgctgtgaacatccctaatgtgaggctgtgaaaaggcatatggacctgcaaaggaggcccccaaccagacagacctagtttcaaacgagggcactgcccctgcctgcccctttggtgcccaggcacagaccctgatagtgggtttgggtcaccttggtatggaatgtatgtgctgaccccctaggtgagtctggggattggaacagggatcttaggtctgcctctctctctctctctctctctctctctctctctgtgtgtgtgtgtgtgtgtgtgaagttttttacaggtgaataaacaaagtttgaaagatgtttctgtgtgttatctgtctttgagagagtgccaggaaaatccctggacccttaaagaagaggagaatcttcttgaataaatggaggtgcattcagcattcattcaagaaacatttattgagtgcttacggaggccagctactaaaggccagccactgaagtagatactgagaaaatacaaagctctggaagcacgcctttgcccttgaggagttctttctagtcagtgaggcggacaaagaaatagttaccgtatgataagttccgtgataaagctatgtgttggttattgtagcacaaaggaagatgttgcattcaaggccacctttagtgaacgctaatatcgtgtgctgggacaaatgccacatattgggggggagtcctcaggaccctcacagatagatggtggtaataatagtattcactatgtgccaggcactgctctaagccctataggtggactgtttagttctctacaattctatgaattaggtagtactattagctctgttctatagaccagggaactcaagcatagaatgcacaacagtcacacagcaggtaaagggtag

SEQ ID NO: 113090 - DNA, 3627 bp, Homo sapiens
caggcaggaagccccacgcggcccaactacaggggtggccattcacagtgtattttctgtgagtggcaccccctggagttgtgcagtcacagcctcacactattgggaggggtccctctgcaggaaggaaaggaagcactggaaatcagagaggggtcaggcctagacatggagctgctggagtcttctgcacagctgtgggtttctcatcctgccccctctcttgtactgccatcccgggcttgtctctgctgagctcctctctctagctgtcatcttctcttccttccagttccctggctggtcccagggcacagaaggctcactgatcatcgccctggggaacgaggatgccctgggagaatactcctgcaccccctacaacagtcttggtaccgccgggccctctcctgtgacccgcgtgctgctcaaggctcccccagcttttatagagcggcccaaggaagaatatttccaagaagtagggcgggagctgctcatcccctgctccgcccaaggggaccctcctcctgttgtctcttggaccaagggctcaccagtggttctgtaggtgggccgggggctgcaaggccaggcccaggtggacagcaacagcagcctcatcctgcgaccattgaccaaggaggcccacgggcactgggaatgcagtgccagcaatgctgtggcccgagtggccacctccacgaacgtctacgtgctgggcactagccctcatgttgtcaccaatgtgtccgtggtggctttgcccaagggtgccaatgtctcctgggagcctggctttgatggtggttatctgcagagattcagtgtctggtacaccccactggccaagcgtcctgaccgaatgcaccatgactgggtgtccttggcagtgcctgtgggggctgctcacctcctagtgccagggctgcagccccacacccagtaccagttcagcgtgctagctcagaacaagctggggagtggtcccttcagcgaaatcgtcttgtctgctccggaagggcttcctaccacgccagctgcacccgggcttcccccaacagagataccgcctcccctgtcccctccgcggggtctggtggcagtgaggacaccccggggggtactcctgcattgggatcccccagagctggtccctaagagactggatggctacgtcttggaaggccggcaaggctcccagggctgggaggtgctggacccggctgtggcaggcacagaaacagagctgctggtgccaggcctcatcaaggatgttctctacgagttccgcctcgtggccttcgcgggcagcttcgtcagcgaccccagcaacacggccaacgtctccacttccggtctggaggtctacccttcgcgcacgcagctgccgggcctcctgcctcagcccgtgctggccggcgtggtgggcggagtctgctttctgggagtggccgtccttgtgagcatcctggccggctgcctcctgaaccggcgcagggctgcccgccgccgccgcaagcgcctccgccaagatccacctcttatcttctctccgaccgggaagtcagctgcaccctctgctctgggctcaggcagtcctgacagcgtggcgaagctgaagctccagggatccccagtccccagcctgcgccagagtctgctctggggggatcctgccggaactcccagcccccacccggatcctccatctagccggggacccttacctctggagcccatttgccggggcccagacgggcgctttgtgatggggcccactgtggcggccccccaggaaaggtcaggccgggagcaggcagaacctcggactccagcccagcgtctggcccggtcctttgactgtagcagcagcagccccagtggggcaccccagcccctctgcattgaagacatcagccctgtggcaccccctccagcagccccacccagtcccttgccaggtcctggacccctgctccagtacctgagcctgcccttcttccgagagatgaatgtggatggggactggcccccgcttgaggagcccagccctgctgcacccccagattacatggatacccggcgctgtcccacctcatctttccttcgttctccagaaacccctcctgtatcccccagggaatcacttcctggggctgtggtaggggctggggccactgcagagcccccttacacagccctggctgactggacactgagggagcggctgctgccaggccttctccctgctgcccctcgaggcagcctcaccagccagagcagtgggcgaggcagcgcttcgttcctgcggcccccctccacagccccctctgcaggaggcagctacctcagccctgctccaggagacaccagcagctgggccagtggccctgagagatggccccgaagggagcatgtggtgacagtcagcaagaggaggaacacatctgtggacgagaactatgagtgggactcagaattccctggggacatggaattgctggagactttgcacctgggcttggccagctcccggctcagacctgaagctgagccagagctaggtgtgaagactccagaggagggctgcctcctgaacactgcccatgttactggccctgaggcccgctgtgctgcccttcgggaggaattcctggccttccgccgccgccgagatgctactagggctcggctaccagcctatcgacagccagtcccccaccccgaacaggccactctgctgtgaacatccctaatgtgaggctgtgaaaaggcatatggacctgcaaaggaggcccccaaccagacagacctagtttcaaacgagggcactgcccctgcctgcccctttggtgcccaggcacagaccctgatagtgggtttgggtcaccttggtatggaatgtatgtgctgaccccctaggtgagtctggggattggaacagggatcttaggtctgcctctctctctctctctctctctctctctctctctgtgtgtgtgtgtgtgtgtgtgaagttttttacaggtgaataaacaaagtttgaaagatgtttctgtgtgttatctgtctttgagagagtgccaggaaaatccctggacccttaaagaagaggagaatcttcttgaataaatggaggtgcattcagcattcattcaagaaacatttattgagtgcttacggaggccagctactaaaggccagccactgaagtagatactgagaaaatacaaagctctggaagcacgcctttgcccttgaggagttctttctagtcagtgaggcggacaaagaaatagttaccgtatgataagttccgtgataaagctatgtgttggttattgtagcacaaaggaagatgttgcattcaaggccacctttagtgaacgctaatatcgtgtgctgggacaaatgccacatattgggggggagtcctcaggaccctcacagatagatggtggtaataatagtattcactatgtgccaggcactgctctaagccctataggtggactgtttagttctctacaattctatgaattaggtagtactattagctctgttctatagaccagggaactcaagcatagaatgcacaacagtcacacagcaggtaaagggtag

SEQ ID NO: 113091 - DNA, 4062 bp, Homo sapiens
ggtggagccgagcggtgcggagcagatctggtggttctccggagagcagcttccttgggtgttacatgagccaagccctcactgtacagaagagtgagagctgaaacctgttccctgagctgatcagaaggacatcccttggcccctccatctgggctcctgtggataggaggggctgggtgagcaggccagctgggctatggtgtggtgcctcggcctggccgtcctcagcctggtcatcagccagggggctgacggtcgagggaagcctgaggtggtatcggtggtgggccgggctggggagagtgtggtgctgggctgtgacctgctgcccccggccggccggccccccctgcatgtcatcgagtggctgcgctttggattcctgcttcccatcttcatccagttcggcctctactctccccgaattgaccctgattacgtgggacgagtccggctgcagaagggggcctctctccagattgagggtctccgggtggaagaccagggctggtacgagtgccgcgtgttcttcctggaccagcacatccctgaagacgattttgctaacggctcctgggtgcatctgacagtcaattcaccccctcaattccaggagacacctcctgctgtgttggaagtgcaggaactggagcctgtgaccctgcgttgtgtggcccgtggcagccccctgcctcatgtgacgtggaagctccgaggaaaggaccttggccagggccagggccaggtgcaagtgcagaacgggacgctgcggatccgccgggtagagcgaggcagctctggggtctacacctgccaagcctccagcactgagggcagcgccacccacgccacccagctgctagtgctaggacccccagtcatcgtggtgccccccaagaacagcacagtcaatgcctcccaggatgtttcattggcctgccatgctgaggcataccctgctaacctcacctacagctggttccaggacaacatcaatgtcttccacattagccgcctgcagccccgggtgcggatcctggtggacgggagcctgcggctgctggccacccagcctgatgatgccggctgctacacctgtgtgcccagcaatggcctcctgcatccaccctcagcctctgcctacctcactgtgctctacccagcccaggtgacagctatgcctcctgagacacccctgcccataggcatgccgggggtgatccgctgcccggttcgtgccaaccccccactgctctttgtcagctggaccaaggatggaaaggccctgcagctggacaagttccctggctggtcccagggcacagaaggctcactgatcatcgccctggggaacgaggatgccctgggagaatactcctgcaccccctacaacagtcttggtaccgccgggccctctcctgtgacccgcgtgctgctcaaggctcccccagcttttatagagcggcccaaggaagaatatttccaagaagtagggcgggagctgctcatcccctgctccgcccaaggggaccctcctcctgttgtctcttggaccaaggtgggccgggggctgcaaggccaggcccaggtggacagcaacagcagcctcatcctgcgaccattgaccaaggaggcccacgggcactgggaatgcagtgccagcaatgctgtggcccgagtggccacctccacgaacgtctacgtgctgggcactagccctcatgttgtcaccaatgtgtccgtggtggctttgcccaagggtgccaatgtctcctgggagcctggctttgatggtggttatctgcagagattcagtgtctggtacaccccactggccaagcgtcctgaccgaatgcaccatgactgggtgtccttggcagtgcctgtgggggctgctcacctcctagtgccagggctgcagccccacacccagtaccagttcagcgtgctagctcagaacaagctggggagtggtcccttcagcgaaatcgtcttgtctgctccggaagggcttcctaccacgccagctgcacccgggcttcccccaacagagataccgcctcccctgtcccctccgcggggtctggtggcagtgaggacaccccggggggtactcctgcattgggatcccccagagctggtccctaagagactggatggctacgtcttggaaggccggcaaggctcccagggctgggaggtgctggacccggctgtggcaggcacagaaacagagctgctggtgccaggcctcatcaaggatgttctctacgagttccgcctcgtggccttcgcgggcagcttcgtcagcgaccccagcaacacggccaacgtctccacttccggtctggaggtctacccttcgcgcacgcagctgccgggcctcctgcctcagcccgtgctggccggcgtggtgggcggagtctgctttctgggagtggccgtccttgtgagcatcctggccggctgcctcctgaaccggcgcagggctgcccgccgccgccgcaagcgcctccgccaagatccacctcttatcttctctccgaccgggaagtcagctgcaccctctgctctgggctcaggcagtcctgacagcgtggcgaagctgaagctccagggatccccagtccccagcctgcgccagagtctgctctggggggatcctgccggaactcccagcccccacccggatcctccatctagccggggacccttacctctggagcccatttgccggggcccagacgggcgctttgtgatggggcccactgtggcggccccccaggaaaggtcaggccgggagcaggcagaacctcggactccagcccagcgtctggcccggtcctttgactgtagcagcagcagccccagtggggcaccccagcccctctgcattgaagacatcagccctgtggcaccccctccagcagccccacccagtcccttgccaggtcctggacccctgctccagtacctgagcctgcccttcttccgagagatgaatgtggatggggactggcccccgcttgaggagcccagccctgctgcacccccagattacatggatacccggcgctgtcccacctcatctttccttcgttctccagaaacccctcctgtatcccccagggaatcacttcctggggctgtggtaggggctggggccactgcagagcccccttacacagccctggctgactggacactgagggagcggctgctgccaggccttctccctgctgcccctcgaggcagcctcaccagccagagcagtgggcgaggcagcgcttcgttcctgcggcccccctccacagccccctctgcaggaggcagctacctcagccctgctccaggagacaccagcagctgggccagtggccctgagagatggccccgaagggagcatgtggtgacagtcagcaagaggaggaacacatctgtggacgagaactatgagtgggactcagaattccctggggacatggaattgctggagactttgcacctgggcttggccagctcccggctcagacctgaagctgagccagagctaggtgtgaagactccagaggagggctgcctcctgaacactgcccatgttactggccctgaggcccgctgtgctgcccttcgggaggaattcctggccttccgccgccgccgagatgctactagggctcggctaccagcctatcgacagccagtcccccaccccgaacaggccactctgctgtgaacatccctaatgtgaggctgtgaaaaggcatatggacctgcaaaggaggcccccaaccagacagacctagtttcaaacgagggcactgcccctgcctgcccctttggtgcccaggcacagaccctgatagtgggtttgggtcaccttggtatggaatgtatgtgctgaccccctaggtgagtctggggatgttcacagcagagtggcctgttcggggtgggggactggctgtcgataggctggtagccgagccctagtagcatctcggcggcggcggaaggccaggaattcctcccgaagggcagcacagcgggcctcgtgcc

SEQ ID NO: 113092 - DNA, 449 bp, Homo sapiens
acagtgaggaggtggggaaggcatcttggaattttagagcttctcatgcagcttttactgaccttattttaacctgtcacccttttaccctcagtctttgagcagactggagtgagtacttctcggcttttctcactgttggtatagcattccctctctcaagttggctgagacagttgccacttgtccatctgttttccactttcatgatttgtagtttccattacagttctttaagtccttgggtctctatgtcttctagaaagatctcttactgtcacttaagtggggtttagggaaagggtgtaattggatatgtgtgttaaatttaccgtcttaatctggaaggctcggaagatgaatccttagaactaaaaaaataccggatcatgttacattttgtttcgttggcaaggactgccatctgtaatcagtgtttcttttaaggg

SEQ ID NO: 113093 - DNA, 578 bp, Homo sapiens
ctaatgcttagctagttttagtattcttgacaaattccatttacctaatagatcagtcgtttaatgtagctttttgtttgtttgtttgtttgttttgagacagagtctggctctgtcacccaggttggagtgcagtggtgagatctcggctcattgaaacctctgcctcctgggttcatgcgattctcctgcctcagtctcttgagtagctgggattataggcgcccaccatcatgcccggctaattttggggtttttagtagagacggggtttcaccatgttggccaggctggtctcgaactcctgacctcgagtgatcctcccgcctccgcctcccaaagtgctgggattacaggcccgaccctcatgtagcttttgaaatgtatgtggtacaacgttatacaataattcattcaaatttttaaatgttactgtctgttgctacatcttctttctcttttctaatgttaattttgtcttctcactatttatcttggccagagtagccgagctttttgtctatttattattcttctcaaatgatccatttttaactttattgaataaatttgcctta

SEQ ID NO: 113094 - DNA, 377 bp, Homo sapiens
ccacggtgaacactgatgaactggcttctgtcatcccagggaagagacgggcttcaagcaggctgcaaaaccaggccggcgggctccgacaacaactctcatccaaagttccctcgttgccatctgctgaccagctggacccactgacctcagaccagaaccttccccaagcttgatctgcagcctgccacctggggaacccacttcgctgaataggagctggaaatctgggctctttttcaggcctctgccatgaggcactgtatccttgttccaactcaattattactgattcattatttgtctttcctctaaaaagaaccagccataacaaaaagcccctctcatggtctgtagaaaataaatacaaccaaaag

SEQ ID NO: 113095 - DNA, 514 bp, Homo sapiens
gttcaattattgtgtcttattgtttcctgtgaacataaaggaatgtccacagaatattagagaatattggaatgcaggaagagaggcaagtctgagaggtggggatgagttcagagaaatccccaggggcctccttattgtgcagtagttttccctccatgtgccccctgggctgatattaatgtgttctaggaaatgcttaatgcttatgggcctgactcttggttttgccttttaagaggcatcatcattactaacaaacacgttcctgaacaggccttagtgctaagctaggctcgatctcttctttctggccaaattgggattaatgccactctttgatttcctcatgttggcaatcacacagtgccatgattaactggtgccacacattgccaaggccctatggtttacttcaagggtcagtaaactgtaactccaaggccaaatctggcccactgtgtttttatagagtccttctgctaagaattgtttttacatttttaaatgattg

SEQ ID NO: 113096 - DNA, 488 bp, Homo sapiens
actgtgttatgtgttgccataggaaggaggaaacagagctgtcgctgaaaactgaatcatatatgctaatacaactgacttaatatatttaatgcatatattaactcatagctttcaaaatatgtcatcccaacactccccactttctcaaatcccattcccttgaatcaaagagtacacatagataatcttcagaaaacacaatcactgagatcaactctttgaaacactgagcacttgcttttcaaagtcaggaagggtacaagcagtagatataaatggctcactgcattccttctggtacttttaaagtgtgataacgctcactttaaaacattcagatcataattatcaacagcaaaaattggaggcttgtcacttctaatttcattgattctcttgcaattcttccattacttcccaagataattttctatttaaaatctttgtcctttattactttaggcaactaccttttttgttctcac

SEQ ID NO: 113097 - DNA, 289 bp, Homo sapiens
attggaaaaaattattctagttaagaaaccaagtattttccttaaattacaaatcactactgtaaaagtgaagtcttacggcttctcagcctcttggctaagagcaagtgtacaagtgaagttttaattggtaaaacaaaaaattagatttacatcaaagtagaatcacactttaaaaattattgtagattatctttaacctcatactaagaaaccattctcatgcagtatatatgtacttatgccacactgtctcccatattaataaaaattctgcatttttacttct

SEQ ID NO: 113098 - DNA, 752 bp, Homo sapiens
ccccttcatctccccgtggaggctccatgcctagaggtggtcttcaaacagaagaatggcaaagataattgtctcgtgttttaccctgaccccattcctttaagagggtcacttcttggcccattcatttaaaaaccaatgtcatagttctgtgattccacctatcagacagtgccacgtccaaggcggggctctcacctccctgggaagagagactgttgctgtctgtgcttcctgtgttctccagtcccacgctcccacggacccacgcccttggagactccctcagtgtcccagggcttctggtgtgttcagagacctccacactcaacgaccactggtgctgcagaagggccggtgcttacattccaattaacagacgcttttcccatctaatgcctcttgccttctcctaacaccacctcgggagtgtttatgtctattctaagtgaatttcactgtgtgaaaaaattcacacctgttatcccagcaatttgggaggccaaggcaggtgtatcatttgagcccaggagtttgaaactagcctgggcaagatggtgaaaccccgtctctataaagaaattttaaaaattagctgggcatagtggcacgtgcctgtagttccatctactagggaggctaaggtgggaggatcacatgagcccaggagtttgaggctgcagtgagctgtgatcgcagcactgcactccagtctgggcaacaaagcaaaaccctgtctcttaaaaaaaaaa

SEQ ID NO: 113099 - DNA, 460 bp, Homo sapiens
ttctatcaggggtgctggggtggatcagaaggttgagactccaactgggagagatgtgtttctgctgctcaaatatttcccaagtttgcaagacatctccagcctttggagtgccttctggtttgaggagcagggatggccatccaggtctcaatgagactcagttaactcctctcatgacaaggcagccatatttcaccatccagtagagctgcctgtgatttttttgtgtgtgcatttattcaatttgaagcaatactcctttggtgaaagaatgccccctgggttgaggtacgtaaagtaaatatgcggaaaaaatcagaaagttccttaaaagaggtttattatatcactcaacccgtatctccccacgatgctacgatgactattttctttgcctgtgtcagggttgaaagctttgtcctgaggtcaggcctgtcctccttccctgtgctctgcc

SEQ ID NO: 113100 - DNA, 402 bp, Homo sapiens
tacataatgctagagaatattggagttatcacggaagaacatttaatttaaacagttatctttaacttatagagctgacatttaagagaaaatgttcaggttgttaggtgctcaaagtcacccccactcttcaaaatgtcaaatagaactttaaacagctgaagaccaagataaaaatagaacacagcatttgtttttaagagctgaattctaacccttctgtctcaaagtaaataactgtagaatatccattgctcttattacttcataatcaatgcatctttctttaataaatttctcctccttatgtttggagggcggtcataggaaactggtcttggggtgaaaggagaagtgaactattccaacctaatttctcacaaagtgaaccagagtcccagt

SEQ ID NO: 113101 - DNA, 297 bp, Homo sapiens
atgtgtcagtcttccgcagtttccttttctcacttctaatttattctctcttttttttttctgaggttagggattctacagaaggacgattattaaaattatgccatgaatttttgaaaaatttaaaatgctctcctacaaataaaatacatggagtttctgatactaatttcagtttgtcagtagatggctaaatttgttgaataattgactacttggtaaatgagctgttagctgtaattagttctttagtactaatattaaggaaattttgttattttcggatgaggactctcc

SEQ ID NO: 113102 - DNA, 365 bp, Homo sapiens
agccagaggaagggagtgttgagatgatgagtaagaagaggactgataattggccattatatttgacaagacaaaggtcatgactatgtttgacaatagcacttcctgttaagaggttaataaaagttctgaagcgatgcatgtaaaccgatctttgaagtgttcctgtagaggactggaggttaatcagagataatttgcagggtgggtttttatcccagttttgcttttaaggtggcagttacagcataattctatgctgttgagaatgatatgggggaaaatcgagatgcaaagaaagagagcagggatactttcaagagcaaagtccttgagtaaatgagagaagatggaactcagggcac

SEQ ID NO: 113103 - DNA, 1028 bp, Homo sapiens
taaatgccctgcaccaataggtctccccaccttggtcaagaggttcagtgtatgtgctggcggcacactttcaatgttgtggcaagtagtttaaaatattttctaaaccttcacgccttctgtttgtacagaacctcagtgtcagctacaggtgaaatataagaactttctaacgtctttcttgggcatgcacaccattttgcaatatgcgtgtttttccagattcccaggaatatgtcaaagctcttgaaagccctttacaggctactcatttcccagatttttcttttatggtttttggtcttattctttgccccaaccattatcactttctcagccctcttcaatttaaacaattgctgctgattgttttggaaaatgcctcaggaaaagattattcacactgagtgaactctgagtcaggtcaaattaaaaaaaaaaaaagtcctttccaggtaactgacagacaagtcaaatagtaacaattttctgaaggtggaattcttgagaaactctaaatcaaatccattccgttttctctgggaatggctatgctgataatttttacagcgtgatttcaaggttgtcggtttccagtgctactgcaaagctgtgcagaaaggaatatgaatacagggcaagaaatatttccacagaagattaatcggttaatctcctcaagtccatggggacttcggctcaaaatattccaaattcacttttcctatgcattattttatttcttaatgactcaagagatgtgctggtgttcctcttgggaaacggctcatcgttttcttactctgatttctttctcccctcggggggtggccaaggataaagacttctttttcaaaagacggtcaacaagaaaaaacgacaacacgacaagagacaaacagacaggagagcaccgacaagacgacgaaacacagcaaaaagagaccacaaaagagagaaaagagacgcagcagacgacgaacagcagacaccaagaagagcaacaagaaaacagaaaaactaaccga

SEQ ID NO: 113104 - DNA, 1269 bp, Homo sapiens
taaatgccctgcaccaataggtctccccaccttggtcaagaggttcagtgtatgtgctggcggcacactttcaatgttgtggcaagtagtttaaaatattttctaaaccttcacgccttctgtttgtacagaacctcagtgtcagctacaggtgaaatataagaactttctaacgtctttcttgggcatgcacaccattttgcaatatgcgtgtttttccagattcccaggaatatgtcaaagctcttgaaagccctttacaggctactcatttcccagatttttcttttatggtttttggtcttattctttgccccaaccattatcactttctcagccctcttcaatttaaacaattgctgctgattgttttggaaaatgcctcaggaaaagattattcacactgagtgaactctgagtcaggtcaaattaaaaaaaaaaaaagtcctttccaggtaactgacagacaagtcaaatagtaacaattttctgaaggtggaattcttgagaaactctaaatcaaatccattccgttttctctgggaatggctatgctgataatttttacagcgtgatttcaaggttgtcggtttccagtgctactgcaaagctgtgcagaaaggaatatgaatacagtaagttaaaattctgtaaattgtgatgttcatactaatatccaagtgtttttcttgactaaatgctcctcatattgttgtgtcctatttgttaattgccaaatttctttaaaatctgattttcataatttttgctaatgttcttactgcttttcttgaggaccaaattttcagatattcttacccatgcattctggaaactagaactgtctactctccattttgttgattatatttgtctttttgttaccgctctcctcctctcaactgtaaatctatctgccctctcctaattatgacccttctgcagatgacaagcctgagaatccttgtttttctttccttttttttctgtacaggtctttaaatttctctgtagagctggaaccagattggcagcaaacactaagttgaaccaacttagttgttccaataaacttggaatcagcatctgagggattatagtgaaatctgaggggccttctgttcctagttcagttgtcctgtgcactacaatgtctttgtgaaaatatatatgcgttgagacccttgattctaaggtttccttgaattctatttggttgaatatcttgctgacagacaggtcatagatttgtgacaaggcttccctttc

SEQ ID NO: 113105 - DNA, 800 bp, Homo sapiens
gtagagaaatagggccattttgtaatcaatctaccatctcttaagaggactattttaaaacagtggttcatctaagatgggagaaaatgaaatgcacaaaggataaaaactatactttataaatcctataaggcagggtttctcaatcttggcactactgacattttgggccaggtaattctttattgtgaagaggttgtcctgcacattgtaggatgtgcagcaatacccatggcacctccccactagatactagcaatactcctcaagcttaacaaccaaaaacatctccagacattgccaaatgtctcttaaggaacaaaatcacccctagttgagaaccactgttataaagggatgaataaagggatgaattaagggaaagacaactcggtcttacaaactggctttatattggcaagaatataattgctttaaaaggctgttaaaatgattctaaagtgcaaactttatttacaggcatgtatgatatataccaaattttcaatagctgacatattaaaaattcaaagttttattgacaattcctaggccactctcaattcatataatttaataaaaaacattaccatactcttgaagtcaatataaaagaagataatggtgtcagatgttaaactaaattaatactactggctctagattttgatatgtggtgtatatataagccccagattgcaataaacagagttgtttctctccaactgccaaatataaaattctgtcttacaactctatctcatctccaacccttctcttcccacttcatgcatgaccct

SEQ ID NO: 113106 - DNA, 459 bp, Homo sapiens
acaaatgctaatcctctctgaatctcagtgtcttatcttacaaagcagagcaggagatggaagacaatgaattccaaggtctctctcggctctcagcttccataattcattcatttactcattcgttcattggtccataaatttactgaggaacaaacagggaccaaaccctgcgctatgagctggggatgctgtgagcaaagagacagacagaatttctcttctcacgtaggtaaagtccagtgggagctggtgtgtgcaacattaaagaaatcacaaagaattgtgagttctaactacagtgagaatgctaagtacagttttccttacataatagagaaagggcttcctaaggcatctgctgaagatcaaaagagatgttcagtgattaacatggaaactcaggcagtatacggtggctcatgcccgtaatcccagctctttgggaggccgagacag

SEQ ID NO: 113107 - DNA, 435 bp, Homo sapiens
ttggcttcacatgccttctaagaaagactgataaaggctaaaggcgagtggggcagaaactagggtgcctcattcctgtgtttccctccatctcctcctcccatcaggtcctcaataaagcctggcagcctggatttgtgctgaaagcccctggagcaggcagaggtacctgctattcagcatgctttgggccttcctctcccttccctatctgctcattcctcagtttccacaccagtaaaatgggaatcatcagagtaagtgcctcatagggttgttgtgaggattccagagggtaaaccaaggagtgctctcagcactatggctggcacagatagtgcttaacaaagttgttattattattattattttgagacggtgtctcgctctgttgcccaggctggagtgcagtggcacaatctcctctcactgcaa

SEQ ID NO: 113108 - DNA, 836 bp, Homo sapiens
tagaaaaatgaagatgaaagcaactgactgtgacaatctgctgtgtacacaatctaagtgtatttttctttcttttctcttttcctcctggggtctccagtttaccgtggtttctgggcagtcctgatgctcctgggggtagttgctgtagtcatcgcaagctttttgatcatctgtgcagcccccttcgccagccattttctctacaaagctgggggaggctcatatattgctgcaggcatcctattttcattggtggtgatgctgtatgtcatctgggtccaggcagtggctgacatggaaagctaccgaaacatgaaaatgaaggactgcctggatttcaccccttctgttctgtatggctggtcatttttcctggccccagctgggatatttttttctttgctagctggattactatttctggttgttggacggcatattcagatacatcactaaatcaactgttgccacaagtattttcttgagagattttaaaacaaggaatactttttttccattttgtttcattgatcccagcataaagttagtagatataactttttagttgctattcaaattaatcattttactaaaattttcttcagtaagaaggtcctagaatctctccagacaccagcaagcctctatcttgtctaagtgctgtcaaggacctagttctttagggaataggtaaacaggtctccctttcattgaacatgttagagttcatgcaggtcgcaaaggcctgataatagcttaataccatgacatggggaaaatctcgatagatttggcttaaagtctccttggcattcacttctgctaattaaaaa

SEQ ID NO: 113109 - DNA, 995 bp, Homo sapiens
cggtgctggctgggagttctggtctcaggcaaggtggggactgggcacatcatcaatacgatagagaacgtcacttttcaccatgaagggttcttctggaggtgttggtttaatgggattgtggaagagaatgactccaatatttggaagttctggtacaccaatcagccaccgtccaagaactgcacacatgcttacctgtctccgtaccccttcatgagaggcgagcacaactcgacctcctatgactctgcagttatttaccgtggtttctgggcagtcctgatgctcctgggggtagttgctgtagtcatcgcaagctttttgatcatctgtgcagcccccttcgccagccattttctctacaaagctgggggaggctcatatattgctgcaggcatcctattttcattggtggtgatgctgtatgtcatctgggtccaggcagtggctgacatggaaagctaccgaaacatgaaaatgaaggactgcctggatttcaccccttctgttctgtatggctggtcatttttcctggccccagctgggatatttttttctttgctagctggattactatttctggttgttggacggcatattcagatacatcactaaatcaactgttgccacaagtattttcttgagagattttaaaacaaggaatactttttttccattttgtttcattgatcccagcataaagttagtagatataactttttagttgctattcaaattaatcattttactaaaattttcttcagtaagaaggtcctagaatctctccagacaccagcaagcctctatcttgtctaagtgctgtcaaggacctagttctttagggaataggtaaacaggtctccctttcattgaacatgttagagttcatgcaggtcgcaaaggcctgataatagcttaataccatgacatggggaaaatctcgatagatttggcttaaagtctccttggcattcacttctgctaattaaaaa

SEQ ID NO: 113110 - DNA, 298 bp, Homo sapiens
cctcccttggttggaaactaagtcccagctgctgatttttgcttccttttctctacatttccaaatacctgtgttagaactgtggggctctatacatagaaaatgtcttaaaataacagtctgtgtttttaaacttgggactgtaaggggctcctcctaaacatgtttggagtattttattttgctgatactagaagctgaccatttacctaaatagtaatatacacctttccagaatcagctctctggacaacccagctgtctgctgcaaaagagcaaaaaaccctaaagtagacca

SEQ ID NO: 113111 - DNA, 273 bp, Homo sapiens
ccgggcccagctccgtcctctcggcggcctctccaggtgcaaaacttcctcgagtcagcctctccaggcccagctcctcctgcctcccagtggcctctttcagcccagcccagctcatggctctcagcggccttcccaggtcccgcttttgacttttggcagcctcttcaggcccagaacttgacctccagtcggcctttgcagtcccggcctcctgcctcccgaaggcctgcacgggcccggcctcggcctcggcctcacagcggactctcc

SEQ ID NO: 113112 - DNA, 622 bp, Homo sapiens
cctttacactgaagacagcccctagactttagtttgtagggtagcactgacaagggaatagactgtttagagtggggtatgtgctgttgacagggataagcacatacttatgggaagcacatagcacacaccccagtgtggactttatccagaggcaatgaggagttagtggatagtcttaagtaggagactaacatgctctgacttgtgtttggagactatagaaaagcaaggattataaacaagagtccagctagcagacttttttcttttcttcttcttactctctttcgctataactgcatctctccaaaggtggggatctgaggcatgtatccactgatccccgctccaattggttgaaggttgccattgaaagcagtccctcctgtgcattttgagattgctgttaggagccagctgtgattgcgggacagaaaaactgagtctccaaagtgtgcttgaagtgggaacaatggcagtgtaaatggagctgtccaccacagctgtgctgaaatctggcaggctgacaggacttagcacagagtttttgctataggaggcctttgcagtaatcttaatgagaaatcatggtggcttggaccactgtggaggtagcatt

SEQ ID NO: 113113 - DNA, 394 bp, Homo sapiens
gtctctgcttgggctatgatcacggtgactctagcaacccttcatggacattatagtactctctgccattcacttttggtctaatctgacttcaacccccacttacttggtctctccttttacaaccaacacaaccgaaatccgagggcttctttttttttgagacagagtctcattccattctgtcacccaggctggagtggaatggcacgatctcggctcactgcaacctccacctcctgggttcaagggattgtcctgcctcagtctcctgagtagctgggagtacaggcgggtgccaccgtgcctggctaatttttgtatttttagtagagacggggtttcaccatgttggtcaggctggtctcgaactcctaacctcgtgatgcgcctg

SEQ ID NO: 113114 - DNA, 387 bp, Homo sapiens
atgccttctgactggataaaccctcccggacccaggagacatcctcacctgcccggaccccgggaggcatcctgacccttgcggaccccaggaggcatcctcaccctcctggaccccaggaggcatccttaccctcggggaccccgggaggcatcctcaccggagcaatctttggtatagaacttttaactaaattacacagtgtggagagacaagcttcagtcatttctccactacccactcagtgcctggcggaaggcaggcagcacagaccttcatcccaacgcacgaggggaatattcaaatcatgccttaggggcacagggaagggagtcagagactgccccgcctgtgattttgatacaagtagacagatgatctgagaga

SEQ ID NO: 113115 - DNA, 704 bp, Homo sapiens
ggtataacatatattgcaaacagcattattcttaattgtacagcctgattaattttatgaatgtatgcactcatacaattaccacccagattcagagcatttcagcacctagaagtctccctcatgttccctcctagtcaattcttgtttaccaagggtaatcactgctatgacatatcacacagataatatttgcctggttttggacatcataaaaatagaatcatacaatgtaaactcttgggtgtctgacttcttttactcaacattctgtgagacattcagattttgtgactaaggcttttacagaaaacattttacaagtatttctcaatatcttttctccaatatagaaattaaaaaagagctttacaccttgtatcatttagtaacaagttaaaattttactttcttggggtgatgtgtgtcagtcatagttagcatttttataagaaatgtatactattttaaaaaaattgaatagtttaccattcaaataatcttccttcctccttttctttttgagaaggaaaatgtctttacaaggtaagtggcaaggcagagaggggtgagggagttatgtcaatagcagcagagaatggcattagtgatcagaaaaatatttttcatgagttcctacagatcatgtttacatggaaccatgtcatcacaagtcaaagccagttccgctctgcaaagatata

SEQ ID NO: 113116 - DNA, 405 bp, Homo sapiens
tgaccttaggatcaaatattctctaatctagcatctgattttgctcccctccatcctgccctctctctctctcactttattactaatctagcttgctcctccctatgaaagaaaactttacctaacctttgagatgctttcaaatattatacttggtgctttcctcctatcactacaatacttcattcaaataaggtcactacttacctaaatctggattttacttgagggtgtctagaaacagccccagggcaataacaactacaaccacagaaggggcaacagatcccacccccaaccgcatctgcctatggatcccctaggaaacctgcagcatagtctcgccaggaagaactaaatgggccttcggtgacctccccttacaggctcaagattggccttagc

SEQ ID NO: 113117 - DNA, 383 bp, Homo sapiens
actggtggtgaggaggagcccagggtccaggtcttcggatgatctcctgaccatgggcccagtgtgtagagatgagtccagggaggctagagccaagggacagcattccctccttcccacagggcttggggatagctctggcctgggcagggcttcggggagcttgtgggtagactcactggatttcaccacgtgtctgtttggcctcccagggtttgggctgggctcttccagtttcagcacttggcatttttagcacttggctttctgccttttccgctgggagctccccaagtttgcccaagtagggcctgcttccctgagagctgagctcaggggtccttgggaagaatcactagagttaggggtggccttcttgggcc

SEQ ID NO: 113118 - DNA, 316 bp, Homo sapiens
agtatgtgtactctgaaaaattatatgtaaatcagattttttaaaacctgaattatatctttttttgctatttaaagggatcatattataaaagtaaatccttttgtaaattatttcttcatcttttaaaaaataatatagactttgttgtatctcttcttaaaccatatttgattttgtaaatgaagagctaaacttccttttcacctgtaccattgattgtatatttaaaaaggctggaaaccaaaaaaaacagcctttctagttagtgtggccctgcagctgtttataattgtccttgctcaaaaggttattt

SEQ ID NO: 113119 - DNA, 722 bp, Homo sapiens
cattgttaagtgacacatgactgtattttgttctgtaactttcttggccaaatgtactattttgagtcaaattccatagacctttttgtttcctcttgaagtataatgaaccttttccttttaacttataaaaagatgagtgtattcaagattgattgttcagaaactttgtctgggcagatttgactttttattttaaattagctttgtcacaaggatattatcaccttatgtcttgaaaccctgacccagccctcattgcactctcccaatttccctgctggattttgtttgattatttgttgttttgctgcctcaccgatttacacatatcaccctgtagtttcaatatgtaaattcaaaacttacctgttttgctatctaggataatatttagataatcagttatgttgatgagaaagagatagatttgttctgagatacttaaatttattttaactgttctctccccagatatacagatactcctcaacttacaatggagttccttcctgttaaaggtatcttaagttgaaaatatcataagtcaaaaatggatttaaaacacctaacctaccaaacatcacaatttagcgtagcttaccttatatgtgctcaacacttacattagccttcagttgggcaaaatcgcctaacataaaacctgttttataataaactattgaatatattatgtaattaattgaatactgtactgaaag

SEQ ID NO: 113120 - DNA, 1220 bp, Homo sapiens
cctcagcctcccgagtagctgagattataggcgcccaccaccaagcctggctaattttttctatttttagtagagccggggtttcaccgtgttagccaggctggtctcgaactcctgacctcaggtaatccacctgcctcgcctcccaaagtgctgggattacaggcgtgagccactgtgcccagctcttctagttcatttttaagtgttgagtccctgctgttttaagagatgttttggtgaaaatctacattcagagagaaacaggttaatcttccacattttttataaaatacataaaatatagtacttggcattttaagaaaagaatgccatgtattaaaaggtgctattttcaactatttattattttaaaacaggaatgcttatcaatactttcgaatttaagataaatgtcttcgttaaattttctaggcagttcaaagatggccatttgctggtgaattttccaaaatagataacagataaaatgattatgtaagaacttggcacaacagatcattttgcctttagtcgttcaagaaatgatactaaactcaaagtcattcacttgaaacaactgagaagaccattcttaggtgtttagatccttgcttttagaaacattcttagttatatttgtgttttcaaaagttattgagtagatagatattttttcatgaatttttaaacattagacttagctgaattgattaaaattaggtgattatgaaaaaaatattgccctgctcgagggcatctggagccctacagttaccattactaaagtctgtgagtatgtctattttgaaaagtgtcataaaaatatctagtccataaatcattataggttcagtaatacatcattttgaactgattctatcttctgtgaaattctagagatatgttatctttaggtagcatgagtaagattcaggtatgctgtgaattttgttaacgtttatgttttccattaatggatagtcaggaatcttttgaactgcgtctatgtatttaaatgatttggaaagatagcatctctcagtttaaacttagcatctcattttggcaagataaattattttagctgtctggccttttctttgtcttcttagagttatttctgaaatgtgcatagccagtcataaaataacttgtgtaaatagcctaatgtaatttatttctaataaatacgtagcttaatgaaatgtatttctagt

SEQ ID NO: 113121 - DNA, 367 bp, Homo sapiens
gtagtaggcaatcttgggtcctagagctaaactgtcagagctcatgccccagacttgtcatttactagatgtgcaaccatagacaagttactccacgtctctgtgcctctgtcacctcatcagtgaaatggaaataataatacaacctactttctcatattgatttgagaacggtgctagataatgcatatatagcactttattcaggcatgtcaaaagtactgtaattatgattcagcatcactgaataaaataatgatatggtttggctgggttcccacccaaatctcatcttgaattgtagctcccacaatcaccatatgttgtgggagggactattctcatgacagtgactaagtctcacaat

SEQ ID NO: 113122 - DNA, 786 bp, Homo sapiens
agcatgaatcgcttttgccatatataatatcatgtagtacctgaaaaaaaaaaatgatgccaaagactagagatttggtcgaggacattggtttttctggctctttttgcctccggaactcttcttcagtttatatcagatgtggaagggaagcctaatctataaaacaaagatgggggtttgagtccccggggtttcccctcaccactgtgctaaccctaaatcagctttcaccacttacttgaaaaacccagggcccagagaaaccaaggtgtgagagtgtgaaaggtaagtgcaggacagatagacgataacgagggtgatataaataataatagcttacatttttttaggtcttcttgtgttccaagcactgtgctaaacacagactgtccccccaaaatatggcaaattgtgatgcctgaggcagagtatggtatggctgtctgggaactcttgaaaaggatattggattgcttgcaggcaagaaacaggccagattatcttggcagatctcgctctcactgtggttcttagcctttattacactgttggaatgggtttctcacaagtgatatcaagggaaaaaactagacggatatgtccagtgtatgtgtacgtgtgtgtgcacatgcacttaggacaactttgagccaggagtgtgagccggattagcacactgagttgtactttattctaacacatgcagctcagtagaagtctcatcttaagggacatatagaatgttgaggtagaaatagctcagaagaaagttgataaagtaat

SEQ ID NO: 113123 - DNA, 731 bp, Homo sapiens
gagaaatgttagtgcttactgtctgatgtacattaatgacaaactaccctacttcaatgcagaggcagccccaactgaatcagatcaaatgtcagaagtggaagccctatctgtggaactcaagcattacattcaggaggataactggcggtttgagcaggaagtagaggagtgggaagaagagcagtcttgcaaaatccctcaaatggagtcctccaccaactcctcatcacaggactactctacatcacaagagccttcagtagcctcttctcatggggttcgctgcttgtcgtctgagcatgctgtgattgtaaaggagcaaactgcccaggctattgcaaacacagcccgtgcctatgagaagagcggtgtagaagcggcactgagtgaggcattccatgaagaatactccaggctctatcagcttgccaaagagacccccacctctcacagtgatcctcgacttcagcatgtccttgtctactttttccaaaatgaagcacccaaaagggtagtagaacgaacccttctggaacagtttgcagataaaaatcttagctatgatgaaagatcaatcagcattatgaaggtggctcaagcgaaactgaaggaaattggtccagatgacatgaatatggaagagtacaagaagtggcatgaagattatagtttgttccgaaaagtgtctgtgtatctcctaacaggcctagaactctatcaaaaaggaa

SEQ ID NO: 113124 - DNA, 168 bp, Homo sapiens
ggagagggaacaggattaagaatgggtttaaggagcaagactgagactctgattcagcgagaaacaaccataggggcagatcccttcatctgtcctgggaatgtcctcccaagactggagtcctcagctcagaacaaagggaaaggggtgcagcttccaccctggcag

SEQ ID NO: 113125 - DNA, 783 bp, Homo sapiens
gtgcggtgcggtgcatatgggtaggaagggaaaaggagaagagaacagcaagtatatcccaagaggtgccttgtggtcaggcctcctggaaagggtatggtgtgccgagtcaatgcagaaggaaggacagacaggctgcccaagccctgcgcagctcatgtagcgccaggtggcctggagtggcttaaaggtacagcctccgcagccctccagagcagctggatcaggaagcccagtgtcggtggggtctttacttaagcagacagaatagttatcctcaacacgtgacatgtgtctagcccccactgtgtctgctcgctccagccaagtgcttgcaaagtaattttattccaggtttgggtccttttatgaatgagtaaacgagcttggcaaggttgaatgacctgcccacgggcacttagccaagacgcaagccccatctgcttgcttccacaccgtctggaagcctcactggctgggttcaaaaagggaggggccaggcacagtggctcacgcctgtaatcccggcactttgggaggccgaggcaggcagatcacctgaggtcaggattttgaaaccagcctggccaacgtggtgaaacgctatctctactaaaaatacaagaattaggtgggcgtggtggcgtgcacctgtaatcccagctactcaggaggctgaggcaggagaatcacttgagcctgggagtgggaggttgcagtgagctgagattgcgtcactgtgcgcttgggtgacagaacaagactccgtctcaaaaaaaaaaa

SEQ ID NO: 113126 - DNA, 285 bp, Homo sapiens
actgcgtgtcctcttttgtgacctgttgcttttgcttaataccgtctttgaagttcatctctgtttttgttagtaactatagtttattcattttcattgttgtatttttttttttttttttttgaggcggagtcttctctgttgcccaggcttgagtgcagtggcgcaatcttggcttactgcaaccctcgcctcccgggttcaagcaattctcctgcctcagcctcctgagtagctgggattacaagcgcccacgtcgacgcccggctaatttttttgtatttt

SEQ ID NO: 113127 - DNA, 160 bp, Homo sapiens
caacccagccaaggctgtcctgaattagcaaccctgacacgtgtgagcaagtccaacggacaccggaagatccacctagtcaagcccaaccaagactggcagagctgccaagctgaccacttaaggcgcatgaggaataaacactcgttgctgcatgcca

SEQ ID NO: 113128 - DNA, 243 bp, Homo sapiens
ttattgtgagtttttatcatgaaattgtgttgaatattttcaaatgcttttcctgcatcaatcgaaatgaccatgtgatttttgtcctttgttctgtcaatttggtgtacagtattacattaattagtttctgtgtgtcaaaccatccttgcattgcaagcataaatccctcttgctcatgatgagtggtccttttaatgtgctgctgaattcagtttggtaggttttttttttttttttttt

SEQ ID NO: 113129 - DNA, 509 bp, Homo sapiens
agctttggtaaatttattctgattttcaacatctgtagcagttcttaaaaaaattataaaattctttcatgactgtaaattttaatttttacctaagtaaaatatgcatgtgcttatttttgttttctagttatatgaaaaggtgatatgtttattttacttgtaccaggaggcatttatggtgactaggattcagataggatgatttgtttattttggctcaagtgttgacaagctggttgcatgccacattagcatccgtgcactgctaagcctcccagatgatggcaggtgctcactgggaacaaggctggtggactccttggcccttggaacagaagggcatacgtaagttcatgtggattcattttagaagtcatatagggacgacaggaaaagcactgtaccaagaaactgagaagatgtgagagttcagttacaggccaatggagtttgggggtgtggacaacagtgtgaaagccaaaaggagttgagtcatgccttctgaa

SEQ ID NO: 113130 - DNA, 309 bp, Homo sapiens
caacagtcctagccagctgttgctgaagggcccaacaccaaatcccagctgaagaacagcttctcatcttttgagacacagcacagggtgatgggcatggagctcttccacactccccacagtctgacttagctctctccgttgtgccctcctggcaccctgctcgtattttattgtggcacctatatcgctggatctcactcactggtttgcactcctgtatcccctttgagggaacaaatcccatgcctctgcaatcccaggatctgatactgagatagacactaaacagatatttaaaaatttttg

SEQ ID NO: 113131 - DNA, 359 bp, Homo sapiens
agagcatagggctttaagatgaatttgcagggttacaggattacaactgcaatgtgggctaataatagtgccccctgcattaagctgcagagattgagcgagtaagtgggaagctgagaaaatgcccccatggggtagacactcaataagcatctgctgttattaccaggactcgtatggtcatgggtgacagcttcagaccacaggcagtccacctacaacctgtgcccctatccaccatgccatcctgcccacccacccacgccagctcccccaacccccaacacttttggggatcctaaacacttcctgggcctcagtaatgctccccaaagcctcaggctttcttcccgcaaaaa

SEQ ID NO: 113132 - DNA, 678 bp, Homo sapiens
cggtctgctggcatctgagggctcaccctagagaagagtggttgtactccagggcacatgggtctggtgaggacagagaagcatgggtggatgggtgggtggagatgagggtggatgttttctctgtaatcgtctccggccaggctggagccagaaccagactacccactttattagtccattgagaatatctaaagtcaggcttctcagcacagctgccatttcccctgcttgggaccagattttcctgttttctgagggcttccaagtaagttggaagttccttgggtttccacaactttgacttaatgaagaaacaaggtcaagaatcagaggaaaggtttttggatgggcctcagaggtctgaaatggttaggtgggagtctaaaggtataggagagaaactaaatcagttgtagccccagctgtttggagatgatgccagcagatgggattgagtaagcgaccacaggttgcagagggtggcagatgggaggcggatgtggaaatggggtcccagtcagaaatgaacaccactagaggagcaggaagaagggccaagcaagagcagtggttctcattgtggtttctggactagcggcggcagcagcacccacgatgtagatgtcaactcttaactccactcggaaacccactgaatcagaaactcaggtggtg

SEQ ID NO: 113133 - DNA, 433 bp, Homo sapiens
gagccacaaaaaggtttggctgagcatcccaggggtcagagacagggagtggcagaccaggcttctgatacaaatgggctcaaggtcagtccccacccccactccccagtgcccctcacccctagccaccccctccatcccctgggtgaccagagcagtactgtataaacctaaactgagtcctccccgctcccgcggtgaaaagccctgtgcagttttctacagccccgcctctagagtctgattcaaaaccagctgcaatttcttggccaatgcctgtcttctcatcagactgaactttgtgagggcaggcgacacacatgtcctggtcccggccaggcctggagcagcccagggttcggcctggaggagatgttcagtgacatgcagaggcccaggcctggcctttggtcccgggcacctgcagcagagg

SEQ ID NO: 113134 - DNA, 254 bp, Homo sapiens
cacatatgctcccatttgccttctgccatgattgtaaacttcctgaggcctccccagaagccaagcagatgttagtgctatgcttgtacagcccgcagaactttgagccaaaataaacctcttttccttataaatgacccagtctcaggtattcctttatagcaatttgcatggactaacacagtcctccaatgggtgcagtagtatcccattaagaacttgctctttacttgggtcaggggagtcacaacatg

SEQ ID NO: 113135 - DNA, 353 bp, Homo sapiens
cggcctcccaaagtgctgggattataggcgtgagccactgcgcctggccaggatattttgaaaagatgaaattacaggatttattagttcaagtttcaatattatttaatttttatagttttgattaaatgttattgtaactcctctttgtcaaagtgagtctactcttcaattaaatgtaagaaattgttatgtagttttacacagagtttattaatctagagcgagaggtttttatgttttaaataatattctaagttaaagacttcatggtgatacaactaaatttttaaatttaaagtttgtcaaaatattagtaataataattatgtttactgtagtatctcggattt

SEQ ID NO: 113136 - DNA, 152 bp, Homo sapiens
tgtcttttactgtgccatcgatctttgatattgcattgaaagacaatataccacagtagcaccttgaactcagtgaaaattgttcaggatcaaaataccaagtgttcttttagagggaaggaaaaagtacacacactctcctctcacaatga

SEQ ID NO: 113137 - DNA, 622 bp, Homo sapiens
gtgctcagaccagtatctggcacaaagaaagcaatcagaaaatatttttaaagtaataaataaatgcagtggatgaagaagaaaaactagccaaatataaataaacttgcatgacaatgtttgatataggttatgaggtgttttgaaaacatatttttatcatttcatgttttggtatcagtaatatttctctcatcattccggttcgctggttagcttttcaaatgctttgcatctttctgggtatatatgactctgccaacaatagaaaatggagaatggcaaatattcatctgttgttttttgtagtttttacataattacataaaatatttcattaccgttaagagcagattagcacagtggattttttaaataacgtttgtgtatgcctgtggctttcacaagttgtgaaaaacacatgatttttgcatgtcctttcctaaggatagaaaatagcagactaaaaaaataagtattttccaataagtaggaactgagcatcttccacttgagtaccactttgattaaactacactgttgcttttttctgggtgtgtgtgtgttcttatagaaaatgcatattttcctacatgaagtaattaattattcgaatctccca

SEQ ID NO: 113138 - DNA, 1074 bp, Homo sapiens
ggaagatgaaatgtataactgattacttttgtaagctaaatacatattaaagagagctttttattttagttaaagccatttgaaaaacagccaactccagataattcacaatgaaattgtagggccccatcggtgttttattaggtgttttggccatatcaatacatacttgtgagcatttctaattagagtcaaaatattactagattagaaaaagttgaatcagtcggtttgttatttattagtgattttggaaagtgatgtagagactggaagagcctgcagctgttgtccaaaatgaatcctgtggatttcagctctctttggtattcaattttgataaagaaagattgtttaaataactaagttattttttccgtttatcagagattagttccggagtgtcccaaatagaaaattttataaatactgaagtatcattaattacttgtttatcctcaaccagattcccaagatatttgagatggcttacaaaaatacatttgtttatgatgaaggtggaaaaacagagaggatagaccttagggtcctcatatgaataggtaccacaggaaatcgctgttgggaacagaaagcaaaagccagtgcatggcctaaagggtttgaggcaaattgtttcttcttgtttgacctgccccatcatcttcccagctcattgctttccttactccttcaccagtcagatatcatcaccatttaaaataactgctctcacctgcctcctgaagaagccatagaaagttcctgtggcaggcacattcagcttatttagtgaacaagaacatggacacaaaccatcatcgcactgtattgcaggagcatgtgctgctctgagcacgcctctgatctgtgaaactgaaaccatgaataaggaagcttttctttgcttcaacagatttcatttttaggaaaacatcagtatctagtgtatttgcctttgtcttctttgtgtcatatattttgcttgatctcccataagtttatggcagtatccaaaccaatcttaaagtatcttttaagtgaaagcaaaataaaattcagccttaaaattgt

SEQ ID NO: 113139 - DNA, 343 bp, Homo sapiens
cttgcggtatcaccttcatataacttcaaagaatttaaaatggcttaagcagaaagcgattcaacaatgagcgagatgagagatccctgtggccaggtcataaaggtccttaaataccatgttgctgaattctgattttatcctacagaaaatgtattcatttactctaccgagcctggtgctacatgtcaaagatagagcaataagtttgacagagctgcagtctggcagacctgctaaaatgtggtggatactgctgattctcacccaatatccatttctccttcttccttactaacagaccctgagtttatttcagctggcagtgtgtctagatcaaagg

SEQ ID NO: 113140 - DNA, 279 bp, Homo sapiens
gctgaccgcccacgggtgaggctggaagtcagttaacattttactgggtttgcttctgccctttgcatgtggaatgggtgtgccccaccgctgcccgtcccaccccaaccctgaacatcaggcttcccgtggggcccagccacggaacattccaggcctggagcggccatctcatttgcatgccgcaaggttgtggctcaggcggcttctcctgggggcctggtggtcccaggcagggggccgggctggggactgctccgccgaaccacgtcccagatc

SEQ ID NO: 113141 - DNA, 458 bp, Homo sapiens
atccccttctcacaattggaaaaataaaatacctatagtacttcaaaggaaggcaataattatattaaacgtttttgaaatatttaagaagacaggctgggcatggtagctcacacctataatcccagcactttgggaggccgaggcaggcagatcacttgaagtcaggagttcaagaccagcctggataacatgacgaaaccccatctctactaaaaatataaaaatcagctgggcgtggtggtgcatgcctgtaatcccagctatttgggaggctgaggcaggagaatcacttgaacctggaagccaaaatcgtgccactgcactctggcctgggtgacagagcgagactcccatctcaacaagaaaaaaaaaaacccaaaaaccaaaatgagtcccagaagcccctgcttggtgccaggctggaatgtgcaaggctgaggatccagtcattgagc

SEQ ID NO: 113142 - DNA, 407 bp, Homo sapiens
gtaaaggtagagacaaagattgacacagacagaaaaaaaaaaaaaaggttaagacataggcaacaccaaccaactacctactctgtgccagggactgtgccaggcactgtcacaaccatgcccagagactcagtattttagtgtccccattttcactggaaaaactgagaaggattaccccattacccataaaacagcgctggctttaaaagttctccagtttcacagagcctggagacaggcggccctgaagccccagccagctgcagggctaaatgccggctgcagagagagccactgggtttaagcatggatctgcaagctctcttattctgagctctgtcctggtgttcttaaggtgggaggtggggtatggcagaagagctccagggtgaccagcttgtatc

SEQ ID NO: 113143 - DNA, 341 bp, Homo sapiens
gcctggaggaggccctggggacatggaactggcctctgtctgcaattatgaaccttcggaaaggcgtgagatggagttacctgcaaaaggtccgcatggggacccccacgccctgtggactgcctgaataatcaagttcttaactcattccaatcaacaatttttgcctcttgatatcaaaacaagcccactggctaaggttctcatctggacgggttgtttctatgcaggatttccactgcccaggccccaagccaggaggcccatcatgctcggcaagcacaggctaggcagagtgtgtgaatccatccaggcacacctggccaaggccccatacccct

SEQ ID NO: 113144 - DNA, 1099 bp, Homo sapiens
tttctaattctgtgaagaatgtcaatggtagtttaatgggaataacactgaatctataaattactttgggcagtatggccattttcatgatattaattcttcctatccataagcatggaatgtttctccatttgtttgtgtcctctctgatttccttgagcagtggtttgtagttctccttgaagaggcccttcacctcccttgttagctgtattcctaggtattttattctctttgtagcaattgtgaatgggagttaatcatgtttggctctctggttgtctattgttgttcaggtgtgcagtacagacacagagatataggaatctctgtatataggaatgcttatgatttttgcacattaattttgtatcctgagactttgctgtagttgcttcttggcttaagaagctttggggctgagacgatagggttttctagacatgggatcatattatctgcaaatagagacagcttgatttccttgagatgaattttcaaaacccgttttaatgtagcacctgcttggtgcagaagatacttaagagggcctgcttggctaatggtagtatcagggtatgatgcctggggaaggttgggaagcagtttcccagaagaattcagtggatggatggtatggattcctttggtgaactgccgaggtccagggtctggcctttgggcttaggtcctcatatacctaattttatcatcatacaaaaaatagatttatctcttggggtagactcttaataactaagcccgtgaaactcagtaataaaaacagaatgagaattaatgagtaatgtaaccatcacatggaccagactgaacaaatgcaattttcttattacagctaagcttcataggaagttaataagattgcttggtgaagacaaaatcagaagggtagtcagatttaacaaaagattaatgagaacaagctggtatacctgatatatctgctgcccataaggatgattttgccaataacataatcaaagtcctttcagttctaatccctggcatctgtgacagctatcaatttattgcctcagtttcaaatctacgcttcattgccctgtctgtgatactggac

SEQ ID NO: 113145 - DNA, 610 bp, Homo sapiens
tttctaattctgtgaagaatgtcaatggtagtttaatgggaataacactgaatctataaattactttgggcagtatggccattttcatgatattaattcttcctatccataagcatggaatgtttctccatttgtttgtgtcctctctgatttccttgagcagtggtttgtagttctccttgaagaggcccttcacctcccttgttagctgtattcctaggtattttattctctttgtagcaattgtgaatgggagttaatcatgtttggctctctggttgtctattgttgttcaggtgtgcagtacagacacagagatataggaatctctgtatataggaatgcttatgatttttgcacattaattttgtatcctgagactttgctgtagttgcttcttggcttaagaagctttggggctgagacgatagggttttctagacatgggatcatattatctgcaaatagagacagcttgatttccttgagatgaattttcaaaacccgttttaatgtagcacctgcttggtgttgatgctgtggggaaaaccaccctgtctctctcagtctctcagtctctctgcctctgtttccggtctctctgtctctg

SEQ ID NO: 113146 - DNA, 122 bp, Homo sapiens
aaagcaagtctgttagcaacgcattctctgtctttttttcatctgggaatttctcaatttcaccttcagttcggaaggatagttttgctggatattgaattcttggtttacagttttttttt

SEQ ID NO: 113147 - DNA, 689 bp, Homo sapiens
aaccattcaggcttcggttggaatcctaaagtgctatgtcttagaaataaatcccaactttgaaatatctcactcaccgaatacattaatgtgatctgtgactcatgtttcttgccacctgcaggacagagatgttactcatcccttaagtttgctagctgcaaacagagccctgggacatgtcctaggcagagagtagtcagggctttgtattcttgagacatcagtaagaatgtgtagggacactcggggcctcggaggaggattacctctcccagtaacaaatgaccccaaaacttattggcataaaataaccactatttttaatgctcatgattccgagaatcaggaattcagtcagggtatatatcaagtttggcttgcttgtgctctacagtgtcttggtctttgattggaatggttcagacagcttaaaaatggctgggatggtgacactggagccttatgtccagggccttggtccatctcatgtcatcttccagggctggaacctccaagatggcttctgcactcttaggtgtggtgccaacatttttctctctccataaatggcagtctcagggaagtcttagggtagttggactaattacatggcagctactttctcccagagcaagcatttcaagaaagaggaagtgtgaggactcatagtgtctgaagatctgggc

SEQ ID NO: 113148 - DNA, 302 bp, Homo sapiens
cttatccaaggcagggagctgagcacagccttgagtgccaggcaaaggggttggggaatggagagtccttcccatgaacacttgttagctggactttagaatgaggactcagtttctgtgatgagggcaaggagagcaacaaatttgtgttaggtaggctctgtctgtgtgcccagcctctgagcccccagtggctgtgagcagataggactgtggtagtttagcccagagatggcagatggattccacaaataaagagtctctctccgtgatgagtgctgaaggccgggcgtgggtggggg

SEQ ID NO: 113149 - DNA, 396 bp, Homo sapiens
gcataaatgctgtttttatttatttttatttttttggagacacggtctgactccatcacccaggcgcgatctcagctcactgcaacctctacctcctgggttcaagcgattctcctgcctcagcctactgagtagctgggattacaggcgcccgccaccacgacctgctaatttttgtatttttagtagagatggggtttcgccatgttggccaggctggtctcgaactcctgacctcgtgatccacccacctcggcctcccaaggtgctgggattacaggcgtgagccaccgcacccagaagcataaatacccttaacccgaggtgcagcctctactaacacccagagtccccacccgaagccacagactcccaacgcagctgagtaaggtccgg

SEQ ID NO: 113150 - DNA, 377 bp, Homo sapiens
tgggtgctgtctgaggccatctgtggaggtgagagattggagagatgagacaggtaagtatggttttgaagaaccttgtatgctatcttactgaaggagtttggacttcaataacaactttgaactttccccccccccgctctgaaatcttttcatttagtctcagtggctgtctgtgatgattattctgatggacaacatctcaccaaggctttgagcacttacaatgcatgaagtgctgttgcagatagaaaaaaaaaaaggaattagctttcaaggagcttaatgtccagttgggaaaataattcataagtatttggagagtttggaaatgtaaaataatagactgttccaatctattctacagcaatgcaaga

SEQ ID NO: 113151 - DNA, 817 bp, Homo sapiens
gcatctcagcaggaagtcctatgacccttatcaatctgcaccccttatgtgaagacgatgtgccttaggaactctgctgtccctggctgaacacagattcctttaacttcacatgtgactcatgtttacaaaggcatcgctggacagtccgtttggactgtgatgcaatgactgtgtgtaccatggaaaaaatgagaaagacatcctagcaggacgccagggcgcagttgaggaaatcctgtggtgtgtcatccgtgcaacactagaagcaccagatcactgggcaggctgaatagcatcccccgttcttaaaatgtcaccaggaattcggagcacagtgttctcctgggcccaggacaggtttccagtttctcggcaatgaaatggtaagccaagcaagaataggttttcagataactgtcttttcatggatgtgacttccagcagagggctgaccagttggaattctccatctcacttctctggccattctgttaccacctgtatcagggaggcatcattcctgatccctgggtcaccaaaaccatttttccttttcttttatccttatccaaaagctctcttctgttccatccctcagccacatgaatttccagtagtagtgagagttcttgacctccagctgtttccttcaagcaaggtatggattgttgtgccctggtcgtagagccttggcttgttaagaaacctgggctttgcacttggtcagcaaaatttggaggcagccaagatggaaaacaaaacaattctgaaaaaatattaggcatgcttcattacttttttccaaatgagaatg

SEQ ID NO: 113152 - DNA, 1813 bp, Homo sapiens
ctgtcttgctaaccttccttgtacactgtattctggagaaccttggctgttgaaagcataaaggaagaagaatgcagtttttgccttggggagcttacatcttatctggtataccagataaacacaatgaaggacaacacaacggtaaacaaggtatggctatcagaagaatcaagatgaatgagcgtccagaccattgaagggaaagaagtctggctgatgaaaatgagctctgcactgaatccaggccatgttttgaggtttccattgtttttggctcagcctagaaattggattattgctcttcataccactggaggcctgcagcccaacctctgacccaagctatcacagaaaacagggaaacacaaactgaaaattataacaatgctcttcaagctcaacagagagatagtcagacacgtaatcaccacggagagattacagttttctagtctacacttttgaagggaaagagactgcaaaaaaaaaaaaaaaaaaaaaaaaaagagagagagagagagcattaacctttatcagctttcagcatttcatgctttcaatttagaactggatgctattggctctggaaggccatagaagatgtgggaagagcatgcactgttgcttccattattttgtagtgagaaggatggctttggcgagactctaaacgctcttcctttaaaaatcttaacctctgcctcactgatcagaaggctttgtggagacccagcaaagcctgatactctgtgacagaaaccatgcccactattgatgctcatctctgtcatcttaatggcctctagcaagaaagtctttaggcaagctagtgcttgaagcttacctaaaatataaaggtatccctggtggggaaaaactatgaagttttgccaaaaaaaaaaaaaaaaaaattcactctcaaccaagatgccatctttaaaatttggtgagagattgttcttatagatgggtatgattcttagacattcatttcttcatcattctttgggaaaaataacaacatctaacatcaataatttgaagtctaaggatacagctttccccactgaagaggaaatggattcactttattgcaagaggaagcaactctaactttaaacccagcaataacacattccttattccctatttttagttttttctttggactttaccccattaaattagataacttaagggcaaggtctgaacagtgaagacaattcaaacatgtaatcaaaaggctgtctctctgatcgcaaaaagggtgtttagagtttaatattgacactatgtcgcttccacataaattaaaattttaaatcctgtttaaaattcagttgaatatatgttacctaacattgatcaaatatgagccagttggcaatactcacataactggcactggttttcatatcatgatgtctcatctaactgaatagctgttgttagtgttaagtcctgctggcaatatggtatccatttgacaaaatgatagcctatgtttgtgctgacccattttaccctaaggcttatactgcttctctagaacatttcttttggatgataaacacaaataaataaacactagattgaaaaaaggtgtggccatactggctaaaagatttctactcaagaaagaccgtgattttataactttaccttggaacagctgcttgagaaagaaacaaggcaagagaatccaaataaattattctattacattataaagtcattttgatattatagtttaaaatttttctaaaaggataaatagcatgaataagaaacaaatattctttacttattt

SEQ ID NO: 113153 - DNA, 1648 bp, Homo sapiens
ctgtcttgctaaccttccttgtacactgtattctggagaaccttggctgttgaaagcataaaggaagaagaatgcagtttttgccttggggagcttacatcttatctggtataccagataaacacaatgaaggacaacacaacggtaaacaaggtatggctatcagaagaatcaagatgaatgagcgtccagaccattgaagggaaagaagtctggctgatgaaaatgagctctgcactgaatccaggccatgttttgaggtttccattgtttttggctcagcctagaaattggattattgctcttcataccactggaggcctgcagcccaacctctgacccaagctatcacagaaaacagggaaacacaaactgaaaattataacaatgctcttcaagctcaacagagagatagtcagacacgtaatcaccacggagagattacagttttctagtctacacttttgaagggaaagagactgcaaaaaaaaaaaaaaaaaaaaaaaaaagagagagagagagagcattaacctttatcagctttcagcatttcatgctttcaatttagaactggatgctattggctctggaaggccatagaagatgtgggaagagcatgcactgttgcttccattattttgtagtgagaaggatggctttggcgagactctaaacgctcttcctttaaaaatcttaacctctgcctcactgatcagaaggctttgtggagacccagcaaagcctgatactctgtgacagaaaccatgcccactattgatgctcatctctgtcatcttaatggcctctagcaagaaagtctttaggcaagctagtgcttgaagcttacctaaaatataaaggtatccctggtggggaaaaactatgaagttttgccaaaaaaaaaaaaaaaaaaattcactctcaaccaagatgccatctttaaaatttggtgagagattgttcttatagatgggtatgattcttagacattcatttcttcatcattctttgggaaaaataacaacatctaacatcaataatttgaagtctaaggatacagctttccccactgaagaggaaatggattcactttattgcaagaggaagcaactctaactttaaacccagcaataacacattccttattccctatttttagttttttctttggactttaccccattaaattagataacttaagggcaaggtctgaacagtgaagacaattcaaacatgtaatcaaaaggctgtctctctgatcgcaaaaagggtgtttagagtttaatattgacactatgtcgcttccacataaattaaaattttaaatcctgtttaaaattcagttgaatatatgttacctaacattgatcaaatatgagccagttggcaatactcacataactggcactggttttcatatcatgatgtctcatctaactgaatagctgttgttagtgttaagtcctgctggcaatatggtatccatttgacaaaatgatagcctatgtttgtgctgacccattttaccctaaggcttatactgcttctctagaacatttcttttggatgataaacacaaataaataaacactagatgcggcaggtgatcttttgtttgctcgggtttctgttaatatggacaaataaa

SEQ ID NO: 113154 - DNA, 533 bp, Homo sapiens
ttagggccctgcaggatgccagctgcattcccagtgcacccacacttccaatcactggctaccaagatagaggctcccactcagggcttcaagttgaataaataattcattagaatgactcaccaacctctgcacttacaattccagttttattgattggtacaaatcaggacaagctaaatgaaaagatgcacagggagaggtttggggagattcccaaatgtgaagcctcccagaacacggttatacgattaccaaccagggtggctgcactgagctacaatgtccagagtttttattggggtttgttacctaggcatgattgatgaaatcattgcttacacctttgtactcaattccaatacccactctctccccagaggtcaggctgatatcatgtggctcaaagtcctgaccctttattcacatggctggtcttgccatggttggccagcctgcatcctgaagctatggagtcccaccttgaagcacctggtcagcataaactccggtgtggccccagggacccacga

SEQ ID NO: 113155 - DNA, 357 bp, Homo sapiens
tggaaggaaataaaatacgagcagtagtattatctttgggttatgaaataatagttaagttttattttcttctttatgttaaacaaaaattcaacatgatcacataggaaacagatgacatattacttgaggccgtgagttttggactcagactgcctggttacaaaacctggtgctgctactttctaactctgttatttacacctgtttcctcatttatcataagaaatagtgcagacatttcattaaagtaatacaagtaattctgatgaagcaacatggaattctgaaatatcacatcatcaaaaatgtatatgatataatattaaataaagatggaaagttctaatggtagaa

SEQ ID NO: 113156 - DNA, 360 bp, Homo sapiens
tcttgacactgaattctagaacaggatctttggtatttgcccagaaatgtacatttgggtttactgtacccatgtgcattagtcagcttgggctgccatagcaaaacaccatacactgggtggttaaatcacagatatttacttctcacagttctggaggctggaagtccaagatgaagatgctgacgtctttggttcctggtgagggctctctttctggcttgcagagggctgccttctggctatgtcctgctatggctgagagacagagagagagcaagctctctggcatctctttttttttttttttttttagatgcagtctcactcttattgcccaggctggagtgcagtggcacg

SEQ ID NO: 113157 - DNA, 85 bp, Homo sapiens
aataagttttgagattttaatgagtcattcatattattgtcctttagctgtggtccttgtcaatgcagaaaaaggattccagatc

SEQ ID NO: 113158 - DNA, 183 bp, Homo sapiens
  misc_feature (180)..(180): n is a, c, g, or t
aacatagaaaccagtaagtatatgacaggtagtgatgagtactatagaaaaatatagagcagagtcaggggaaagggaagtgacagtgcagagtgggagctgataaggaaagaggggtggctggcctgggagtgggggttgtgatgtctccatcttccccatcagtatctgtgtcctcangat

SEQ ID NO: 113159 - DNA, 158 bp, Homo sapiens
actattttaatttttaaaaaattattttaagtcaaggtcctactctgtcactcaggctgaggtggaaggatcacctgagcctaggaggaagaggctgtggtgagctgtgactgtgccactgcacaatctgcctggatgacagagtgagatgcttatca

SEQ ID NO: 113160 - DNA, 568 bp, Homo sapiens
tatgtacacatgctatttgtcccacagaatttaaaagctgaatttttaaaattcagaatatgtttcgtgatggcacacatatccagttctagagttccctctgttgtcttctatccaggtggtctcactctttacattacttgcctagttcctgtatggacccttgagctcatggaagaagttctgagcatggcataggaagtcttgcataacctgacctgcctgcctttctgtctcatttcatgcttttaactcaaatttgctgatgccaaggctcatgtttatctactacaccgcactaattaatgttacttcttttcttccttgggcttatgaaatgtgagaagccaatgcaaataagacatggaacaacaaactcaaattacaaggtaggagtgtatgtggggtgggtgtgaatgaaagggactgggacacaggtgagtaaaagtagtactgtggaaatcccatccagatgggataatttattaccccatttatttcagtgtcagggttaaggcagtaaaacaattgatttttctaatccctgtgtatcattcatttttgtagc

SEQ ID NO: 113161 - DNA, 436 bp, Homo sapiens
atatcaatttgaagtggcagttccatccagttaaaaaataaaaagtatggacaaatcattacaaagtaaacctgaacaaaggaaaaaagaagaaaagaaagaggtaagaaaggaaagtgaaccctgacggatgaaaacaaccaatcctacgaagtttaaattcagaattataataggcaatacttagagttataaaatcaaatctaaaagagctggggtctttcagagtctagcattattaaaggatgaatattttagcacctccgagcagtttgcagtcagtatctgccatgctggagtttcactcttagtttgtaaatacaagcgtcactttctacaaagttttccttgtgggagagcacctgaataaaaaccctgggttttctagataattttaaagcttcctggtctaacgaagctgctgaaggtctccagg

SEQ ID NO: 113162 - DNA, 270 bp, Homo sapiens
tgttatcaaaatctccttccttccttccttccttccttccttccttccttccttccttccctccctccctccctccctccctcccttcctcccttccttccatcgttccttccttttcttatttccttccttttttcagacagagtctcaccctttcacccaggctggaatgcagtggagttattatagctcactgcaggcttgaactcctggcctcaagccgtcagggtagttaggactacaggcatgtgccaccatgcctcgctattt

SEQ ID NO: 113163 - DNA, 311 bp, Homo sapiens
gtagggagatcacgtctctacaaaaaataaaaaattagctggatgtggtggcatgtgcctgtggtcccagctgcttgggaggctgaagtgggaggatcgcttgagcacaggaggttgaggctgtactccagcttgggtgacagaacaagaccctgtctttaaaaaaaaaaaaaatgaaaaagaaagtaagcatttaattcaggggttgggaatggaaaggaggtgagaggcccagcaaaacgaggcatacaaggccacagaaaagtaatgtttgagctgggatggggtaagtaggctctggagtccaccta

SEQ ID NO: 113164 - DNA, 296 bp, Homo sapiens
gcaatctgcccgtctcagcctcccaaagtactgggatttcaggtgtgagctactgcacctggcctcataattcactttatattttgcattaaaactagtttgtctatcaagacagatagaaagtgtccttgttctaaataggtttatttgttctccttattaccctcatctgaatctgtaggccactgacaaagagttttttcaggtctccaaatgactccatgttttcttgaaaccagtctttaaacagtactttttctttcttttctttccttttttttttttttttttttttt

SEQ ID NO: 113165 - DNA, 153 bp, Homo sapiens
tctcataatcctacttcattccttcattcacttatttttaaaagggtcatgtgtacaaatacatagttcagaaaaattttaaatataactataaaagtatacagcaaaatcccattcacagtcttattctccttccacagccaaacactttta

SEQ ID NO: 113166 - DNA, 103 bp, Homo sapiens
gtgctgagcaacgcccctggcttctgcccactccatgccaggagcacctgccagttgtgacagccacaagtgacccagacaccgttcagtgtcccctgggggc

SEQ ID NO: 113167 - DNA, 504 bp, Homo sapiens
acgaatcgagccggtaccgagcggaacaagcaagacagtaaaagatgagtcaggcggggagcgggggctcacgcctgtaatggcagcatttgggaggccgatgctgggaatacaggcgtgaaccaccgtgcccagccccgtgttgtgacatttctatacacctgtgaaatcaccacaatcaagacaatgatcaaatccactgccccagagattccccatgtcctcatgccttttgcaatccctccccgcttcctcttcctctccccaggcaaccactgatctgctttctgtcatcacagattagcttgtcttttctagtttatataaatggaatctggagtatgtactttatctggtttatgtactttatctggtttctttcactcaatataaattgagattcacgcatgctgttacatgcagcaggagctcattcctctttactgccatgtggtattccaccatatgaatgtattagtttgtttatccatttgcttgttgatg

SEQ ID NO: 113168 - DNA, 427 bp, Homo sapiens
agtgagccacaggctgaaactctagcaagctagaagcttaccacaatcctgctggaaactcaaagaacatctgacttgccttccatgaaaagtcaattctactctaggtctggacctcgctttcataacactgagcatgttaaacacgcttgtgttgccagcacccgactcctcacactaaggaaccaaaaccgacagcgtggtcaggccctggcccggctgctccatctttctgcttaaggaatgatgggggccaggcatggtgcctcatgcctgtaatcacagcattttgggaggccgaggaagtcagatcacttgagcttgggagtttgtgaccagcccgggcaacatggtgaaaccccatctctactaaaaatacaaaaatcagccgggtgtggttacatgggcctataatcccagctaccgg

SEQ ID NO: 113169 - DNA, 347 bp, Homo sapiens
attttttaaagggaaatgaacattttaacctttttcttttgagactcttaataaaatcagcttcataaatcagagttactaataattttatctattctgtacttcttaattttttcctaaattaccaaccaccatatctattttatttgaatattcttggtttgcttatgatatcctgtgaaattgcatttgaactttatagataaaactatttaagtctcccacaacggaattccatggaactttaagtactataaactttcaataaggcaaaagcctataaaattattgttacttgatccctctgtgtctccattttcttatccaatgtggtaggtaaattttaa

SEQ ID NO: 113170 - DNA, 326 bp, Homo sapiens
agccaactgaagagacacatagggtgaggtctagaagagtcccaaatacagaactttgtaccctctcccagtggaatcaaggcctgtcaccctcctaccatatcgaacagttcatcagctgggaaactccactggtgttcagtacaatgtttttattggggaatcattatgaaggcataattggttgaatctttgacctcatgattcaactcagtctccagccccctgtgcttccccacccaggtcagggtggctcagagccccaaccctctaatcacatggtggttggtcttttctggtgaccagccgctgtcctgagtcttctc

SEQ ID NO: 113171 - DNA, 396 bp, Homo sapiens
agcgaggccaggtgtaggtggcatctccagcccaggtggccatgcagctgccctgctgtcagggaggaggcgcgtctgcaagctgccttccttccggtgcagatgggctcccttgtggcctttaaagatcgaaaacaccactttgaaatgggattagatatgaatgggggggaaacaggcaaaagggaaaaaattctggcttcagaatagaagaaatggatcaaaaacacaaacagcttaacaaaataattgagaattggggctctgcagtcagaccattctgggttcaagttctaactctgccacttacttgccctgtgatctcagttgagcaacttttttttttttttttttttgagaaggagtctcgctctgttgccaggctggagtgcagtg

SEQ ID NO: 113172 - DNA, 158 bp, Homo sapiens
agacaagaaagcaggtttggacactgcagagaggctgacaaaacttgaagcccagtgggttcctattagttggaaaattcaactgattaaagaaaaaagctcattacaaaagtaaatttttggccaggcgcggtggctcacgcctgtaatcccagcac

SEQ ID NO: 113173 - DNA, 383 bp, Homo sapiens
taactgaatcagcatctgtgaggggcagagcctgtatgtctgccttctactttggatcatactacgatttgagaactgttggtgcagtataactcatctgtgttttctgttcaatctctagtagtcacaatttcacaataaattatttccctacagtgttctaagtagttgctgttttgtttgtgcatggatttttgccagaactcctcaccatcaccaccacaggcactctacatctattttttcattattcttcatagcatctttaagaggcagttaggtggcagattttgctatgtgacaagctgtggtgacagctctgtcttctcctctgctaagcagaatactatatgtgatttatcatttccccagggttgctcaga

SEQ ID NO: 113174 - DNA, 403 bp, Homo sapiens
agggtaatgtgaagtagtgtcacatggacagtaacggagaggtatctgctgctgccatttatataataaatctgaatttggaggcagagaaaggaggcagaaagtttggtaaggacgttattgcaacctgaataagccacttagggcctagatcagtgtttgggaatgtgggagaagacagccatagtcaagaagcgtgaagtagttaatgttgagttatttttaggtggtttttctgttctttttactccagacactgactttcgtaataagataaataatctggtgagtcgcatgctcatggtgtgctgaggcatttagccaagcagcttatgcatgtattatctcatttaattctgtcactatgaggtagagattatctttaaccattggttccaaatga

SEQ ID NO: 113175 - DNA, 826 bp, Homo sapiens
gaatattctccttggtaagtcagttagaaaaactcactcttttgaacaataatgctctgtttttctccagttggggaactgaaataatggagaaagtctctgctcttaatttctctaaccagatggaatttaaaaagcatgtggttcgagtcatcattgggaaaacatgacaaagattatggaacacacatgaattccaacttgctgggcacccacacattttccttcattctttgaagaattgctaaaatcagccatcaagaacagtaaacaccaatactttgccttgagaggaattaggggtttgagctaaaatatctaaaagacttgaaatctgtaattaaacatagacttggttttaagtttcctaatcctctctttatcatcaacattctgcaataaattctttctaaacttccccacctcagtttactagtttagctctctgatgcaataatctccacaaacaatcgtttttgctcagttacttttcattaatttatggtttttccagttttagtcttaactggaataaatgaacatatgactttaatttaacctatatttccttgcacttagaaacaaaagtgaataatattatgtatgcatgtatgtatgcatttatttattctcaatcccaaagacctcaccaatttgatgagggaggttaagcaaaatgaaacaaaaacattctcacccttttactgtacctaaactcaatagtccaacaaaataaaatgaagaaatgatattttagatagtattgtctttactgaaaagccagttgtagtcatattttgcagaaagagagtttaaaatatataaa

SEQ ID NO: 113176 - DNA, 2444 bp, Homo sapiens
tgggcatggtggcatgtgtctggaatccctgctactcaggaggctgaggcaagaggatcacttggaacttgggaggcagaggttgctgtgagctgagatcacaccactgtactccagcctgggcaacagagtgatactctatctcaaaaaaaaaagaaagaaagaaagaaaagaaaaagaagcttacaatcatggtggaaggcgaagaggaggagcaggcatatcacatggccaaaaagggagcaagagaaaggtgagaaagacactagactctttttaaaaccagctctcacatgagctaatggaataagaactcactcattaccacaaggacagaacccagccattcatgagggacctgccaccatgacccaaaaacctcctacttgacccaacctccaacactggggataacatttcaacatgagatttgaagaggacaaatactcaaactatatcacttgttgtccatttttaatctttctctaacataccctaacttcttcttgaaaatgcttaattttctctgttttgagatgtaaatttgctatcctgtttttcttaaaacttggtaagatcttcagccatgaaggacagacaaactgtaacctttccatttacaaagctgcatttgaattcaactgtccttttaaactaaggagttttactggtctcgtggctaaaattttaaagatgtaggccaggtgcagtggctcatgcctgtaatcctatcacttttggagaccaaggcggggatggatcacctgaggtcaggagttcaagaccagcctggccaacatgatgaaactccatctctactaaaaatacaaaaattagtcaggcatggtggcacacacctgtaatcccagctactcgggaggctgaggcaagagaatggcttgaacccgggcgacggaagttgcagtgaggcgagattgcaccattgcactccagcctgggcaataagagtgaaactctgtctcaaaaaaagaaaaaatgatataaagtatttatttgtgtttatattttatggatacgtgtctatgtttatagattgcctgtatggtaccaacttgacataaataaattagtactcataaattaagtaaataagcccaaacgcttttcaagttcacagggcattagtaatctgtggtaaatgaagatagtttaaaatttggggtaaaataaaatagaaacattttctgaatttaatttagatatttttctgggtctatttgttagacaggtttacactatctctgctatttttttaaggacctaaaactgaatggacatagaaaattgaggaaagaaataaaaccgtaacaattataagaggttataaaaggttcatggaacctttttatgttttttcttgtgcagtcaaaaccaattgcaggctggatgcagtagctcacacttgtaatcccagcactttgggaggctgagatgggcagatcacttgagctcaggagtttgagaccatcctgggcaacatagtgaaactctctcactaccaaagtacaaaaggaattagctgggcatgatggtacacacttgtagtcccagctacttgggggactgagatgggaaaattgcttgagcccgggagtcaaaggttgcagtaagccaagattgcaccactacactccagcctgggtgacaaagtgagaccctgtctcaaaaaaaaacaaaaaaaggaaaagaaaacaattgcaattggattgatctgtttataaggctttattaaaattagctttagcatttataatacactggcacaaagttagaatttggatttctcttttgaacaagatttttgtatacattaataagaaatagtaaaagatttttgtttaccttttgagtaaactgcaaaaaatattagtaataagaggagagaatttccctaatgctgtttttattatgtcttttgattgtttggaaaactgaatctcccctctgtcaaagagtaaaatttttgctttttgaaatttttgaattatcagtttggctaaatgaataactattatcttacagtgacctgtaatcttattttgatcaagtgttttaaacctttgatatttgacaaactttccaaaatcaaatgtaaaattctaacttaaatgttttcgacctcaagctaacttttgggcattaaagcccttggaagtccaaatagggcccctggaagtccaaaagaaacatattaggctaatttggtatattaaaatcatacaggaagctgatcaaataaaaaatgttgtttaattttctttgagttgtatttgtataaatctgttattaatatgcatcccaaaattgtatcatattgctaaaatgttgatagatcttgttatatgttattggtaataattgttatcctgttaaattattgtataccacagaaataatgaaatttctttgtcaattgcatcagt

SEQ ID NO: 113177 - DNA, 2742 bp, Homo sapiens
tgggcatggtggcatgtgtctggaatccctgctactcaggaggctgaggcaagaggatcacttggaacttgggaggcagaggttgctgtgagctgagatcacaccactgtactccagcctgggcaacagagtgatactctatctcaaaaaaaaaagaaagaaagaaagaaaagaaaaagaagcttacaatcatggtggaaggcgaagaggaggagcaggcatatcacatggccaaaaagggagcaagagaaaggtgagaaagacactagactctttttaaaaccagctctcacatgagctaatggaataagaactcactcattaccacaaggacagaacccagccattcatgagggacctgccaccatgacccaaaaacctcctacttgacccaacctccaacactggggataacatttcaacatgagatttgaagaggacaaatactcaaactatatcacttgttgtccatttttaatctttctctaacataccctaacttcttcttgaaaatgcttaattttctctgttttgagatgtaaatttgctatcctgtttttcttaaaacttggtaagatcttcagccatgaaggacagacaaactgtaacctttccatttacaaagctgcatttgaattcaactgtccttttaaactaaggagttttactggtctcgtggctaaaattttaaagatgtaggccaggtgcagtggctcatgcctgtaatcctatcacttttggagaccaaggcggggatggatcacctgaggtcaggagttcaagaccagcctggccaacatgatgaaactccatctctactaaaaatacaaaaattagtcaggcatggtggcacacacctgtaatcccagctactcgggaggctgaggcaagagaatggcttgaacccgggcgacggaagttgcagtgaggcgagattgcaccattgcactccagcctgggcaataagagtgaaactctgtctcaaaaaaagaaaaaatgatataaagtatttatttgtgtttatattttatggatacgtgtctatgtttatagattgcctgtatggtaccaacttgacataaataaattagtactcataaattaagtaaataagcccaaacgcttttcaagttcacagggcattagtaatctgtggtaaatgaagatagtttaaaatttggggtaaaataaaatagaaacattttctgaatttaatttagatatttttctgggtctatttgttagacaggtttacactatctctgctatttttttaaggacctaaaactgaatggacatagaaaattgaggaaagaaataaaaccgtaacaattataagaggttataaaaggttcatggaacctttttatgttttttcttgtgcagtcaaaaccaattgcaggctggatgcagtagctcacacttgtaatcccagcactttgggaggctgagatgggcagatcacttgagctcaggagtttgagaccatcctgggcaacatagtgaaactctctcactaccaaagtacaaaaggaattagctgggcatgatggtacacacttgtagtcccagctacttgggggactgagatgggaaaattgcttgagcccgggagtcaaaggttgcagtaagccaagattgcaccactacactccagcctgggtgacaaagtgagaccctgtctcaaaaaaaaacaaaaaaaggaaaagaaaacaattgcaattggattgatctgtttataaggctttattaaaattagctttagcatttataatacactggcacaaagttagaatttggatttctcttttgaacaagatttttgtatacattaataagaaatagtaaaagatttttgtttaccttttgagtaaactgcaaaaaatattagtaataagaggagagaatttccctaatgctgtttttattatgtcttttgattgtttggaaaactgaatctcccctctgtcaaagagtaaaatttttgctttttgaaatttttgaattatcagtttggctaaatgaataactattatcttacagtgacctgtaatcttattttgatcaagtgttttaaacctttgatatttgacaaactttccaaaatcaaatgtaaaattctaacttaaatgttttcgacctcaagctaacttttgggcattaaagcccttggaagtccaaatagggcccctggaagtccaaaagaaacatattaggctaatttggtatattaaaatcatacaggaagctgatcaaataaaaaatgttgtttaattttctttgagttgtatttgtataaatctgttattaatatgcatcccaaaattgtatcatattgctaaaatgttgatagatcttgttatatgttattggtaataattgttatcctgttaaattattgtataccacagaaataatgaaatttctttgtcaattgcatcagtaatcatggctcttctaagtcttttgtcattcacagatgattattgttttacttggattcttttcaaaagtggtttgtaattggctacagcctaaaatctgcttgttcaaaaaaaaaaaaaaaaaatccatggaaagggccctgacagcacacacacttaaacacagttttctgataactttggaattcacaccgttggactagttaaaaacttctaaaataattttttaaaatctaataaattaatgaagattgctaatccaacatcaagcagaataagttaattacatggggctgaa

SEQ ID NO: 113178 - DNA, 106 bp, Homo sapiens
acacaggcagctgcagcactgaggatgaagaagtcctgacttggcctcaaagccagcattgacttcctagaagaggtaccagctaaatggtggtgagaaggctggg

SEQ ID NO: 113179 - DNA, 274 bp, Homo sapiens
tgactacaaatttgttggcttaagacaatagagatttatcgtcttacagttcaggagagaataaatccaggtgttacagcgctgtgttccttctgaaagcactggggaaaatcttttgcctcttttggcttccggtggctccagatgttccttggttcatggttgcatcactccaatctctgcccatggtcacactgtctcttcctcctctctcttctgtccctctgtctgttcttcctctatctctgtcttatatggatacatatgattacat

SEQ ID NO: 113180 - DNA, 294 bp, Homo sapiens
aaactctggaactttgttccttctcactttcctgctaacatccagttggctttctcagccaactgaatcaactcctggaaagtctctctggttgcttccattctaatccccaaagggccccaattcagccttcatcagcttgtctgattataactgcccttctctctctctctgtggttctttttcatgcctcatagtgccacctgtgttatctttacaaaacagacctgtcccggtaacctgatgaggaaattaagtatcatgtgtcttctagcttgtagacagaaagggaac

SEQ ID NO: 113181 - DNA, 253 bp, Homo sapiens
gcacacccaggagtgagagtgaggagcagctgagagagttggaaaagggagcccttatgtggccaccaagggcttccctgctagcagccacacggtggctatccagctcattatgcgagttctagttcttcaaacaagaggccacgggaggagcaacggccacccaccatcccggggatcctcattcatgatttgaaaccactctaagcaggttctggggtgttcggcagaagctggcaaccattcttgtggg

SEQ ID NO: 113182 - DNA, 455 bp, Homo sapiens
taggactgagtctcgctctgtcactctcaccgaggctggagtgcagtggcatgatcttggttcactacctccaaggttcatgcaatgctccttcctcagcctcctgcgtagctgggattagaggctcccaccaccatgtccagctaattattgtatttttagtagagatgaggtttcaccatgttgaccaggctggtctcaaactcctgacgtcaggtgatctgcccatcttggcctcccacagtgctgggattacaggcgtgagccacagtgcccggcctccactcctttctcttaattcccccggacactgcctaggttaagcactcatttcttattgggatgaccacaagaacttcccagactggtctctctgcttccagactgtctcactgcattttccttgaggttgactgtaggaagctctaaaggcagatctgatgcattactcctct

SEQ ID NO: 113183 - DNA, 1272 bp, Homo sapiens
gttagattgtgtgtgcctttagttaccttacctctgaatattaattctattttgactcgatcgtagcgttactcacgttcaaggtaaacacgttccacactggccccaagccaggcacactgtgttttactgattgatttgaagatgatagagagcctagggggatgagtctattggactcaaaggttacattttgtttttccatttaatttaataatcaacaaaacgacaaagtcagtttaatatctttcttctgctgagtcttcaggatgttagctagtctttcaaaagccattgctacaaaagtgcaaatttctcatttcctgtgggtctctagaaactctctcaatatttaaagccaaacaaatccatcttttctgagagacagaaactaaaaaattcagagttaattcactattaaaaacagcaaggccctgctatttcccaagaataaagaaatttaaaattctcattgtaagaagtatgaacttgaagctagaattggtttatttctggcagctacttacaatattaagaactttactttttaaatttgagacaatttcacaggaaagcaagaaattagtctattgtgaaatgtttttacaactaacttggaatatactgcaaatcactagtaagtagagacacatttaagataaaatgattaataaaacaattggtaattctgaataaggatctgaataaatccagatcacagactgttcctttaccaatatgtaaaagaatgtgcaaaattagtaaaaatatacccaaaaatttaccagcaacagagaagcaaagaatggagttcaaccttacactataaacatctaatagatatgtatgaaaatttaaaaactagaaaaggttgggcatggtggctcatgcttgtgatcccaggactttaggaggccaaggtgggaggattgtttgagcccaggagttcaagaccagcttgagcaatatagtgagaccctgtctctacaaaaacaaacaaacaaacaaacaaataaataaataaataaaattagctgggaatggtgatgcacacctggagtcctagctactcagaaggctgaggcaggacgatcacttgacctcagaagtctgaggttacagtgagctatgatcataccagtgcactccagtctgggtgacagaacaagaccctgtctccaaaaattaaataaataaaacaaaaaaaaagaatttaaaagttttatataaaggcatagctactatctcatctgcccagtgtagtcatgaata

SEQ ID NO: 113184 - DNA, 2303 bp, Homo sapiens
ggaggagatactgatctatgtagcgaataaatgccgttttctcttgcggaatggttattctccgaaggatattgctgtgcttttcaccaaagcaagtgaagtggaaaaatataaagacaggcttctaacagcaatgaggaagagaaaactgtctcagctccatgaggagtctgatctgttactacagatcggtgatgcgtcggatgttctaaccgatcacattgtgttggacagtgtctgtcgattttcaggcctggaaagaaatatcgtgtttggaatcaatccaggagtagccccaccggctggggcctacaatcttctgctctgtttggcttctagggcaaaaagacatctgtatattctgaaggcttctgtgtgacaggaaacccaagcctaagaaacaattaagtggttctcatctctaattaactgtgaaaccatttaatccaaacatgtaagcacacactcacttattaagtcacatacttttctaggtgctggggattgagaacgaatcgatgtaagattcctcctttagggcagagacagaccactgacaaatacacagatagacaaggaatttcccatggtaaaaagggatatcagtaattagaggaccgtgagactcagagatgtgtgtgtgtgtgtgtgtgtgtgtgtgtgtgtgtgcgcgcgcgcacgtgcacatgtgtgtaggtagatggagggggtgattattttgggtggtcagggaagtgctcagtgagggaagaacttgtcatgagaatctctgagcgtgccaggcagactcggatatttttataaatttttaacatggccacttgcagaagagcttgaatgggacgtgcagcgagaatgtgaaggatggagcaggtagctcatctggccttgtaggtgccgggaacgggcaagacatgttttgaaatgtaagatcacagactgttttttgcaagaccacattatattactttattattttctgctttttcttttaacgacattagtgtttttgagcactatattttaaaatgctttttgtgagccttttggttatgtggaatctgttccttagctctgattttttattcttatggagcgtcttaggttactacatgaaggtaagactgccacagtcccccagggaggcacactgtgttttactgattgatttgaagatgatagagagcctagggggatgagtctattggactcaaaggttacattttgtttttccatttaatttaataatcaacaaaacgacaaagtcagtttaatatctttcttctgctgagtcttcaggatgttagctagtctttcaaaagccattgctacaaaagtgcaaatttctcatttcctgtgggtctctagaaactctctcaatatttaaagccaaacaaatccatcttttctgagagacagaaactaaaaaattcagagttaattcactattaaaaacagcaaggccctgctatttcccaagaataaagaaatttaaaattctcattgtaagaagtatgaacttgaagctagaattggtttatttctggcagctacttacaatattaagaactttactttttaaatttgagacaatttcacaggaaagcaagaaattagtctattgtgaaatgtttttacaactaacttggaatatactgcaaatcactagtaagtagagacacatttaagataaaatgattaataaaacaattggtaattctgaataaggatctgaataaatccagatcacagactgttcctttaccaatatgtaaaagaatgtgcaaaattagtaaaaatatacccaaaaatttaccagcaacagagaagcaaagaatggagttcaaccttacactataaacatctaatagatatgtatgaaaatttaaaaactagaaaaggttgggcatggtggctcatgcttgtgatcccaggactttaggaggccaaggtgggaggattgtttgagcccaggagttcaagaccagcttgagcaatatagtgagaccctgtctctacaaaaacaaacaaacaaacaaacaaataaataaataaataaaattagctgggaatggtgatgcacacctggagtcctagctactcagaaggctgaggcaggacgatcacttgacctcagaagtctgaggttacagtgagctatgatcataccagtgcactccagtctgggtgacagaacaagaccctgtctccaaaaattaaataaataaaacaaaaaaaaagaatttaaaagttttatataaaggcatagctactatctcatctgcccagtgtagtcatgaata

SEQ ID NO: 113185 - DNA, 2249 bp, Homo sapiens
ggaggagatactgatctatgtagcgaataaatgccgttttctcttgcggaatggttattctccgaaggatattgctgtgcttttcaccaaagcaagtgaagtggaaaaatataaagacaggcttctaacagcaatgaggaagagaaaactgtctcagctccatgaggagtctgatctgttactacagatcggtgatgcgtcggatgttctaaccgatcacattgtgttggacagtgtctgtcgattttcaggcctggaaagaaatatcgtgtttggaatcaatccaggagtagccccaccggctggggcctacaatcttctgctctgtttggcttctagggcaaaaacaattaagtggttctcatctctaattaactgtgaaaccatttaatccaaacatgtaagcacacactcacttattaagtcacatacttttctaggtgctggggattgagaacgaatcgatgtaagattcctcctttagggcagagacagaccactgacaaatacacagatagacaaggaatttcccatggtaaaaagggatatcagtaattagaggaccgtgagactcagagatgtgtgtgtgtgtgtgtgtgtgtgtgtgtgtgtgtgcgcgcgcgcacgtgcacatgtgtgtaggtagatggagggggtgattattttgggtggtcagggaagtgctcagtgagggaagaacttgtcatgagaatctctgagcgtgccaggcagactcggatatttttataaatttttaacatggccacttgcagaagagcttgaatgggacgtgcagcgagaatgtgaaggatggagcaggtagctcatctggccttgtaggtgccgggaacgggcaagacatgttttgaaatgtaagatcacagactgttttttgcaagaccacattatattactttattattttctgctttttcttttaacgacattagtgtttttgagcactatattttaaaatgctttttgtgagccttttggttatgtggaatctgttccttagctctgattttttattcttatggagcgtcttaggttactacatgaaggtaagactgccacagtcccccagggaggcacactgtgttttactgattgatttgaagatgatagagagcctagggggatgagtctattggactcaaaggttacattttgtttttccatttaatttaataatcaacaaaacgacaaagtcagtttaatatctttcttctgctgagtcttcaggatgttagctagtctttcaaaagccattgctacaaaagtgcaaatttctcatttcctgtgggtctctagaaactctctcaatatttaaagccaaacaaatccatcttttctgagagacagaaactaaaaaattcagagttaattcactattaaaaacagcaaggccctgctatttcccaagaataaagaaatttaaaattctcattgtaagaagtatgaacttgaagctagaattggtttatttctggcagctacttacaatattaagaactttactttttaaatttgagacaatttcacaggaaagcaagaaattagtctattgtgaaatgtttttacaactaacttggaatatactgcaaatcactagtaagtagagacacatttaagataaaatgattaataaaacaattggtaattctgaataaggatctgaataaatccagatcacagactgttcctttaccaatatgtaaaagaatgtgcaaaattagtaaaaatatacccaaaaatttaccagcaacagagaagcaaagaatggagttcaaccttacactataaacatctaatagatatgtatgaaaatttaaaaactagaaaaggttgggcatggtggctcatgcttgtgatcccaggactttaggaggccaaggtgggaggattgtttgagcccaggagttcaagaccagcttgagcaatatagtgagaccctgtctctacaaaaacaaacaaacaaacaaacaaataaataaataaataaaattagctgggaatggtgatgcacacctggagtcctagctactcagaaggctgaggcaggacgatcacttgacctcagaagtctgaggttacagtgagctatgatcataccagtgcactccagtctgggtgacagaacaagaccctgtctccaaaaattaaataaataaaacaaaaaaaaagaatttaaaagttttatataaaggcatagctactatctcatctgcccagtgtagtcatgaata

SEQ ID NO: 113186 - DNA, 557 bp, Homo sapiens
cctcctgggttcaagcaattctcctgcctcagcctcccaagtagctataggtgcccacaaccacgcccggctaattttttgtatttttagtagaggcggggtttcaccatgttggccaggatggtcttgatctcttgacctcatggtctgcccgccgtggcctcccaaagtgcagggattacaggtgcgagccactgcacctggcctaccggtagatttttgaaaaataattttttagtcagaatccaaacacagttagacaatattgtgaaatgtgtggtactctgggattgtttctctctttccaccagattccgagtccctgagggaagagacttgcgtctctgaccccctttgaaccatagcaggggtttaagacccacgtgcctatgagtacctggcaggcgatctgcctcacaggctcttcttgtggtcactgaatacttgcctgagatgattttggagtgacctgaattatttcctcactgtttcagtgaagagagtttaaaatagactttaagcagaacaataatttcaagttgaaataaaaagggtta

SEQ ID NO: 113187 - DNA, 260 bp, Homo sapiens
atgaaattatacaccatgtactctttcgtacgtggctcctttcactcaatcttttgcttttggagttctatactgttatatggtactgtagtccatttattcttgcttttaaataggcttctatagtgtataaatatatcaaatttatttgtccattctattcttaataggcacttgggcaatttccagtttggagctattataaacagtgttgctatgaacatttctgtacaggtcttttgatgaacatatgtacacat

SEQ ID NO: 113188 - DNA, 319 bp, Homo sapiens
ctgtcggtggcaataccaagtctatttttgatgaagaatcaacatgagatttcaacagaagcaaaaaaggtaatctttatttgaaaagcccatcaactctttgttttatatccattttttggtcactttagaaatatttttgcagaatttttcgttgttaattttataacctccacaaaaatattgtagaagtgctgaggttagtccaggaagtattttatttcaaaaatgaaatgacagaatgccagggctcaatccccacctctctccatgttctcccaataaaaaatacaagaaagaatttttattaacttttaga

SEQ ID NO: 113189 - DNA, 173 bp, Homo sapiens
tatttagaagataagtgtaaaaagaaccagactattatagattgagaacttggaatgaataagcacaactgacacctgcttatacatgtcttctaaactggctcacgtagggctcctttgatttgtcatcataatttgttattgtagagctagaaaagttgtctaaccttttg

SEQ ID NO: 113190 - DNA, 579 bp, Homo sapiens
tgtcttggggacagttccccgcaaaggtcattcctagcttttgaggtcaatgttgggtcataaggtactgcattgtgcaaagaagtcagtctgctaactttatgcaaagatagaaactgcacggtattttttaaaattagtttttaaaataaatgccaagagtagatcttatatatatatatatgtatacatattttatatatatatatatttccatactcaaccacaacttcctctgtactcattgtttactacagtgggggacatcaagggttggaaggattataaagctttaaggctgggcgtggtggctcacgcctgtaatcccagcactttgggaggcgaggtgggcggatcacctgaggtcaggagttcaagaccagcctagccaacatagtgaaactctgtctctactaaaaaatacaaaaattagctgggcgtggtggcgggcgcctgtaatcccagatactcgggaggctaaggcaggagaatcacttgaacccgggaggtgaaggttgcagagagccaagatcacaccactgcactccagcctgggtgaccgagcgagactccgtctca

SEQ ID NO: 113191 - DNA, 996 bp, Homo sapiens
tttagtagagatggggtttcatcatgttggccaggctggtctcgaactcctgacctcaggtgatctacctgcctcggcctcccaaagtgcagggattacaggtgtgagtgagccaccgcggccggcctctatcattttctgactcagcagctccaccaaaattgacatcctagcaaacactgtgaaggaattaacctaagtgcttccagagcatctcatgtaacctctatggagtaagtcactttttctgtaacatgtggcttttgaccttgatgaagactttgacttctcatccctgtctacatggaggaagatgattcagtggtggggaaaatgaacctcggtaacatttccaatgtccttcaagagggaaacaagttcagtgttatcatcgtggcattcgttagtttttttttttttaaatcacttgtttagatacaactttatttttttatacctacatagcacatgactggggggataaagcatgtataagttgggagagggtaaagaatgtgtgactatgtatacagaaaatagactaaaatgtgcagcaaaatgatatatactgtaatctggtttttgaagtatctactattctggaatattgttaaacaactttttgcttttgaaaaaaaaaggtgccttgattcagttgcgtgacttagaacattcatcctattttattgtgatttttaatgtcttctgaccccaaactgtgtttttggttgcagtctggcggctgcaggcatagcgtcggttttgttccaataacagagaccaaagagttaatcagatatggttcagctgctacaattgtatgattcaaaggcaatttaatcaccccaaatttccatggcccccacagtcaagacctgccattcgttttctcttgcaggttggagtaaatttgcactttgaatcatgtgggtcatttggggaccttgttcttttctattttgctttattaataaaggaacttgtagaaaaaaaaaa

SEQ ID NO: 113192 - DNA, 1241 bp, Homo sapiens
tgtcttggggacagttccccgcaaaggtcattcctagcttttgaggtcaatgttgggtcataaggtactgcattgtgcaaagaagtcagtctgctaactttatgcaaagatagaaactgcacggtattttttaaaattagtttttaaaataaatgccaagagtagatcttatatatatatatatgtatacatattttatatatatatatatttccatactcaaccacaacttcctctgtactcattgtttactacagtgggggacatcaagggttggaaggattataaagctttaaggctgggcgtggtggctcacgcctgtaatcccaaagtgcagggattacaggtgtgagtgagccaccgcggccggcctctatcattttctgactcagcagctccaccaaaattgacatcctagcaaacactgtgaaggaattaacctaagtgcttccagagcatctcatgtaacctctatggagtaagtcactttttctgtaacatgtggcttttgaccttgatgaagactttgacttctcatccctgtctacatggaggaagatgattcagtggtggggaaaatgaacctcggtaacatttccaatgtccttcaagagggaaacaagttcagtgttatcatcgtggcattcgttagtttttttttttttaaatcacttgtttagatacaactttatttttttatacctacatagcacatgactggggggataaagcatgtataagttgggagagggtaaagaatgtgtgactatgtatacagaaaatagactaaaatgtgcagcaaaatgatatatactgtaatctggtttttgaagtatctactattctggaatattgttaaacaactttttgcttttgaaaaaaaaaggtgccttgattcagttgcgtgacttagaacattcatcctattttattgtgatttttaatgtcttctgaccccaaactgtgtttttggttgcagtctggcggctgcaggcatagcgtcggttttgttccaataacagagaccaaagagttaatcagatatggttcagctgctacaattgtatgattcaaaggcaatttaatcaccccaaatttccatggcccccacagtcaagacctgccattcgttttctcttgcaggttggagtaaatttgcactttgaatcatgtgggtcatttggggaccttgttcttttctattttgctttattaataaaggaacttgtagaaaaaaaaaa

SEQ ID NO: 113193 - DNA, 330 bp, Homo sapiens
ccatagcgttgtttgcaggaattgctttctgggaggatacaccagggtttggatccaggctgtgccccttgctagtgatgtggctttgggtagaggccctccgtgagtcttagtttccccctctgcaaaatgggagtgcagtactgcgtgcccagaaaggattgttgtgagggtcatgtatttggaaaggactggtgtgcggtcaggagtatagcttggtggtgtgctcccttcccccacttgagtgtgtcctggtgagcccttggctcttggtttccaggcttatcacctggcacctctgctcccagtcagcccagacaggtgcctaaa

SEQ ID NO: 113194 - DNA, 817 bp, Homo sapiens
aaaataaaatttgcatacatattaaaaatccaatccctggatttttatttatcctattataaggaaccaaattgctagttattaaattatggttacaaatattctcattttcaatcactcatgcaaacagctctagaattgataaaaaggcattaactctcagacataaaaacaaaattaaagttattaaatacaatagacatgaatgtgcagctcataatatacagagttggcacgtgaacaacataggcttgaactgtatgggtttacttatatttaaattttttccaataaatatactggaaaaaattctggagatcagcaacaatttcaaaaaacctcacagacaaaccatatagcctagacatattgaaaattttaagaaaaagttgggtttgttctgaatgcataaaatatatgtagatactagtagtctattttatcatttcctaccgtaaagtatacacaaaactattataaaaagttaagttttattaaaaacgtatatatactttcagactatacatggtaccatttgaagttgagagaaatatgaacaaacataaagacgcagtattaaatcacaactgcataaaattaactgtagcacatactatattactgtaacaattttgtagccacctcctcttgctattgaattcacagtgaattcaagtgctgtgagtatctgcttgaaaccctgggtgatgctaatcatctccatgtgagcagttccacaggcctgtaaattgtgtattgcagtaaaaagtgatctctcgcagtctcacatttttttattgtgttgagcacaatattg

SEQ ID NO: 113195 - DNA, 698 bp, Homo sapiens
gagcccgtggttgcccaggcgactgttaggtggcttacgcggcccggatgcagcagaaacaccagcgttgctgcgaccgcgttggcgatggcgcacgaaggctcggtgagcttcagttcagctggggatgcgccagagccagggtcggccgttaaggtcggtgtcgggaacagtgggctggctctgggccgcccagtgcccctacttgctcccgcccaccgcgcgggagtttagatgaccaaggaagccacgtcggtactcgggcagaaaacctacacctgcacggtgcccactcaaacgctttgttacactcaagccatgagggaaagggtcagtgggtggtgtagagcccgagaacaggaagtggattttgaaacagctaatgaatgtagtaagtctcttacatggtggtgcgtatttaaatggatgagcatttagagagggaagataacagaaaaaatctatttcgagaatttcaagaggaagaaatatattaaataattcagagactgcacttgaaagtcaaattgtttaagagccaatcaattttaaaataaagaaaacggggccggtctcaatggctcatgcctgtaatcccagcactttgagaggctgaggcgggaggattgcctgagctcaggagttcaagaccagccaggccaacatggcgagaccccgtctcgactaaaatacaaaaa

SEQ ID NO: 113196 - DNA, 308 bp, Homo sapiens
gtttgagcagaacatgacatttgtgttatttgtgcactgtcaggcttgagccagtgtgtgcacgtgtgtgtacatgtgctgccaagagggagagcccattaggatggcagctccactggggccaggatcctagtcgattttgtttgctgcagaatccccaacatctagaacagtgctggatgcctaataggcccttgggaagtatatcgtgtgggtgagtaaatgattgccaacgtgagcttgtgtactggcacgtgctgagcttggggtgcatgtgggtaaacacgcatgtgactcagcacccagtg

SEQ ID NO: 113197 - DNA, 167 bp, Homo sapiens
tgctgggattacaggtatgagccaccgcacctggccacattaacttttattctgaaacactttaaatttctttgtagcacactttatagattgctatgcttatttatttagggaaatacgttttttttaaaacctagccgcattttttttttttttttgagatggag

SEQ ID NO: 113198 - DNA, 504 bp, Homo sapiens
gcagccttcaaattagttaccctgtctctaggactgtctacagttcctttcttccacaatgcccccagaaaactaaaacacaaacccaaccatgccactcacctgtttcaaaccctccaggagcttccatgccctccaaataaagtccaactcctgaagcagggtgctttacatgccagtggttcctgctgattgccccagccatctttctcatccccagacctcctcccaactctcacaagctttcctcagctgtttgcatgcaccatgctctttctcacctgcaggtcttcagacatgccattccctttgtctagaatccatccctcattcaccctctctaccctgctggtccagtttaaacattacttcctctagatagcctttctagatgaccttctcccacccaaagcctctccccttctccagtctgggttaaatacactcatggcactttccccttaccacagtacttatcatgctttattttaacagttttaactg

SEQ ID NO: 113199 - DNA, 626 bp, Homo sapiens
gacagaagtagtcattaaaatcagaaccagaaaaggcaagttttacttgtttatgtgactgtatgtgtaacaaaattcaagcagttcatctaaaaacctcttagagacgatatatcaaagggagacaggagccaacttgaaagagctcccaatggctaaaacagaacaattcaagcaacaaaataagtagcatagcattgtattacaaccaagtcttaaatatccatgagtacttatataaggaaatgattaattgaataactacaatcaaatagaagagggcagtattccttatagaacaattccaaaagtgactcgtagatattctctctgttaagagttggagcttattctcttcccccactttgagtgggggctgaacttagtgacccccttctgagtaatagagtatagaaagaaagaaaaaagtcactgtacaatggagaagccccgcaaacactaccttggccagatgattgaggttaacatcagtaataaatcatgttaatggcatgcacttcctgatataaggcactaaaaagaacactaaccacaaccttatggggaaaacactggacaaatagaaactgaagaatattctataaaatatctaatcatagactcct

SEQ ID NO: 113200 - DNA, 827 bp, Homo sapiens
gtttctagaaccttgtgcgatagctccccactattgtaaaggggtgaaatattttacctaagtaaacatacccggtaagtgagttctaaatgtcagtatttgaatggaggttttctcagccttttctccctctgtcttctgagtataaatggagtgactgccctcctgagtctcctttcttatggcttgagcgatctttctacgatacagatcggatcctgtcattccccagcttgaaattctttctgattttcttttttcctttttttcaaatttaagtttaatttttattttttgtagagatacggtcttgctctgttgcccaggctggagtgtagtggcatgatcatagctcactgcagccccaaatacctggcctcaagtgatcctcctgccgcagcctcctgtgtagctgggattacaggtggcttggctaacccagcctgaaattcttaaaagtgctcctcctgctttcagaatcaagttcaaactccttcaccaaacatattaaaggcctctttatctggttcctgtccagctttgcagcctcatttcctcctgcttttccaaaggcactcactctgtgcttttgccattctgaactgtttcttacctctaaactaaacacacaattccctataatggtccctcagtgacccacagggaaacctgatccccttccctgataccatgcacacaccataggcaaagtccttaaaacttgcaccttagaattacctgaatatgatgcctagtcctcacagttactctctggttgggaatgttgtgcaaagaccacgattgcatgagctcacttctatgagatg

SEQ ID NO: 113201 - DNA, 279 bp, Homo sapiens
aaaaattgtggtgaagtatacataacataaaatttaccatttttaagtgtacagttgagtggcgtgaagcactttcacagtgttgtgcagccatcaccaccatccatctccagaacgttctcatcttcccaaactgaaactctgttcccattagatgccaactcccctcccccatccagtggcggcggccaccattcttaccattctttctccttttttttttttttttgagatagggtctcactgtcgcccaggctggagtgcagtggcacgatcttg

SEQ ID NO: 113202 - DNA, 338 bp, Homo sapiens
atcccactttcgctgttctaagccatcctgtttgtggtaatttgttacagaagccacaggaaaccaacacaacaggcaaacctagcagttgtactcgccaactccagagtggagcctctgttcccctggtacactcgccaactccagagtggggtctctgttcccctggtacactcgccaactccggagtggggcctctgtttccctcgtacactcgccaactccggagtggggcctctgtttccctcgtacactcgccaactccagagtggggcctctgttcccctggtacacttgccaactccagagtggggcctctattcccctcgtacactcgc

SEQ ID NO: 113203 - DNA, 156 bp, Homo sapiens
agcataaggtttctgagatccatccatgttgttgcgtggatttgtggcacatttccttctattgctgagtagatttcaattgtgctgtttgtttatccattctttttaaaatggacacttgtggcttgtttccagtatggatctattatgaataaa

SEQ ID NO: 113204 - DNA, 221 bp, Homo sapiens
agcagtttagtgttgactacatcactgtcattctgcagcagagctgttggaggtatctgaatactttattttttaaattgttgaaaaatagaaatgaagattcagtaatgcgccgttaagattggaaatctttaggtatcctgagttaatcttactcatttggagaatcattggtttttaagtttagttagcctcatattcattcatgaaggaaaaaaatt

SEQ ID NO: 113205 - DNA, 274 bp, Homo sapiens
aatttcaatgtcataacttaagaatctgttaaaaaaaaaaaaaaaaggccagtgagaagtctttggatgatgcctgcctcttaaaagtgactatacaacctggaaaaatggccagtactatttcctcaaatgttagtctcactaaagcaaacagttttaaaaaatgattttccttgtgctagaaaacctcacccataattatgatagttcttgaatatggcaatcttttattgaggaggagctctttaatatatactaacctcaaaaggttcaa

SEQ ID NO: 113206 - DNA, 493 bp, Homo sapiens
tcaattaagtcccaagctaaacatggccctttgtcttctgaagaatatagtaataatagtgtgtatggttatttatggagagctcaccataggccaaacattgagataagcactttatggagtcagctccttcagcactctcaattacctagttttggggtaagttatcactactctcaccattagatgaagaaattgagggtcttcaggtttaaataacttgcctgaggaagtagagctagcaaaggacagtcaaaatctcccagtcctgtcctgttctgaagctcacattcaaaacaagactgcaccacggcttcctccccaggttaaagctacgactacagcactgatgtcaaaacaactgagtgattcaatggaggaaaagccaatcagttccattagctgagatcatttcaaaacaaagatataactgtccttgattttccactttgttcctcacttttttggtgttatagagatccagtcaaaaaaa

SEQ ID NO: 113207 - DNA, 111 bp, Homo sapiens
aagctctgcccaaataacctgtggatggaaaagcgccacttgctactggagaggatgatgataatgaagttccagatcttgtggagaattttgatgaggcttccaagaatg

SEQ ID NO: 113208 - DNA, 312 bp, Homo sapiens
aaaaaatatttttacattttcatgtatcaccataagtacataatattttgtatgatttgtttacacacagaatatgtcgtcgtacacatcatctctaatttgcttaagaccaacctgtgttgattcataatgatctagtttcttcctttttacctgcaaaataggatgacagcatgtggccacaccacattccattttcccactcctctgttcgtggacggggcctagtgtctctgagtcatgtttactgaggcagcgctgagtgcatccttccggaacaggcaagcccgtttgcctgccaccttgttgact

SEQ ID NO: 113209 - DNA, 280 bp, Homo sapiens
ggagagagaaagggacacagagccaatgggaaaagagaaatgtctgtcagtcagtttggtctgccataacaaaaatcccataaacttggtggcttaaacaacaacagtttatttatttattatattaattttttttttgagacagagtcttgctctgttgcccaagctggagtgcagtggtgtaatctcagctcactgcaacctcctactcctgggttcaggcgattttcctgcctcagcctcccaagtagctgggactacaggtgcatgccaccacgcc

SEQ ID NO: 113210 - DNA, 750 bp, Homo sapiens
gagtcttatagaaaccaaaaggatagttagaacagaagacaggaaaatgggacagaacgctgccaagaccacaactgaaaaaacatgcgggtgcccctgtatgcatctgccgatgtccacgcactgaatatcaggggtggtacgtgccacgtaaccacgcgcactgcagacacctgccctcctcaccagggcgtgcagctggggagaaagcaccctgtggttggttcatccatcccatgttctccactcagaccatttgtgattgatttgtgaaatttctaatgctggcattaatgcatctttgctttgtgaaaaagcgaagtctactgaagatgtgcatcacagggagagccccttctcagacatgctcagaagaggtgggatggtcattttgctggattcggggaagagtttcggtggccaggtctgcagcgggacacggggtacagagctcagatgatagtgccatgaccagctccaacggcaggtggacaaggaggttccaaggggccaagtgactggcctggggagctcacctcagattcggatgtgggacttactgtccccagagccatggtccttaaccaaaagtctggcagcctccctgggggtgaagccacgtgtccttgggagccagtttcgaccctcagatcacagagtgttaaagttagaagccattttcaagcgggtattattttgcgtctggatttcctccgtagagaggcgctgggcctgagccaagcgggcact

SEQ ID NO: 113211 - DNA, 381 bp, Homo sapiens
tggtgcccatttacagggtgccagtcacagatggaggccgggccgagtggcggagggtccagccaggttcaagcccagcttcttgccccttttcctctttttttttgtttgagacagagtctctctctgtcacccaggctggagtgcagtggcgcgatctcggctcactgcaagctcctgcctcagcctcccaagtagctgggactacaggcgcccgtcaccacgcccggctaattttttgtatttttagtagagacggggtttcagcgtgttagccaggatggtctcgatctcctgacctcgtgatccatctgcctcggcctcccaaagtgcagggattacaggcgtgagccaccgcggccggccttttttttttttttt

SEQ ID NO: 113212 - DNA, 371 bp, Homo sapiens
aggaacttttgaggttgatgacaatgtttagaatcatgacttcagtggttgttacctgatacacttaaaagtggcgaattttagtgtataaaaattttatccccagctactcaggaggctgaggcaggaggattacttgagcccagaagttagagaccaggctggacagtatagtgagaccctgtctcaaaaaaaggaaaaaaatgaataaaggcaattttaaaaattacacacaggctgggcatggtggctgatgcctgtaatcccagcactttgggaggccgaggtgggtggatcacttgaggttaggagttcgagaccagcctggccaacatggcaaaaccccatctctattaaaaatacaaagaatt

SEQ ID NO: 113213 - DNA, 407 bp, Homo sapiens
gagctgagcaggctgtggggacatcccgggcggaggcttgctggaggccagggtggctggaacacagggagccaaggggcaagaggtctgggatgtggctggatgggcatgaagagccttctgggtacctagaggtgctgggaaggagtttggatttaatcttggctgtcctgtgacagggattcggaggccatgggggagggctgagcagggagacaggagacaggcaagaggcgctgtgagaagcgtgggctgagtgacctgctccttggtgagtgagaagtcctagaactgagcaccatggcatgcacctgtagttccagcaacttgggatgctgaggtaggaggatcacttgagcccaggaggttgaaactagcctgggcaacatagcaagacctcatctcaa

SEQ ID NO: 113214 - DNA, 266 bp, Homo sapiens
tggctgacagagcgagatcctgtcaagggagactacggtgtgtgagcctggccaagtcaggcaatcctttgggagagagggcttagggcttcctgggatcagagattctccctgctggcctcagaagcagcagccaccgtgatctccacaggtgcaagactacaacttctgccaccaaccacgtgagcatagaggagggaccgcccccagccttccataagacgctagccctgggcaaccccttgaatgcaggctcaagacagacc

SEQ ID NO: 113215 - DNA, 249 bp, Homo sapiens
cacaatgaacgctatgtgagctcattgacacagctcaactcagggtgcaccaaagcttgtgaactccttcagtgaaaaacctgaaagcatttcacaaacccttaagctagagactcagacctggcgctattgtcacagagtggaagcagagtgcctttgaaagggcttgtcaacaaagcttttatcagcattagcaaatcacaaagatgtgggtcactaggtaaccactatcgccccaagattttaggt

SEQ ID NO: 113216 - DNA, 203 bp, Homo sapiens
ctccccggcagtcatcatttgagcccctttcttactgttaaggctgcagcggctatcttcagagcctgtcaggctatgagtaacttgagctatgcaacgtgaaaccagaaagcactagtaaagtacttgtgagttctagaaatttgactttttttttttttttttttttttttttttttttttttttttttatattttttttt

SEQ ID NO: 113217 - DNA, 237 bp, Homo sapiens
ctgctggatttcttacctattatgtttccttaccaattcatctacaatccttgaattggcctttccattgtgggagacagtaatagaggacacacttctcaacagctgagtgaattcacattagctacctgtgctgatcaaactagttcttcacttttaaatatgaatggaaaataaagatttactagatatttgaggaaaagcaacagcataaagcatactcaccaagatgactag

SEQ ID NO: 113218 - DNA, 434 bp, Homo sapiens
ggtggaggaaggagagaccagaccaggctgcagcgacagagtagagcaataacacagcatgccccagcacacaatgacatatctcctacaaggtccaacatgttctgcaacacctgagcatagctcaacactctacagaatgcctttacagggacctaggacactctgtctactcccagcactctctgctatcttctgacatggatctgggacctggaatattgccccgacagttgttaacattccctgacatggccaaaacacatatgacaaaccctaaatgacacaacatgctctgccatggacctgagatggtctgatatgacttctgtgtatcccagtgaagggtcctagataacatttaaatatgatgtcactaatgtcctaaacatggcccgggtataaccaagcctattcttcggcataattcaaat

SEQ ID NO: 113219 - DNA, 416 bp, Homo sapiens
tagacagagtttcattcttgttgcccaggctggagtgcaatggcttgattttggctcgctgcaacttctgcctcccaggttcaagtgattctcctacctcagcctgctgagtagctgggattacaggtgcccgccaccacactcagctaattttttttgtatttttagtaaagacagggtttcaccatgttagccaggcttgtctcgaactcctgatgtcaggtgatgcactcactttagcctcccaaagtgctgggatgacaggtgtggccatcactaaatgaacacttaccctgtccagggaggtttattgaggcagaatgctgggcagctcagtcacaaaggaccacaagtttcgactatgacatcatgttcaaacaatttataaataaaatcacaaagatttcctgagaaga

SEQ ID NO: 113220 - DNA, 610 bp, Homo sapiens
cagtgaaaatacaatgagaaggcagctgtctgcaagccaggaagaacccttaccaagaattgaatctgctggcacctttaacttggacttgccagcctgcagaactgtgaaaaacaaatgtcttttgtgatcaagtgccaagatgacttactagaagcagctagtatgctccactctcgtgaaaaggaaatagactggccagtaaacactagcacttcaactggatcttccaagaggacatgttgggattcagcaaggaagcaacagaagccatggagaacaaaaacagcaagacacaacagccacccacccaggattgagtggagtcaggggaggatccttaccacaaagaaatagtgactgagagagagccccatggccccatacttctgtcatggacctttgtaatcataggcacagcctgctgccatccatgtaagatgtgacttgctcctacttacctttcaccatgattttgaggcctccccagccacgtggaactccatatcaagaaggacatgtttgctgccccttccaccataagtgtatgtttcctggagcctccccagccatgcagaactgtcagtcaattaaaactattttgattcta

SEQ ID NO: 113221 - DNA, 510 bp, Homo sapiens
cagtgaaaatacaatgagaaggcagctgtctgcaagccaggaagaacccttaccaagaattgaatctgctggcacctttaacttggacttgccagcctgcagaactgtgaaaaacaaatgtcttttgtgatcaagtgccaagatgacttactagaagcagctagtatgctccactctcgtgaaaaggaaatagactggccagtaaacactagcacttcaactggatcttccaagaggacatgttgggattcagcaaggaagcaacagaagccatggagaacaaaaacagcaagacacaacagccacccacccaggattgagtggagtcaggggaggatccttaccacaaagaaatagtgactgagagagagccccatggccccatacttctgtcatggacctttgtaatcataggcacaggtgatccaccctgagtccctccccctggggccttcagactaacaaggagagctgcatagaatctgggcagagctccagatcaggcacatg

SEQ ID NO: 113222 - DNA, 367 bp, Homo sapiens
catgttgaccctgatgcactgcaaggtctttgatacaagggagagattatattttacccagtattctaactatatccagaaaatatgtagagacatagtcaagaaatttttcgcaactaattatttaaagaaaagcatttttgcccttaaaaaggttaaatcttcataatccaatgaacaaggacagcctataaccagctgtccggttgtaggttttgtttgcgagttcaaccgtcacttggttatttatttctatttaagaattatgcatgcgtttagaaattgctactatcagatggtacagtaatgatattttcctgggccaaaccaatagattttcacaatatatagttaattcagagagaca

SEQ ID NO: 113223 - DNA, 382 bp, Homo sapiens
taaaatatacttccctgcctttaatacacttttaaaagaacatgagactaaacataatattttcttgaaatcaattatagcaaaatcaacttgatttactaagctgtggagaaacactgcagatagccccaaatcaaaactaatgcaagggtcaactagccaggagtggtgaactttttggttttgtttttaaatatctattttaaagcaatgttagatttatagaacattgcaaagctagtacagagttcccatatactcctccatccttgttactaacattttacatagtatggtacatttgtttcaataaaccaatgttgaagcgctgttattaaccaaagtccacacctgagatttccttagttttattcaatgttct

SEQ ID NO: 113224 - DNA, 300 bp, Homo sapiens
gagctctgcccactgtcaaatcagcagtggcattagattctcttacattctcttaggagcgtgaagcctatttttaacggcgcaggtgaggaatctgttttacatgctccttttgagaatctaatgcctgatgatctaaggtggaacagtttcatcctgaaaccatccttgacccattgaaaaattgtcttccgtgaaaccagtccctggtgctaaaaaggttggggactactgctgtagttaacatgagtgcaaatatttcctcaaaaatccatggtggtggctcacgcctgttatccc

SEQ ID NO: 113225 - DNA, 116 bp, Homo sapiens
agtcatggctcactgtagcctcgacatcctacctcaacttccgcagtagctgagactacaggcacgcaccaccactaactaacgcacctggctaacttttgaaaattttgtgtaga

SEQ ID NO: 113226 - DNA, 469 bp, Homo sapiens
atcacgccattgcactccagcttgggtgacgagagcaacactccatttcaaaaaagtgtacttgattttgaacaaactgtacataaagtgtacaatatgataaatattgccacgtttcaccaccacaatcatgataacatatccaccacccgccgaagtgtcctgtttcctcctgaccctccctcacaccatcccaggcagccattgatctctctgtcactataagtttgcattttctaaaatgttatataaatggaatcctacagtatgtgctcttttattggttggaggggctggcttctttcactcagatcaattactttgacattcatctgtgttgtcacatgtatgaatggttcattcctttgtgttgctgagtagtggtgtatggatataccacagttcatctgttgatggacacgagttatttctagtcgttcatcattacaaataaagctgctttgcacaa

SEQ ID NO: 113227 - DNA, 726 bp, Homo sapiens
gtttatcattaaattttttaatgtaattttagtgtattttagttttaaaatgtccagattttgatgtttaactttgcctttaatcaggtaagatttttttatgttattacttataaaagaattaggcttaataagtttatccagtattaaatgaatttaatatgtgtgtatatgactcttttaaaattatttcgtgaaatgtgaagttggatggttattagtttattagatgtgtcagtttttgaattagttcttatatttatgccaaatgatccaagggaaagatttttagtactattttagtttttcttgtctaaactatgttacacatgttaaagtagagaaaattctccatttgcaattttattgaatagttttttacataaggttttcatgttaagttgattttggtctgagatttcatcctaattaatactaatagttcaagaaaatatttattttttaatttgagacagggtcttgctctgccgcctaggctggagtgaagtggcgtgatcatagctcactgcagccttgagctcctggggccaagtgatcctcttgccttaggttcctgagtaggtaggaatacaggagcttgtcaccatgcctagttcttttaaaattttttgtagagacagggtctcactatattacccaggctggtctccaactcctcacctagttatcctcccaccctcgcctcccaaagtgctgagattacag

SEQ ID NO: 113228 - DNA, 599 bp, Homo sapiens
aacattttcccacaaagagagtgtgatggttaattttatgcatcaacttcactgggtcacagggtgcccaggcatttggtcgaacattcttctggatgtgctggtgaggatgtttctaggtgacaggaatatttgaatcagtagactgaggaaagcagatggcccctctatgtgactggccctcatccaatcaactgaagacttgaataggaccaaaagactaagagggaattcctcctgcctgtcggtctgagctgagacatcagtcttgttctgcctttggactaaaaagttggctcttcttgggtctcaaacctgcaggctttcagactggaactctgattggatcttctggtactcagaccttcagactcaaactagaactacaccattgactctcttaggtttctagcttgccagccacagatcctaggacttctcagcctctataattgtgtgagtcatttccttataagaaatctcttcccaaatagatagatacctcgatatctcaatatctagatagatagatagatagatagttagatagatagatagatagatagatagatagatagatagatagatagatagataga

SEQ ID NO: 113229 - DNA, 610 bp, Homo sapiens
tggcccgttaaggagtgggagaaggtgaggttggagtgttgggtggtaggacagtgaggaaagtcttcttggtttgaatcatgatatatgtattaggtttaatcaagatctttttcactttcgagtgtttttcttcattttcaatatagaaatatttgtgaattgtaaatgctgtatgtattcgcatcttggaaactttcagaaaaatctgaagatacaggacagtaaaagggcaagtaaatattttttcagtaaatatttctcagaacttactgtgtgcctagtgatgttttaggtgctggggcctgagtagtgaataagtcagaagatccttgttcacgtggaccttacattctgtgactgcagtagagaccacatctgacatttaagtaccgtagaaggagaaatgatatctttttgccattaaaagtaatggcaaaaactgcagttacttttgcaccaacctaatcattttttgagcaggaaaataaagtgacaagagattaatatgctgcattatttggaggaaatagaacccacaaatttgaaggccactttcagaaatctaggtttgaggtaaataagtgccttgctgagagtgtaagcagta

SEQ ID NO: 113230 - DNA, 723 bp, Homo sapiens
tggattgggactccaaagacctaggtttgagtcctgtctgtcctatcactagccattggacacagatgcttctggctcccatcccttcctggttgctctctgagaggtctggtacctggctggaactgggccacttaggtcaaggacccatggtaggttctgctcctcactgtcaggggcattagccttttgatactaattttcttttctgcaaagtaggcataatcatattacaaaaggatattgtgagaattaagtatgaattaatatactcaacaaatatttgtcaggcacctactccatgccagccacagttctgggccctggggatatcgcagcaaagataacagcaaagatgacatgtgcttgcagggtcctagcggaacatcaggcatatagcctgtgcttgggaggtagtcagagtcactggctttagacagacatttaaggccctcatgctgaggccctgtttcttcctctaagtctctgtgctttcgccatccctcttcctgctgctgcctggcgcaggcagcctcctgcaccttcccccatgcccaagagcagacatctcccctttctcactgggaggatactgctgcctcccctgagctcaggtgggcaaagtgatggcagcatcggtgtcttcgccatcagctccatccaagtattcagggaatttgtccttagatgtctcctgggacatttaaagcaattaagggatga

SEQ ID NO: 113231 - DNA, 544 bp, Homo sapiens
gaagggttttttaaaaatctttgggccactactcctaactcgtaacataaggagaccagactatatcatctcagaggtccttccagctccactattctgtctctggacctgataaattctcttaaaatatttcagaatttatcatcactgcttttttcattgatgtaaccataaatacaaaacaaaaatgctataaataaaaatagtttaaccaatttaaagtgattatagctaaaatcactatctaagaaggaaagttgatcatttctcttgttaatcacatcaaacccagtagtcccattgacaattacaaatttttcaaagattacttcccagcattctcacagtaggtgtaaagccaacatgctgctgtgaagccattatctgtgaagattttgatcttagcattctgagatatttactaaattaatgggaagttggttaaaattccctccttttcagattatatatgggacttctaaaatgaaacatgtcttttagggagaaaattatccctttaattttagcatattttaaaaatagg

SEQ ID NO: 113232 - DNA, 345 bp, Homo sapiens
gttagccaagatggtctcgatctcctgacctcatgatccacccacttcggcctcccaaagtgttgggattacaggcctgagccaacactcctggcctccttcttttttataaggatgtgtgcctcttcacatagagtgctgtgtaggacttgaacttctatctcatgaatgtctcatgttggcggaggtcatgcagcatgattctcattgcttttaagtgatggataattgagtgattaataattgatttcactgcattctgtgttttttgcaccttttaaaaaaaatcgcttaagctagggtttttgtttctgttttttaaatgctaccccaagtttggttgtg

SEQ ID NO: 113233 - DNA, 449 bp, Homo sapiens
caaaagatacctccccaccacaataaaaagcactgatttgtatcatttgccaatttgtatcaattgtatcggttcccaccaatgaacatggagttgggacaaaatgcatacaattggctcttgagagccagtgcaattgagacccaggacaccactggaatttacccagttactgaaaccagaaccctgggaaacatccttgattcttaaacctttcctacccctcgctatagacagacccacatcctcacacctctaccagttcctacttactcatacatggagagacccagatcctaacacctgtaccacagcctaccttctaagacactgacagactcagatcctcataatcctaatgggtcagatcctaccttctcagacaaggacagacccagatacccataccagggcaagatcctatctcctcagggtgggagcatctggtg

SEQ ID NO: 113234 - DNA, 633 bp, Homo sapiens
aaaagcctcagggtccaggcacaggcagggctatcacagaaagcccctagtagggtaacacccagcagatccatggggtcaggctcagggtcactgcagagtccccattggggcaatgctcaggggagctatagggttggggatgccgaaaagaacttccactagggcaaatatccagtaaagctgtgtgggcaggactacttccaagaccctggaccagcagagccaccagcatgtaatttcagcccaggagagctgcaggagtaccactgcaatgccatgaaagctgctgtgtgggctgtgcccagcaaagctagggggcaggactgttctgagctttgcggacccaacttccaccccagtatatccagaaagcagacatagagtcaaagatcattctcaagcctcaagatttaatgttctttgccttggtgagatttgtacttacttgccacctgtttccatttcttccttcctatttcccccttttgaaatgggaacatctattctatgcctgtcctaccgttgcattttggaagcaaaaacttgtttgatttcacagattcacaggtggaaagcaatttgtctcaggataaatcataccttgagtctcatccatatctgatttaaatg

SEQ ID NO: 113235 - DNA, 526 bp, Homo sapiens
aaaagaaaaaaagaataatcatacatcagtgcaaaaaaacacagcagaggtgaagaatattgttggtcatagccagagtatatcagtagtcattaaaaaaccaaaaaggtaaattgagacaaagaaagaaaaacaaaacttgaagctttagaactgcatgtcctttctctttcagaaaagggagaaaggggctggaatacaaggaagggagtctatgcgtgtcagaaatgctttggcctggccgggtgcagtggctcacgtctgtaatcccagcattttgggaggccgaggaaggccgatcacgaggtcaggagattgagaccatcctggctaacatggtgaaaccccatatctacttaaaaaaaaaaaaaaaaaattagcctgcgtggtggtgggcgcctgtagtcccagctactcgggaggctgagtcaggagaatggtgtgaacccaggaggcggagcttgcagtgagcggagatcatgccactgcactccagcctgggcgacagagcaagactctgtctcaa

SEQ ID NO: 113236 - DNA, 406 bp, Homo sapiens
ttggatggttactccactccacccgacggggtgggactcgggagaagagtacagaacataaaaggccctcttcctctctcaggaaaggacaccaagtcatctagtgcaagttcactttacacttcagatataatctcttggccaggagcggtggctcatgcccgtaatccctgtaatcccagcactttgggaggccgaggtggacagatcacgaggtcaagagatcgagaccatcccggccaacatagtgaaaccctgtctctactaaaaacacaaaaattagctgggtgtggtggcacgtgcctgtagtctcagctacttgggaggctgaggcaggagaatcgcttggacctgggaggcggaggttgcagtgagctgagatacgtgccactgcattgtagcctgg

SEQ ID NO: 113237 - DNA, 319 bp, Homo sapiens
gatgtggaaatattactgcatatacaccacatatgtgcagaatttaaaggttaaacatttctatctcctattaaaatgttatgtaattaaatgctgaaatttaaaaagctgatttttgtttaaaatacacatgttctaaatttagaaattctaaaataaaatgttactacctcattagtatttttcaatttaaattaattttttggtgctttttagcttttaggttcagggatacatgtttaagtttgttacatatgtgactttcaaactctaacttcaggaagtcattacttccagtaggttatgttctggtcattca

SEQ ID NO: 113238 - DNA, 465 bp, Homo sapiens
gctctctcctttcagtacagggctccagtgccctccacagaactccacacccagcccagcaagcccctccataatgggtgctgagagtggcaggcatggggctcttgttacatcagagccccaggaaacaggcggtcacagactattctgagtgggcagaggaggtccacctatggacacacgtttagagaagctgaggagttcatccctgaagacatccagcccgtgagtagtagaggtgggtttggagctaggagttgaacccagacctaaccgcagagaccacagtctcagctgtcaggttctactgcctgacgatcatacaacctgctgctgggttgatggtgctgaccctttaggtagcccttccaggccatgccaggcatcattgtgccttgtcacaatcattgagaccctgtatggtggctccgagacctccctgtcacatgggaaaaagtgctgatg

SEQ ID NO: 113239 - DNA, 614 bp, Homo sapiens
gagaagagttacgcagtattcagtgatggtctgtaagtatgtgtgtattagctatagtcatttagctgacatagttggaactagaactcaggtttctagattccttatattgtttttcctgaccaaataatacctacttttttctgggaaccttcgcataggaaagcactgaggattttttcctagacctgtggttcttaaaagtgtagtatccagacaggcagcatcagcatcacctgggaacttgctagaaatgcaaattattgggtccaaccctagacctgtggaatctaaggtggtgggacctttggtgatagggctagatgcatattgaagtttaggagccactgctgtagattgtaacttcaggcctcctcccagcgtcacggaatgctgtcctgatccctagcatttactcacatgctgtgcttagtgcttgaccatgtggtggcagattctgtgatgtgtaagacgtggttgccacccttagagattctggagtctagaagccaaggaggcattattctctgactctgataaagctttattgacttgagtcattttacctttccatttcttgttcctttgtaatggggaatcaaattatatatgtt

SEQ ID NO: 113240 - DNA, 676 bp, Homo sapiens
atcaggctgcactctggcccacatcctggctgctgtgtatcacgtggctctagacactgcacttttgcctcctcatcattgctgtagataggatttctgacagcagggtcattagacgaatttttttttttttttgagacggagtctcgctctgtcgcccaggctggagggcagtggcgcaatctctgctcactgcaagctccgcctcccgggttcacacaattctcctgcctcagcctcccgaatagctgggactacaggtgcctgcaaccatgcctggctaattttttttgtatttttagtagagacgcggtttcaccatgttagccaggatggtctcgatctcctgacctcgtgatcctcccgcctaggcctcccaaagtgctgggattacaggcgtgagccaccgcgcccggccccattagacaaatttgtatctgcacggttcctacagataaactctgggacattagaattataaggcttttgtttaaggatggtttcagatgtttttcagaccttgaattccagccaaatagctgacactaaccagtttgaagaccccagtgaggaatgggatcagcatgagaacactgcgtcttcatgcccctgtctccgccagcagtcagcatggccacactctggcccacaccaaaacacttaaaaaccctagccc

SEQ ID NO: 113241 - DNA, 563 bp, Homo sapiens
aaaaaaatccacaaaggtgcccactacatattatacataatagtaaaaatgggaacaaactcaatgcccctaaataaggaagctgataagtaaatctattaattcatattttcaacaaatatttataaattgctccatttctgagttctctgctatatcagctcaataaaatatcttgtagtcagtaaaatcatcaataataaaatatgtaacataagaagtgaaatgaaattcataaaaatacacttttgccatgattataatgatgccaaaattaaatatttttatttgcagtgtttgggaacatggacaaatcaaaattgctcatttattaagatggtgaattctagattattttcttctccactacttgttattcattattacattatttgaaatgaagaaaaatcttattaaacatgtaaaaacgccaggcatggttgctcacgcctgtaatcccagcactttcggaggccaaggcgggtggatcatctgaagtcaggagtttgagaccagcctggaagacgtggtgaaaccccgtctctactaaaaatacaaaaatt

SEQ ID NO: 113242 - DNA, 392 bp, Homo sapiens
actggaaaggcaaagtgaaatatcccatattcctgcaatgtttaggaaagacctattagagggagacctacctagtatatcaaacatgactggttttccattcaagataaatgtcagattttgatactgtatagggtaagaagttaactgctgaggagatggagaactttcatattttctatctgaatatagagagacacactcaaggaactgggaaaaccaaaccagttagttgtgaacttaaaattgcaactaggtctcaatccattttttttttttttcaagacagagtctcgctctgtcgcccagtctggagtgcagtggcacagtcttggctcactacaagctccacctcccaggttcacaccattcttctgcctcagcctcccaag

SEQ ID NO: 113243 - DNA, 299 bp, Homo sapiens
aattactgagtcatacccattctcccacaacagcatctcctgaagctgttctcttttgtccccaatgccactaccctcactcaggccaacatcaactctttgatgagccaccatgcagcttcgtgatcattttcctgttttaattcctgtgcctctttccagtacattcttcacatttcagccagagtgatttgagcaattatgtcaatctctctgaaccaggagcccccgtcccttaggataaagtcccaactccttagggtgacatttaagacccttcccccatgccaataagatgg

SEQ ID NO: 113244 - DNA, 248 bp, Homo sapiens
caaaagtatgtgtgccggggaatgactgagtccccctggaattttcaactcaagacttgtccacactgtgcagttaagttaattacagttcaggtttccctagcctgtcagttttccctggaggcctctgtctgagggtctcggctccagttacttgtgcttctctgcctttgcctgccggtcactccaatttcaggggccatgatagtttgccctgtggcttcactgttcttaactaagaattgatt

SEQ ID NO: 113245 - DNA, 439 bp, Homo sapiens
atcagaagttggcatttaagacactcctggttgctcaagtaaatgatttgattttagtttggaacgaggctgaccctgaaaggcacctggaagcccaggttaattttatggcccttctagttcccttctctttgcttatgccattctgtaatgtgagatgggtgatagtttaaagttagctctggatcaaaccatgctctttgggagcaaggccagaaagggacatttaggccaagcacctgcataattagcttactattggactgtgtgttttctcttctccagcagctacttttgctccagatgacacactacctcattcttaaggtgacgaagcctggctagggacagctgtatagttctctcaaaacctcactgtggtatcattcctcatcactaacctcttcctccaccttttaaagtagacctttatgtttag

SEQ ID NO: 113246 - DNA, 473 bp, Homo sapiens
aggtctcacttccttgctcgctgtctccacccgctcaacgcctcctgcatgcttcatcacatagccaccttctccatcaaacaagcttctgatctctctgacttcctgtctgccccatttcctctgcctccagcaggagaaagttctctgcttctgaaggttcatgtaattagattgggcccacctggttaatccaggttactctctctgtacagtcccttttgctgtgaaaagttacctgttcaccagcttcaggggttaacaggtggacatctttgggggccattttgcttatcagaagtgggtactagagtttcccattcaatccggagtcatggagtgaagcagagcacaggggagcaaatccagtcctagccaggtcagacaccgtctattttgcctggtctctgacccatcaggtaacaggcataggcttctgacttcaagttgcctggttcacaactggtatcttt

SEQ ID NO: 113247 - DNA, 120 bp, Homo sapiens
tgtgtgcacgccagtgtgtgtgtgtctaagtgtgaatgtgtgtgcctgagggtgtgtataagggtgagtgagtgtatgtgaatgtgtgtgacagtgtgtgggtatgtaggtgattgtggg

SEQ ID NO: 113248 - DNA, 199 bp, Homo sapiens
gaacaaaatgaaagaactagaacttttatgttcaatgaaggaagtctcctttgatgggaatgatcttgaaaacatggtcctatcactgagggagaagttcctacaagaagtgaattctcttattcagaaaccctcacacccactggctaaaacaaagacgttagtgaagagtttaatgaaccgagccgagctgttgctg

SEQ ID NO: 113249 - DNA, 380 bp, Homo sapiens
gagaaaattcttatgtggaaaaaaaatctctataggttaatttttgagataaatatctagtaaataccaaacggtaatcaaaagaaaaaaatttctcaacctccaagttgtaatccactttcttccctgctctgtcctctaaacccctagttggtttgtcatattttctctttcacactgctttcttctctggagtggtatagctaataataaatctgggaggggatttcagccttctaaaactagatccctacaaaaataacttatgctatcttacgtaaataacttatgaatatctataatttgtgagaaacaataagcaaatagttttaagttttacagttataaaattctacctacaaacttattcaaaaaaaaaa

SEQ ID NO: 113250 - DNA, 513 bp, Homo sapiens
aagtgctaaggatttttaaagctatttcttcagaaagaatcaaagtgaaaaccaccacaaagaccctactaaaataaaaataacagataacacttctccaagccataccatgatttcaagatactattaatcaaaatcaacatttctatgactcagtattctcaactataaatgacaaccttttacaaattatttctagccctaaaattctatgacttaattctgtgtcttttttagggtttcaatatgtgtaaaatactgttacatagaagtagacactgtaggaatgaattcaacatagactcagaagtataagatgcaggcctctgctctcagtaaatttccaaatgaagactaggaaatgagagaaataacttaagagtttagaaatcttagaagacaatgcaaagtataacagcttttatactcaaagctgcaacaatttcaaaacctgacatacaagtgtgctggcttggtctggaaagttaaatgtggcttattcttctatgctgt

SEQ ID NO: 113251 - DNA, 363 bp, Homo sapiens
tattattaatcaatttcactttctctgctgaaaacaagtcagggaagcccatagataaacttttacagtgtggtgaacataaacaacacaacacaggagacctggattatcagccaggtgctgtgtgacctcaacctctctgtttctcagctttctgttctttgaacaaagagttttcaactagatgttctcagatgtcaaatctacccttaacagttgtgtggtttgctatccaggcataaattctcttcatttttaagggcaatttcgcagtttctctaattgcataagtattgatgaaagcatgcaagtttttatcactttttatcatttgtggaggattgaaaaagaaaataaactccc

SEQ ID NO: 113252 - DNA, 132 bp, Homo sapiens
agcattccttctaaccaactcaagtgtgggccagacaatcccacctatggctatttcctcagggccaactgtatttttcctactgaatggcaacaacttttcttatgttaaagagtgactaaggcagtccta

SEQ ID NO: 113253 - DNA, 160 bp, Homo sapiens
cttaaataccaggtttttaaaatttagcttacttttaacatatatgtacctgatcattgtattcagagagcttctcataaatcttacggtataaaaagtaatacatttcttttcaaaatagaaataaattttataataaattaactttttgcataattct

SEQ ID NO: 113254 - DNA, 297 bp, Homo sapiens
gctttagtgtaggcagtgtgaagacctcacctgggtgtgccaccaatggaggctgcaggccccggctccagtgaaggctggtgctgctgctgccctgtccaggacggctctgcatcttcctcccagaagcccagactcccctgtgggctgcccacctggctgcagctcctgaatgtctggtaggcatcacacccttcatggatgcacctgcaaagaaactgcactgtgcttgcccgggggtcccccgtctgactggtgactgcaccatttgctcaaataaaatcctcagggtcacct

SEQ ID NO: 113255 - DNA, 328 bp, Homo sapiens
ggaataacggggagccccccctacacgcggcacacccgccccgccccccgagaacactcacctgggtgtgccaccaatggaggctgcaggccccggctccagtgaaggctggtgctgctgctgccctgtccaggacggctctgcatcttcctcccagaagcccagactcccctgtgggctgcccacctggctgcagctcctgaatgtctggtaggcatcacacccttcatggatgcacctgcaaagaaactgcactgtgcttgcccgggggtcccccgtctgactggtgactgcaccatttgctcaaataaaatcctcagggtcacct

SEQ ID NO: 113256 - DNA, 285 bp, Homo sapiens
cactgatcttcctcaggtgggtaggtttgtgagctagaggaggcttgggtcctgaatccactctcctatcacctttgggcagcctggataaagaggaaagaagtcttggctgctgggcagagccgggtttctctcccattcccgaggaggcctgagcagctggacacgcagagagcggaagatgggcagtgatgacaccaaatataagcataaaaagacgttttaaaactacagatcctgaaacccagcacggcaggcacctgcagcttccagtgctgtaacagg

SEQ ID NO: 113257 - DNA, 190 bp, Homo sapiens
caactgattctggactgggtgcattatgttaatgacaagtttaaggagggtgattaattaaagcaaccctccacaaacccgtctgatgtctggtggtgtggctcccactgatggccactgggacccctgtcacatttgcaataggccacatgtgaactattaatctggagggataggctcacaatactca

SEQ ID NO: 113258 - DNA, 599 bp, Homo sapiens
ggaaatagttacacagtaaaatatttgtaaataccacctcttggtgttttgaattctctcaaggatactcttttcccaaaaaatgatggcttcagccgctgattgacaagccttctcaaaatatttcctgaacacagctacattctttccatactttctttttgctctattttaatttttgctatctcagcagcttaacaaaagtttacctgcaaattgatcacaaaaatttaaaaattttaactattacactccaataagtgtaacaaatactctcttcacatccaggctcaacattaatgctctgtccaagtacattacatttacttcatctttagttttatctcactcactgtatttgtaggactcactcaaaagtcataaacaaatgtcaacataaataaaaataatgtgcagaatggtagagtatcccattattaaaatttctaggttgtttttgatataccaaagattaagactttagaagactgttggggaaaccacccccacaccacccagcaggtaccctgagtctagcggcgacaaagctgatagaaagagagagaccgaataagtgttgaaaaggcaggtccggggga

SEQ ID NO: 113259 - DNA, 326 bp, Homo sapiens
gatcatgcctttctagcacaaattgtatttgaagataatcaaatagttgatgagagaaagtcattaattatggagaaatcacaactaatacatgcaaaaggaatgaattagaaaatgagcgttataaaactcctgatgagacagcagagcaaaacagtcatcatcagtggtcgctaaatccatcaagtaacaggttgatggaaaactttctcatggacgaggctgacttgaatggaggaaatatggaaatgaatagagaaataaagcagtttgatacctttatcctattgagatgtgcctgagctggaaaatttgcaacaacaaaa

SEQ ID NO: 113260 - DNA, 647 bp, Homo sapiens
ccactgcctctatttgtgcctgcagttctaccattagtaaatacttctttccttttctttctgaagttctttaagaaattgagagctcatgggttgggtgcagtaagttcccagcattttgatgtgagcctgtttggcacactggagagagatcttaagctgaacaggcataggtaggagctaaggaactcagatagtctggggtcagtgtgctcattcctcacaatctgctcatttagtgaggcctccaaaagaataggggaggaggccaattagattcttcttcccctgaagtccttgggtaaagcctgtggttaaaagactttgtcctagtgaatgagcctagaaaattgacttagacaaagggaggtgcaggacagttctgaaagattctattctaccttacttacatcatagcccaaatcaattccagatggcattaatgtgaaaggcaaaaccttaaacattttagaagaaaatatagaagaataaccatatgacccagaggtaggaaatgatttattaaatgagactcataaagtacttgatgtaaaatagataaattcaaccacatcaaaattagaattaatttctgttctcaaaaggcacaattaaaaaaagatgaacctcaaattcctcaaattggg

SEQ ID NO: 113261 - DNA, 105 bp, Homo sapiens
ccagtcaagtgactctcacctgcagcctgtcttgaaaaatgcagtcacctccctccgaccttgaatctacatgaacgctttaaagtgtgttttcacctttcaatt

SEQ ID NO: 113262 - DNA, 345 bp, Homo sapiens
  misc_feature (276)..(276): n is a, c, g, or t
tccctcaaagaataatggaaattgggtgctggccacagctatcacttcttaagtgttcccttcccagaatgagtcatagcaagtgtgagtcccgtgaaaatctaattcttcctcaatattattgcttttatacacagaaaacaattcaacaggcccaagttagagattggacagataacacttgaccttgggatatgatgatggtctggatcgtgcagagggtaagactgagattgtcgaggtgagattactagaaggtttttagcaacatggggnaaagacaaagaaggagagagagaaagaaaagaaaggaataaagggggaaggaaggaaagaaaggaaagg

SEQ ID NO: 113263 - DNA, 346 bp, Homo sapiens
gagtacatttgggaggggatcccaggaagccccagctggggagtgggaagctgggcaggaaagggaaggcgcccttcagggagtgttaatgagcaggtggctgcctgggcactagagctcaaacccagtggaccttggagaaaccgtgtggaacactcctcactcgtgtcccaccaaagttgagaagccagctgggccatcgggctccagctccatttgctcctacaggtgttacctccccggcaccttggcctgactgtgtgtgggctgagcaggctcctgcagccagagaaagccttcaggccagcagacacagatgcttacggtacaaagatgaaggtgaagg

SEQ ID NO: 113264 - DNA, 281 bp, Homo sapiens
aggattacaggcgtgagccacggcgtctggcctcccctaggctctttacagaggctcctggcaggtctgaattcttcttaaactcaagctgggagcatcgctccatgtataacagtgataaagtggcaaatcaaaatgtctaacagtaagggattcgtgatatatcttatggtatatacatacagtggcgtaattggcagccattggtatttgaatactaaatgaaataggagaaaatgttcataataaatagttttgatttttttttttttttttttttt

SEQ ID NO: 113265 - DNA, 1003 bp, Homo sapiens
gagaaaggtatgttagaatctctcactgtgattgtggatttattattcttataattctgtcaaattttgctttatttattttgagaccatattgttagaagagtcaaacttttgaattagtatatctccctgtaggttgaatctattattatgatgaagtgatcatctttgacacagggtcttgctgtgttgcccaggctggggtgcagtggtgtgaccacggctcgctgcagcattgacctcctgggctcaggtgatcctcccacctcagcctccctaggagctgggactacaggcatgcatcaccatgctgggttaattcttttatgttttgtagagttctcactatgttgcccaggctggtctcaaactcccgggctcaagtgttcctcctgcctcagcctcccaaaggtttaggattgcaggcatgagccactaaaaaaatctcttgtcatgctttatgacccaaagtctaatttgtagatattaacaaggctacattagctttctgggattacaggagtcaagtcctgccttctaggcgaggatgcatgtcaagagccccagtggatgccccaaactgtggataagctccagtggatgcctgaaactgtggatagcatcaagccttatatatactaggtttaagtgacgagtgggtggacagtgtgtggagtatggagaagctggataaaggcacaattcacatctcaggcaggactaggcaggatgctgtgagatttcatctcaatacgcagaatggcatgtaatttaaaacttatgaattgttcatttctggaattttccatttattatttttggagtatggttgaccatgagtaactgaaactgtggaaagcaaaactgcagatacggaaggactccagtatttttcctgtgatgcgtctttctctgtaactttactttcaacctttctgtttcattatgttttagatatttcttcattttacattttttgtatttttttcatgacgcatcactc

SEQ ID NO: 113266 - DNA, 307 bp, Homo sapiens
caggggacaagtctgtacagcagccacacccctgccagagccaggagctcttccatttccacagcaggccaactctcacctggaagcacccacctaaccaaacccaatccctgccttcttttagtcacactgggaactgccacaggaaggctggggactccacatactccctcctcaccacaccccatgtgtgatcacccttaaacagaaaacatgcacctaagatcctacgatgcgctgcccacctcacaaaaaaccggtgcctctaggtaagaggcacctagctgacccatccctgttccctctc

SEQ ID NO: 113267 - DNA, 425 bp, Homo sapiens
gatgttcctggtccctggcagaggacaggcagagtgactgctggcagggccaggctggactgactgtgagccacaggttctaaggagatggctactaggttggtgactctcttacaggtgggccccagtcttaatactgggatctacagacattgggtacagagtttctagagtggtttctggccacagcctgtctggagcaaggaggcttcaaatggctcttgccaaagcttgaggagcagggatttctgctttaactagaagccatggtcctagacagttgagttgcagattggtgacaagggccaggtgctcaggtgtgagtgtttcctcacccagagcttttattcacctgccataggagcagatgtgatacacaagctttcccccaatgaatcctcatttgttctgccatcagaacaacc

SEQ ID NO: 113268 - DNA, 289 bp, Homo sapiens
cagcatggggcagggtcatggctgagggccagggaaggtctgggggagtgacagcttccagctttggcctggtctgccttgctgcaggacccaggatgcacacaggaactcctgggggtcttgtcaaaatgcaggctctggctcagctggtctgggggacccagcacctggggtggctgaggctctggtccttcccagaccatgctttgagatgtgaggagtgtgggaagggccttttgcacaagccaggagaggcttccccagagcaagacccccagtatccacatga

SEQ ID NO: 113269 - DNA, 375 bp, Homo sapiens
aacagaagacaaagcttgtccgagaagttctcgaaggctgtacttcaaagtgagagtgacctagaaataaacccccttggggactatgaggaaaattacctgtctgaaacgttggcacggagcagccctcagactggttttcagcctgactttaccctatctgggtagtccaaaagcccctaagtcaacctttagtttaaagtgatggaaactggaggttccctagtgcttcacagaagcaaacacgagccttttctgaggaagcccattttcaccacaagcttcagtgatatccacagataaagctccaagtgatatgagtagctcacagccaaaaatctctaaacacatgacacaagacaccatgagggagaa

SEQ ID NO: 113270 - DNA, 721 bp, Homo sapiens
  misc_feature (28)..(29): n is a, c, g, or t
  misc_feature (38)..(38): n is a, c, g, or t
agaacccaacaaactggtatctttcagnngatgctcanggaaacaagagaccagagcaggagtggttcatggggccattggagaagctggtgttacagccctgctcgctctttgtctctgcctcatcttcttcatagtgaagacccacaggaggaaagcagccaggacagcagtgggcaggaatgacacccaccctaccacagggtcagcctccccgaaacaccagaagaagtccaagttacatggccccactgaaacctcaagctgttcaggtgccgcccctactgtggagatggatgaggagctgcattatgcttccctcaactttcatgggatgaatccttccaaggacacctccaccgaatactcagaggtcaggacccagtgaggaacccacaagagcatcaggctcagctagaagatccacatcctctacaggtcggggaccaaaggctgattcttggagatttaacaccccacaggcaatgggtttatagacattatgtgagtttcctgctatattaacatcatcttagactttgcaagcagagagtcgtggaatcaaatctgtgctctttcatttgctaagtgtatgatgtcacacaagctccttaaccttccatgtctccattttcttctctgtgaagtaggtataagaagtcctatctcatagggatgctgtgagcattaaataaaggtacacatggaaaacaccaaaaat

SEQ ID NO: 113271 - DNA, 772 bp, Homo sapiens
ataatagatgccaaagatgatgtcagtgtagctgcccagaatttttccacattagtctctgtgagtattcaagagaattgcgaatcaatcaatacgtgctacatgtgttagataatgaataagtagagccttaattaattaacatttgatgaaagaatgaaagagtgaataaatgttctgtcagagtcaaatttacttcattgaccctctttgccttctcctggtccccctcctcactgccctgctctaacccccttctttcctctccataagaaacaccagaagaagtccaagttacatggccccactgaaacctcaagctgttcaggtgccgcccctactgtggagatggatgaggagctgcattatgcttccctcaactttcatgggatgaatccttccaaggacacctccaccgaatactcagaggtcaggacccagtgaggaacccacaagagcatcaggctcagctagaagatccacatcctctacaggtcggggaccaaaggctgattcttggagatttaacaccccacaggcaatgggtttatagacattatgtgagtttcctgctatattaacatcatcttagactttgcaagcagagagtcgtggaatcaaatctgtgctctttcatttgctaagtgtatgatgtcacacaagctccttaaccttccatgtctccattttcttctctgtgaagtaggtataagaagtcctatctcatagggatgctgtgagcattaaataaaggtacacatggaaaacacca

SEQ ID NO: 113272 - DNA, 297 bp, Homo sapiens
aggagcgagccatggtgcccgacctcctcttttttcttttgagcacccttagcttctggtacaaagatgttttaggcttatcctgaaactttgactgcttcaggcctggaatcagccatttctctgaggactcctggttttggttccactattctcctgccttaacctcctgagtagctgggactataggcccatcatgcccagctaattttttttgtatttttagtagcaacagcctggtctcgaactgctgagctcaggcagtctgcccaccttggcctcccaaagtgctaggag

SEQ ID NO: 113273 - DNA, 615 bp, Homo sapiens
cacccaccctcccacacaatccttaggaaatggcatgggctcttttacagtcctcagctggaaggatctttgccaggccatcccgttcattcccctgtttcacaggcatccaagtaagataaaaattccacctatttcaaaacagcttaaacagaaacttttctgtcatttatctccttcactccttcatgtctttgtcccattctggtttcttccaggaattccttccttgagtggaaatgaagtcttccttgagtttcccagggcagttcaagccctttccctattaaaaatgaagcacggtggctcacagggacagacagctcttcctgggctgacgtgagaccgctgtgcattcatgtgggcccctgcaccccccacttccaaaagtcattccacagcttctcatcgtttcttagtaaggccttcctttggaacaagtcatctttctgctgttccaaatgcaatttggagtaaaactcccctggggaccactgaggtctgtgaagaatgagtggcagtcgcagttccagggtgttgcagctggcccagaggatggtgctcgggaggcaccagttctctgccattccaaacccaaagccctgccttgctctg

SEQ ID NO: 113274 - DNA, 342 bp, Homo sapiens
caggtaatcagcacagtacctgatgtttttcagtcttcaccctcctcccattctccaccctctacattttcctttaaaaaaaagttttcctcccagcactttgggaggctgaggcgggcagatcacgaggtcaggagttcgagatcaccctgactaacatggtgaaaccctgtctctactaaaaatacaaaaattagccaggtgtggtggcggacgccttaatcccagctactcaggaggctgaggcaggagaatcgcttgaacccagggagcagaggttgcagtgagccgagatcgcgccattgcactccagcctgggcgacagagcaagactccctctca

SEQ ID NO: 113275 - DNA, 477 bp, Homo sapiens
aggacattttcctcccccaagctgcttgtcctcgcttttaaatagtagctcctccgtgaataaaggcagaaacatgtggttatagggaagaacaaaggaagataacatctctcacattataatggcaaacaatgatttgaaaatatcggtacaccagctttatccgtaaagcagtttatgtgagtgataactggtagataaatatggaaaagtagccgaacacacttgacacctctctgagcttgctttgtgatatgtgggcagctagaaaaagcagctaattattaggtggctcctttaacatttcctgatggggagcctgtgagcagaaaagagcgggtgcagccctggacagtggtcatgcacggttagcgcgaaacccactgagctgcagacacccgggtcagctcggaggagggaaggagtcgccgtcctgggccacagtctaggggggtggaccgtggtgccgtccctttg

SEQ ID NO: 113276 - DNA, 577 bp, Homo sapiens
gaagcccattcataggatcaacagattttgatggttcaaggactataaggagtgagagatagcaggtttctggcttaggcaactgagaaaatagtgtcacagctcagactacaaataactgatcacgagccctgctcaattcagcctggtcagattttcacaggggcaaccaaggaaaatgatgatgtaaagcccctggatttggtggccactagagaatttcgagagtaatctcagtgagaaatgtaggccaaattagaaggactttaagaagcaagagtgaggaattgaaaaaattaggtttagaccagttttatttttagacttttgatagaggaaggtggaatatgatggctgatggaaaaaacaaacaacaaaacaaaaacaaacaacaaaaacatttgttgggcgcggcccctgggccctgtcgaaaaaggcttttttaacacccattggtgttgtgggcgccgcggaggccccagttgggttctaggtgaacattgtggccaaatccggggttcccaaggaaaaaacccggggccagaacatagggctggggtttccccccattaaaaag

SEQ ID NO: 113277 - DNA, 233 bp, Homo sapiens
ggttgcacagtgcttggcacatggttaagggctcataagtattagctctgtattggctgggtctgatccatgcattttctccctaagaatatattcctgatcatttcctgatgatgttccttaaatgagtattttttttaattccctgtcaaagaaaatcctgttttgttttttttaaaaaaacatccttgagctcatcaagaaaacttttgtctgtgcccagcatgattcca

SEQ ID NO: 113278 - DNA, 515 bp, Homo sapiens
gaaaaacaacatgggtactttaaacctctcagaagcagattcttgggtagaatacttaaaagcttatgagaacatgacgatgctgctctaaaatcaatgaagccaaagcaagagaagttatacaaaataatattatttctgataacacatactgtttccccagaaatgattattacctccttttagcatatcatgagaatggcacgtttattttgagtttagagttctaagaagacatttggtatccaaataaaaagtatcgtatggctgggtgtggtggctcatgcctgtaattccagcactttgggaggccaaggcacgagatgacttgagcccaggagttcagcctaggcaacatggcaagaacctgtctcaacaataaaataaattaattagccaggcatggtggtgcgcgcctgtgggacatacagactacccacagtagatgggactataggcatgtgttagcaaacccggataagtgaaaagaatataaagtacagatggagtaacac

SEQ ID NO: 113279 - DNA, 782 bp, Homo sapiens
gtaacattataagtggttcaaatcaataattttttatttaattgggaacatatatcctaaaatatgatgtaataaaggaaaatcctactgtaacttcatggatgctaattctgcccaattattagccataaaaaaaatccaattttaagaaaatgttttccacaaattaggtaatttggattctgggttttttgaatatcagcagaaggagccctaagaagtatctcctgtgtcctagttctgcacacacactcctacccccaagtggccaacagaaatggaaactcctgcttcctttttcctctctggaataataggtactttctcaggattagctgctgctggagaagaagcaatagataattgaaaacatcttaatttacatttatattttggttgaatttgtgagccaaaagagcaattgacaaatatcttggccaatgaataattattgcattgaacttgcttttggaaatacttgttgaattttatactttcttttcccattaaggccaaaattttgaattctctaatgggtaagggagaacaaaggcaaagagaaatctaagattctttccccaggaaaacatattaacatcatagtagaatatgctcaggaaactctgacctaagcttttacctttagaggtttagagtctgggaaatgttttacttacacatactggggaagatttatagagaagtgaaatgtactagtatactttcatagataaggcatctggagtgtgtgtatatagggtgtataacataatagcaacaaa

SEQ ID NO: 113280 - DNA, 343 bp, Homo sapiens
ccctgctcctgatggaacaccgacatcagcaggttaccatttcacatgagttgtcaaacactttgagtaacgactctgttcataaccccaagatcccctaacctagaggtggattaagtgtctctccagctcaccttccaatttctcttctatcctctttcaaaagtcttacctgtctgaagtttatgccattagactttaccacccattatcccttctcgctgtcatctacccaactactgctatttccccttatttgctgatgaccttcatacctatttccctttccagactcatctgtcttcatcattgcagttttcttttttgttttgttttttgtttt

SEQ ID NO: 113281 - DNA, 224 bp, Homo sapiens
actacccatttattttttaaagagagagagagggaaagtatttgtgtgcagagagaaagagaatgctaaagtaaaatataaaatgttgacaggtggagaatctaggtggagggtatgcagatttccattttactagcctttttattttctctttacttttccttataaaaatgagggtaggagtggttaaagccaggtctagaggactcagaaaatatcttgtg

SEQ ID NO: 113282 - DNA, 518 bp, Homo sapiens
caagcaacacatagatatctggtcagttttctttgtgatgtgcaccatgcacagaggcagtgttgcccgtgggggcaaataaactgggttccaatctcagcggcatcatatgagccaggcaaccttgggcaatttactgtctgagcctcgatttcctcgtgtttctatccaccttggactatcatgggaataatactagaccttagagctgtaaggatttgaaattacacacgcaaagtgcctaggtagggattggcaaataatgctccacaaaagtcacgccagttggtgacttgggttcatgtccttccttcattgcccacaaaccaccttttactgcaggttgtgcccagatggagggtggatcttggctaagaagaatattatggatttctggaaaggagaaatcattaaggggctctggggttttgctctgaagcgggcatgtcttccttaagaattgtggttttgttctggggctctgaaaagcctgagatgacaccatactgtacagtctg

SEQ ID NO: 113283 - DNA, 383 bp, Homo sapiens
cgcttcggctgctggatgtgtggaccctggagtgaaaggaggcgcttcggctgctggatgtgtggaccctggagtgaaaggaggcgcttcggctgctggatgcctggaccctggagtgaaaggaggcactttggctgtgcagacctgctccattctcctccgcgtccacagcgcagaagaacaccagcttccatttctaaaaccattatttaaaagtcaagttcttttggtataatgtgcctaatgtgtttggctttctctaggtcaccatttaacatcttactctgcaacactacggtcctagttaagaccaaattcacagccaccaggtatctttacaaattaaccaagattggccaggcgcagtggctcatgcctgtaat

SEQ ID NO: 113284 - DNA, 407 bp, Homo sapiens
tgctgaagtagagtcttagggtgaccccagggggacgtaatgtttccgagaagaaggacagaaagaagactgggagacaccggaactcgaaagaaaatcggtaacaaaatgtgggttcggccaacagtgccctgtaggcctgaaatttcggtctggccagagcaagcatacagaaaggctgtacctggaggaaggaagtgcggagccagcctgagttgggagaagagctccagagatgtgaaaacagactaatacatcgtctcaaaaaaagaaaaaagaagaagaaggaactaaagaagaatttctttggaagcaaaatatttggaagcaaaatatttggctcctgactgaaagggttttgatccatgcatacattaataaacccttcagaaccatgagttgggata

SEQ ID NO: 113285 - DNA, 470 bp, Homo sapiens
  misc_feature (2)..(2): n is a, c, g, or t
cnccggaactcgaaagaaaatcggtaacaaaatgtgggttcggccaacagtgccctgtaggcctgaaatttcggtctggccagagcaagcatacagaaaggctgtacctggaggaaggaagtgcggagccagcctgagttgggagacaccggaactcgaaagaaaatcggtaacaaaatgtgggttcggccaacagtgccctgtaggcctgaaatttcggtctggccagagcaagcatacagaaaggctgtacctggaggaaggaagtgcggagccagcctgagttgggagaagagctccagagatgtgaaaacagactaatacatcgtctcaaaaaaagaaaaaagaagaagaaggaactaaagaagaatttctttggaagcaaaatatttggaagcaaaatatttggctcctgactgaaagggttttgatccatgcattccagcctggaacacagagtgagactcctt

SEQ ID NO: 113286 - DNA, 476 bp, Homo sapiens
  misc_feature (2)..(2): n is a, c, g, or t
cnccggaactcgaaagaaaatcggtaacaaaatgtgggttcggccaacagtgccctgtaggcctgaaatttcggtctggccagagcaagcatacagaaaggctgtacctggaggaaggaagtgcggagccagcctgagttgggagacaccggaactcgaaagaaaatcggtaacaaaatgtgggttcggccaacagtgccctgtaggcctgaaatttcggtctggccagagcaagcatacagaaaggctgtacctggaggaaggaagtgcggagccagcctgagttgggagaagagctccagagatgtgaaaacagactaatacatcgtctcaaaaaaagaaaaaagaagaagaaggaactaaagaagaatttctttggaagcaaaatatttggaagcaaaatatttggctcctgactgaaagggttttgatccatgcatacattaataaacccttcagaaccatgagttgggata

SEQ ID NO: 113287 - DNA, 312 bp, Homo sapiens
tgctgaagtagagtcttagggtgaccccagggggacgtaatgtttccgagaagaaggacagaaagaagactgggagacaccggaactcgaaagaaaatcggtaaccatacagaaaggctgtacctggaggaaggaagtgcggagccagcctgagttgggagaagagctccagagagtgagtcaaagcgctctgtgtcctgctattaatgatgccctcatagtcagaggaagcctacttaagtgaaatccatttttgacctgtcaagtattaaatattctcttaatttttagtactgaatgatagaaggcgcc

SEQ ID NO: 113288 - DNA, 373 bp, Homo sapiens
tgctgaagtagagtcttagggtgaccccagggggacgtaatgtttccgagaagaaggacagaaagaagactgggagacaccggaactcgaaagaaaatcggtaacaaaatgtgggttcggccaacagtgccctgtaggcctgaaatttcggtctggccagagcaagcatacagaaaggctgtacctggaggaaggaagtgcggagccagcctgagttgggagaagagctccagagagtgagtcaaagcgctctgtgtcctgctattaatgatgccctcatagtcagaggaagcctacttaagtgaaatccatttttgacctgtcaagtattaaatattctcttaatttttagtactgaatgatagaaggcgcc

SEQ ID NO: 113289 - DNA, 1031 bp, Homo sapiens
  misc_feature (2)..(2): n is a, c, g, or t
cnccggaactcgaaagaaaatcggtaacaaaatgtgggttcggccaacagtgccctgtaggcctgaaatttcggtctggccagagcaagcatacagaaaggctgtacctggaggaaggaagtgcggagccagcctgagttgggagacaccggaactcgaaagaaaatcggtaacaaaatgtgggttcggccaacagtgccctgtaggcctgaaatttcggtctggccagagcaagatggtactgccttttaaggtctattacttaaacataagtatggctctggttcttaccgcctttaccgtatccttcatgggaagttgatactgatcggaaactgacacagagccttctcacctacactaagggggcctaggtaagcaagattatctttctcccaacttcagcaagaggttttcttactggtgttcagaatgcttgattgagcagttagaaaactgttgctacctagtctccagtcttataaggggacaatggctgcaagtcatgcctgcaagaacaagaggctcacacagttttgaaattagcacaacttctagctggataggagtctttttagtttcatttagccttgagttgaaactaataggagtcttttaattagaaaaaagctcagggctctaaacgtaccttcaacatgttaattctgttaccaaaaactggcttggtctgtgttaactcccaacagaattctttttcagtcactgaggcagaggtgcttccagagaaagattcttgacctactcatactgaataattatcgttactagaagctgcaaccaaagactcctggagggtagtaagaggtacagagaatgcaggttagatacagtgaggacagagaagaaaggatgggttggaggctgggcgtggtcactcacacctataattccagctactttagaggctgaagcaagagaatcacttgagtccaggagttcgaggctgcagtgagctagcattgtgccactgcactccagcttggatgacagagcaagaccttgtctcaaaa

SEQ ID NO: 113290 - DNA, 615 bp, Homo sapiens
  misc_feature (2)..(2): n is a, c, g, or t
cnccggaactcgaaagaaaatcggtaacaaaatgtgggttcggccaacagtgccctgtaggcctgaaatttcggtctggccagagcaagcatacagaaaggctgtacctggaggaaggaagtgcggagccagcctgagttgggagacaccggaactcgaaagaaaatcggtaacaaaatgtgggttcggccaacagtgccctgtaggcctgaaatttcggtctggccagagcaagatggtactgccttttaaggtctattacttaaacataagtatggctctggttcttaccgcctttaccgtatccttcatgggaagttgatactgatcggaaactgacacagagccttctcacctacactaagggggcctagcatacagaaaggctgtacctggaggaaggaagtgcggagccagcctgagttgggagaagagctccagagatgtgaaaacagactaatacatcgtctcaaaaaaagaaaaaagaagaagaaggaactaaagaagaatttctttggaagcaaaatatttggaagcaaaatatttggctcctgactgaaagggttttgatccatgcatacattaataaacccttcagaaccatgagttgggata

SEQ ID NO: 113291 - DNA, 370 bp, Homo sapiens
tgctgaagtagagtcttagggtgaccccagggggacgtaatgtttccgagaagaaggacagaaagaagactgggagacaccggaactcgaaagaaaatcggtaaccatacagaaaggctgtacctggaggaaggaagtgcggagccagcctgagttgggagaagagctccagagatctcaggtatgtctttatcagcagtgtgaaaacagactaatacatcgtctcaaaaaaagaaaaaagaagaagaaggaactaaagaagaatttctttggaagcaaaatatttggaagcaaaatatttggctcctgactgaaagggttttgatccatgcatacattaataaacccttcagaaccatgagttgggata

SEQ ID NO: 113292 - DNA, 823 bp, Homo sapiens
agcgcagcccgccagcggccgtgccccgagcctcccgctcgatcgccggccgccgggcaccgctgctcccggagtccggacgggcgcccgggtccgcggccttaaccccttcgggcctgcggacgccacgcggctgggcgaggctggctcccggcacctgccggctgggagaacgggcggcgccccgggctttcgggtgtcccgctggcccggggacgctggtgaagtcacaggctggacggccgaggcgctgcgcgggcaaagaaggcggtcgggttcgccccctggaggctcgcaaagtcggcccgtgggccgtgagtgtggcgcggcgggctgggaggggcgtggcagccgcaagcccgggagccctgcccgcacccccacctcgcgctggcccggggcacagggtggccagacggatttgtgtaagcactctttcgaatctaattcccgccgcgatgacttgcccgaaggccgccttagtgagttttgcagaggaggaaactgacgatcagagtgggacggacgtgggaagtgacttagaccacagcacaggacctgcctgcccgagccgttcctcccgctctttccactcggccgctagctccctaaggaacctcttgttatagaagctgccctgccctaggactgtctacactaccactgagtgccgctctactggtggagtgataacacaggtgcgtcctgtgtgttgatccaatcctgactcggggcacagtgtgtcctggagctgctgcggagatttgagggacagtcacctgaaggtgacctcgcaagtcttgagaaaggagtctccctccca

SEQ ID NO: 113293 - DNA, 403 bp, Homo sapiens
cccttccttcttcatatgtcagccaaacttggtaagatctttaaaaatggggctcttgcaagcctaatgaccagatcagggcaagatcaggctgaaacatcctttaggtgagccagatctagtgctttgcctcctgcatttggggaatgtgatgatgtatgtgagagcaccactaaactgcaacatgcaacctgtgtgaaagacacacagacaccatcccagactattagacagttttgtggttgttattgttttattctcatgttattgttttattacttagcagattaacaaattctcaaactaaattctatcctaatattcctcctaaacttatcctgtagacatgtgggaccactttctcacttatttcttaacagagaggaataagaaatggtcacaa

SEQ ID NO: 113294 - DNA, 657 bp, Homo sapiens
aggaatttgttcatttcatctattttatctaatttgttggcatccaattgttcacagtattcttctgtaatactttttatttctgtgaaattggtagtaatgtctcctctttctgattttataatttgaattggctgggcacagtggctcatgtctgtaatcccactttggaaggttgaggcaggaagaccacttgagcctaggagttcaagaccagcctgggcaacatagcaagacatcatctctaccaaaaaaaaaaaaaaaaaaaaaaaaaaaaactttgtgtggggccgcgcctgtgggcccctgcgaagaagaactttttaagaacctttgtgttgtggggcggcgggggccccaagtggggttaatgtgggagacatggggtccaaagctgtgtgtcatcccagagggagagagaccccggggggccatgagcaacaagggcgtggggagtatttctcatcaccacatataaaaaaaaccagcgccgcgggggggaaaacccaggaggctgttttctgagcaaaacacttcccacaaaaggggggcgtcttccagagaggggacactcacaagcggggggatccatctacacaacaggggggagtccccaaaaggaggagggccccgagatacatcaaatatttagggccg

SEQ ID NO: 113295 - DNA, 383 bp, Homo sapiens
ggattttccttcctgaagttcctgtaaagggggatgggaggcacttcctgaaggtgcccttgttctgcccccagccctgcccagctcttgcaaaacctgcagtctctaatctgctgtgtcatttctttcttttcttgtataaggactggtttctggaatctagggcagatcagaaacctgagtcgtctgtgttcttccattaaacttaaatatagtggcacctgcctccagcatttatggttctaatccgtatgtgcggccagtagcacaattattatcacagtcatttcattacaggccatattatatatgcacctctagaattttgatttagagcacagattctggaagtgatcgcttaatgatgtctaaatgtatctttt

SEQ ID NO: 113296 - DNA, 427 bp, Homo sapiens
acacccggctattttttgtatttttagtagaggtggggtttcaccatgttggcctggctggtcttgaactcctgacctcaggtgatctacccatctcggtctcccaaagtgctgggattacaggtgtgaaacaccatgcctggcccccagtgaagtcttgatgcctcagtttcccccttccataaaagagatgaacccataaaccctgccaaagcatcgtccctggagggaagtgaatgaaacttaatgagctggtggctgccacacattccacgctccccaaaataatggcacgaggctaatgttcagggctattattagaaaggcaaacaagaggtacttccatttctcagtccaaccaacctagttacccagacctctctctccagggccctgtgccacggggcttgggcagaacctgagtcag

SEQ ID NO: 113297 - DNA, 362 bp, Homo sapiens
gtaagagctaccctgtctctctcactaagcagtgaaaacgaaggtcaccttcaagtttacaacagaaacctactcattaagtagggtcagacaggcccatgttcacagtgggtgttgggtgttggtcagcagttgacagtggggacactgtgcctccaggactcaaacacctgcacaaggatagtgagaaggggcatttggggcagaggaagtttagaaatacgacagaattcttgacgtctcagtgactttctaactgaaacatctttgggttcctcagactactgggtggagcagtcgatgaagaccaatgtcacagaaacagtcttgtctggaggcatctcctccccttggaagcctgg

SEQ ID NO: 113298 - DNA, 998 bp, Homo sapiens
  misc_feature (992)..(992): n is a, c, g, or t
  misc_feature (994)..(998): n is a, c, g, or t
gacaaatgagggtttggcatgcagctcgtcatcttaagagttactatcttcttgccctggtgtttcgccgttccagtgccccctgctgcagaccataaaggatgggactttgttgagggctatttccatcaatttttcctgaccgagaaggagtcgccactccttacccaggagacacaaacacagctcctgcaacaattccatcggaatgggacagacctacttgacatgcagatgcatgctctgctacaccagccccactgtggggtgcctgatgggtccgacacctccatctcgccaggaagatgcaagtggaataagcacactctaacttacaggattatcaattacccacatgatatgaagccatccgcagtgaaagacagtatatataatgcagtttccatctggagcaatgtgacccctttgatattccagcaagtgcagaatggagatgcagacatcaaggtttctttctggcagtgggcccatgaagatggttggccctttgatgggccaggtggtatcttaggccatgcctttttaccaaattctggaaatcctggagttgtccattttgacaagaatgaacactggtcagcttcagacactggatataatctgttcctggttgcaactcatgagattgggcattctttgggcctgcagcactctgggaatcagagctccataatgtaccccacttactggtatcacgaccctagaaccttccagctcagtgccgatgatatccaaaggatccagcatttgtatggagaaaaatgttcatctgacataccttaatgttagcacagaggacttattcaacctgtcctttcagggagtttattggaggatcaaagaactgaaagcactagagcagccttggggactgctaggatgaagccctaaagaatgcaacctagtcaggttagctgaaccgacactcaaaacgctactgagtcacaataaagattgttttaaagagtaanannnnn

SEQ ID NO: 113299 - DNA, 276 bp, Homo sapiens
ctcataatgaaaaatatattttcatgtgcttatttaccacctatatatcctcttcagtgtcatgtcccttaatgacttttgcgtatatgctaattagattgatttttttttccttactgagggttttgagagttcttatgtattctagatactagccctacgttggatgtatggtttgcaaatactttctccaactgtgtagtatattttttcattcacttaacaactcttttgcagtgcaaacgttttcaattctgatgaagtacaatttatcct

SEQ ID NO: 113300 - DNA, 442 bp, Homo sapiens
atacagcctaagctaggtattgaaacagtaagagataccagatacaggtaagaatgatctaaccaaaagagacattatcactcagagattacaatgtgcggcactaccccactactcacatatgatacagagaaaagaatacacatacacacatatacacacacaagcacatttgaccaactgtaaaatatatcccatgtgagaaagtaaacttttttttatttgaaacagggtcttgctctgtcactcaggctgctgtgcagtggcacgatcacgactcacggcagcctcaacctcctgggctcaagcagatcttcccacctcagcctctcaagaaactgggactacaggtgctcaccaccatgcctggctaaattttaaaaatttttttagagaaggggtcttgccatgtttcccagactggtctcaaattcctggggtc

SEQ ID NO: 113301 - DNA, 452 bp, Homo sapiens
agacagggtccatcctgtcaaccctaacctctctggatgctcttttctcctgggacactgtctttaagctgttggccattgccatggtggcattaattcctggaaccctcattaaaaaatttagtcagaaacatctgcaattgaatgaaacaagtactgctaatcatatacacagtagaaaagacacatgatctggattttctgtttgccacatccctggactcagttgcttatttgtgtaatggatgtggtcctctaaagcccctcattgtttttgattgccttctataggtgatgtggacactgtgcatcaatgtgcagtgtcttttcagaaaggacactctgctcttgaaggtgtattacatcaggttttcaaaccagccctggtgtagcagacactgcaacagatgcctcctagaaaatgctgtttgtggccgggcgcggtggctcaa

SEQ ID NO: 113302 - DNA, 523 bp, Homo sapiens
tctgtggccagacacttcatcagccttgaaccttcactctctgtcagactcggcacaggtgcttacacacattatcccatttcatcctccgccaccgtgacgaaaccagggttcagagagatttcatagatcagccagggtcacactgctaggaatggcagagctgagatttgaatctgggcctttctgaatttgatgtctcttctatgcttttgcttgcatccctgtccccgatccccaccccatcagacacgtgcagcccaggatagcagcgtagttaagagcatggaccctggagctggacatcctggggttcgaaggcccctctgcctcctaaccagctgtgtggtcatggcagcagtctgccacagtaccctcttcctacagtggggtggggtaggtaatgagaccttccttctaaggctgctgtgacaattaaatgagctaatgcagatcactgtgaaagtacccacctgacacacatcactgggtaagaaaaatgattgttgctattgttcctccc

SEQ ID NO: 113303 - DNA, 618 bp, Homo sapiens
tggggtttcaccatgttggccaggatggtgtcaatctcctgaccacgtgatctgcctgcctcggcctccctaagtgctgggattacaggtgtgagccaccgcacccggcctctccttgattttctaagctcctctcatccaacctgaaaacatatttatctagtctttaggatagtcattctggcttttacagctttgtgtgttctcttggacttattatcttgatttaaaaccttcctatttaaagcagggccaaaattttaacaaaccaaagacctctctgtttttggcacagcctcctttagtacagaaaatcctaaaggtaaaggaagtcctgtgcgtacaaggaaatacagtggaaaaagccctcaaataatatttgaaaatgttattcacatattgtctttatttcaactcagattcctttctcattccatttttatctggctcctacactcattgcttcacagaattagtcacagaataggtcacaaatgacctaaatccagtgaatacttctcagccatcttacttgaccttgccaaacataaaccacgtgtattagtcagggttcccacaataggctgtctgcaggctgaggagcaaggagagccagtc

SEQ ID NO: 113304 - DNA, 450 bp, Homo sapiens
aatgtaatctattgccaattggggttttgtatttgaagtcctctgatttctaaaataagcacaaattgttttcttgtctttcatcttcacagcctttctatgcatagaaatcttgaatatggtctttttctggcaagtgtctgaataagggtttacaatgccttgtttatctgacaagcaaccatgttggcaaatatttcaaggctccagtaatactaatgtgagtctttaggtaaaggaagctggttatctgtctggcacatgggaagacttaagagcattgcagtaatgaactatttccttagaatgccaggtttaccagcaatcagatatggaggccgcaattaatacattaggatccaccaggaggtcctaaaattgggtcttgtagagtttcaaaagagatactgttactgtgcccctccttttcccactctgttggccaaagtt

SEQ ID NO: 113305 - DNA, 784 bp, Homo sapiens
ctgtatgttttagatcttttatcagcaagatctctgggacagctagtggagaaatcaaacagggaggcagcaggccagtgatcgccgtaatagtttaaacttagaccagtaaaacggagctattttacaaaaaactgtggcattctaaatcgttgaaagttacgtttcattatttgggagtggtaattagctagacaatgtatgattaaagtattatgaaactaacggatctgacagttctctttgcaaagaaggaggcaagagccatgcttttttgtgtgcagaggaagacttcatcgcatattctttacgtgttcaaaatgattccttgctattgatacttgttctaagttttccccacataaattacagtagcattgtgaggctagttgtgaaattaagccatactttatggagctgcccttagtggtgatgtaaaataatctttagagtctcttgtgttactgagtacagatcataggcagcttcaaataagtgggcagctacatcagaaagcatgacgctggagagaaaggtttccttccgaccaaggtagaacctgaaatgtccagatatattggaaacatgaaatgtatccagcgtaacttccactgctatctgccacacagaacaaccacactgtttatattgtcacttctgaagagtaatagtgaggagatcctgaggagagaggatatgataagccattgcccaaattacagagccccaggcctattccatctaatcaggagaaagagctttaggcgaggatgtcctcactctc

SEQ ID NO: 113306 - DNA, 168 bp, Homo sapiens
aaatggctctgttgtctggggtatatctctggttctttgtcttggttgagaaagatcaggacatggacacacacaaagagtgagtttaagagcagaaagtttaatagacaaagaacaagagagagagaaaatgcgtcctcatgctgagaaagccggttgcccgagagg

SEQ ID NO: 113307 - DNA, 235 bp, Homo sapiens
actgcactccagcctgggtggcagagcaagaccttatttctaaaataaataaataaacattaactctttatttgtcacatttttcaataacattttttccagttttgtctgtttaatttttaatgttatttattgtgggttttttgtgtttagaaataaccatgtattttaatttttaatgtagtcatatattttcatttttccagaaaagaatgagttgaggctgggcatggca

SEQ ID NO: 113308 - DNA, 265 bp, Homo sapiens
agggaggagcctctggaataggaagagaaggtccccaccggcagtgactggacagtgatgtcagggaccgaggggttgggcacggggaggagcgggcctgggagaaggtgggtctgtttctcctgccctgaccctcaggctcgtgtttgcttctgtgtacagtgttttagggccttgtctgttcctcccagataacactgagctgtttggttgacaaacagaaatctacacattcagtggataagtcactgaggaaccttctgga

SEQ ID NO: 113309 - DNA, 252 bp, Homo sapiens
tgagattgtgccactgtactccagcctgggtgacagagcaagactgtatctcaaaaaataaaaaaataaaggttgaattgaattgacctttaaaaagttctcttttgttatcagggtgagaaggtgggcgaaaaatccagactgagcttgggttggggtttccatgaagccttcctaggggaggagaagggatattggtatattggtctattggtctgctacggctgtcatagcaaaggaccacagactgcg

SEQ ID NO: 113310 - DNA, 515 bp, Homo sapiens
ggacagctggacctgtctctcaccacccacctcagaagcacaaaaggattcacacccagatctctagaaaaatgatcaaaagcaggttccttctcgcagccaagcttcctggacatggtagttcattgcatcttgggaaagagtaaatcattttttcagctgtcaatactgtgtccctcacatccttgaaccttgttcttgcaaaatcttggccttctttctgggttcactggccatactgtatggggtgttgtgaagtttcttggacaccacatagaggaacttggcctgatcttcattcccatagttgtaagaagagccattgctgaccagttgttcaaacttccagctgtcggacatggtggacaccacctgtgtgagttcctcctcctgacactgaagcacgtggtacacatgcttcatgggcacctgtgatgttttgctctcttgttctctaattttgtcctttacaagttttattaatgaagtgatactgtaaaattcactttttccaa

SEQ ID NO: 113311 - DNA, 459 bp, Homo sapiens
acccgaatcaaagggccttgatcctctgtacagcctgcattccaagaatgggccagaggttcagatgttcagatgtccttcctagaaaaggagcagatctctgagttggccactcccacatttcttagcttggaagtgtgaacccacattctacttggaccatagggtcattgttagggtatgcttgagttattgctgtcaggtgcatctgccatacgataccataaaccttaaaccactaaaataaaagagatgtagctagtcaataaaaggaaataaagtggaattataaaaaaagattaataaaaaataaggcagaaaaagaagaaaacatataggacaaatagaaaacagcaaaataatagacacaaatctaatcatactaataatcacattaactataaatggtctgcatgcgctaatcaaaaggcagaagttggttggattggctaaaaaaaa

SEQ ID NO: 113312 - DNA, 217 bp, Homo sapiens
ccactttatttccttttattgactagctacatctcttttattttagtggtttaaggtttatggtatcgtatggcagaaaaagaagaaaacatataggacaaatagaaaacagcaaaataatagacacaaatctaatcatactaataatcacattaactataaatggtctgcatgcgctaatcaaaaggcagaagttggttggattggctaaaaaaaa

SEQ ID NO: 113313 - DNA, 589 bp, Homo sapiens
cagcgcctgccccagagctcccaagcccctgcccgccacatctgcagtgccgcacacagacaggagaccagcattacagcaacaaccgaggggccactgcctgatgaattgccagaggggaaccaccagctcggctcttaataaccggatctgcatcctgctgctgcccagctgggctgagggccctgaccacagctaaggggagtcatcacagggcttcagggctggaattccagtgctgcaggatgagtggcgctggtctcgggatccgcagagtctacagggccctgggcttggacaccgtctcaggggtttgtgccttcagagcctggtggagcagccaagcaactgggcacatgaagacaaaggtcagacctccattccagaaagtcctgccccatacccacacccagaaggaagaaatgcatgctcagaggggccaggaagaaatccagagagacaggccttgctgggtgtccccactccgtctattcacattcgatcattgccctttttgtccagtcatatcgctacacagctgtccatgtgtccttgaaactcagcataaaagtggacaattttccctgta

SEQ ID NO: 113314 - DNA, 204 bp, Homo sapiens
cagaaatgcaaaattatgcatcttcccatagtcctgaggcttcctttgccaatggaagggctagcaatgcattctccctctcatgaaagttaaatttccagagacttccttagattgctcaaaatgttaaagatatgtccatgtctgcaattcgccagtttcaggtcaaggcctactttcatcaatattgctcccagaagtttt

SEQ ID NO: 113315 - DNA, 431 bp, Homo sapiens
cttggtgaggcagcccaggtcgctgcagcatttgagccgctgtgcgctccgctcccacctggagggcagcctgccccaagcgctgccccgcctccccctgccaccgcgcctgctccgctacctgcagctggattttgagggcgtgctctactagatgtccatggccttttgagagggcctgaaagcagatgccccagcctgcagagggcgcgcctctgcactaactcaggccaggtagccctggcagcaggaggcccagctccgcaggcaggtgtggatgctgcaattcccaatgcagagaagcggaccgacagcggcagccgggtgatgtctgatgaagacacactcctactggggctctcctgaggcccccttctagcctgtgcaaaccctgtatgtgcattaaaaatctccaggtctgtgtttggtgc

SEQ ID NO: 113316 - DNA, 272 bp, Homo sapiens
ctgagaccaggagctgcaggcgttagatagaatatggtgacgagagttacgaggatgacgagagtaaatacttcatactcagtacgtgccaagcactgctataagcgctctgtatgtgtgaagtcatttaatcctcacagcatcccacggtgtaattattttcattatccccatgagggaacagaaactcagaacggttcaacacatatgcgagaagtcgcagccggtcagtgagagagcaggttcccgtccaagcagtcagaccccgagtg

SEQ ID NO: 113317 - DNA, 498 bp, Homo sapiens
agcagctcactttctgcaccccagcttcagagccctcctgacaggagctcacagctcacatttttccatattataggaaatcatgctctttgcagaaaatagaaaaatacaggaaagtataagaaataagtaaatgatagttatgttacacattgtaaaaatcctttttaatcttagcatggagaataacactttggatctattctgtctcttatgcatatacgtatatactaaaaatgagattcactgaagaatgttttaaaatatgtgagatttgaatacatgtttcatagtttattttccatttgacctataagtatttttcctatgtctttgaagtattttgaaatacttttagtaaatacataattgttgagatggatagtgtctgacatatccctgtacagctctgtcaggagaaaatttatcctactctggtttccagcatggtctggtacatcttgaccacttttctaaggattccctagggggagagtg

SEQ ID NO: 113318 - DNA, 309 bp, Homo sapiens
caataattttaataatagctagttcttacaatagtgttatgtaccagggatgttctaagcatatggtagaaagcaaagagttttggtccatcctgtctccaccctgcatgtgtatccctggagacttatttgacttctctgagcctccttgtctataaaatgggaatcttgagtcaaagactctatctcatagtgtaatggaaagattaatttagaagcctataacatgccaacccttgtttatagcaaatactagatactccatatttgctcttcttcctacagactcacagtttaaacatataacaa

SEQ ID NO: 113319 - DNA, 1242 bp, Homo sapiens
ggaggttgattggtctcaagagaagaaagctgggaaaaaatggaatgcataagccaaatcttttatatttagtggaaggttatttcaaaatacttactctactaatgccatgttgcaattcacagaatatgccactaatgcattgccattagcaaaaataagataagccatgagagatacaccatgaagataaatcataaatgctagttagtactttggactaacatttgaaaatgttttcaaatgtaatacaatataaattgttcttggttgggttacagattctgtagttgctctaagccttatttcactatatgctaagaatcttttggtgattaagaattcataaatcaaagaatcatacctccacgactatgtcagcagaagtctgagtcgggaacagattctaataattattttaaatgtaattgaaatggctagaattccaagatataacacatgcctataaatgccaccttttataattcttgagctttatatgtcattatgaaaagatttaaataatttcacattttcttatacttccatagaggatatatgtgctaaatgaaaaaaaaaaagtattatttcttgaatgcctagagagtgttggaagatacagtaaagctagtttagttctactttttttttttctgtttttgtttttcagaaggaaaagccagttcagtgtagttaagtaatttccctaaaactacatagtggtagagcagtgattcttcattagctttacacattttataaaaaaagacttcttcctaagaaaggaacttagagaaggcagttatttatcatggataattaagtcagggagattcatttgcagggagtaaattgtgccatagctctagaattcccttttgtgaactatttctttgtctcgggatgtgtggggtagcagatggtagacttttctagactcatgacagaccttttaggtagaagggtgagggaacagagagacaggttaccgtataccctttgacatggttcctccttaaaaatctgctgtattttagggaagttaatgaaattgtccttcaagcttcaggctttgagtagtacagcaagtggacaggaagtggagggtgggcaagggagtggcatggactcttttccaagttccttcctgtgccttggaccagcactgccattggaaatataatgcaagccggccacacggtggctcatgcctgtaattccagcactttgggaggccaaggc

SEQ ID NO: 113320 - DNA, 369 bp, Homo sapiens
caagagtgtagaggacgacgctgagggccacctcatctaccacgtcggggactggctacaagagcgatgtacaagccaaatcgtaacaatcctatagcctgtaatggtcccatagccatcctaacgtcccaagccaacctgagtcacagcctcttgccttttctcagtggtgttgtttatctgggtggtttgagttgctgttgagaattgacctctgttgtccactcccagctctcacggcccctgggttaaaggtggtgggaatcacgcaggggttttcttcccctgtgaccatctgtatctgttccccttccttcatctccaccccaggttgctgtccccttttttcttccaactcagctcattccc

SEQ ID NO: 113321 - DNA, 361 bp, Homo sapiens
tgagcatcatacttgacagacaagtatttttttttaattcatttccaacatttaaaaggtagaagaatctcatggaagaatccagatttatgacttcttgtgaaaaatcagaaaatctggcaacactgggtccccattccatgcagccacaatggggcatgatcggagctgagtggtacctccattctgtggccaggatatgatctgcagtcaccatgtccccagcctgtgccattcacttgcctgtgtggtccctgatgtggctgaagagttagaataaaggagaaaaagaaagaaagagagagagaaagagagagacagaaagagaaaggaaggtaggaaggaaggaaggaagagaggg

SEQ ID NO: 113322 - DNA, 407 bp, Homo sapiens
cacgtgtgtgtgttcagagtatcttaagaaccagtggtaggtaggagaataggaggaagaggaagtggtcagagtcatggaaccaagcaatatgcacgcagtctccgatctgtgcacacagaagggtaggcagagaaaaggaaaaagaagatatcaacacaagtggaaccgcagcaatttctcttctctgtggatatccaagtgaacttggccagactctcgtttaacctaataagaggaaagactgccatctctacacctgcgggctctaaacaatgatccccagatgtctccctcagtggaggattagcttgatgtgttcacaataccaaattcggctaatacatctcaactgtgctgtttgttgcttcaggctttctccttttctatcatggcctttaaccacc

SEQ ID NO: 113323 - DNA, 308 bp, Homo sapiens
atccaatcacctcccaccaggtccctctctcgacacgtggggattacaaatcgagatgagatttgggtggggacacagagccaaaccatatcaatagcttaagagaatgcttgcttctttgaagctccctattttctccctctaccctccctcatccagaggtaactgctgtcctggatatcatgttaatcccttgcttttctttacagattgactgcatatgtatttgttcttaaacagtgttgtttggttttgcctgtatttgaattttatataaattgaatcatactacatgtatttttctgtgt

SEQ ID NO: 113324 - DNA, 396 bp, Homo sapiens
gttcttcatgtttctccaatgtaaacatttccgtatctctaaactatgctcttaggaaggaagtgactatgtacagcccacacttaaggagcgggaagttatagttcacctccttgagggtgctacataaattatttgaacagagacctacagccctctcatcttaatcaaaaattgccaaccccctcaaaaaaaaataataatacagggcctcaagaaaagaggtcatctttgggcccagcctgcaaggtaagctaagggaaagttaagcaaaacagtttctggtcccatcactctcacgtcaacagcagtagttcagagcagcctgtctcctttctttccatgaggcaggcaatcttaggaagacacactataaccacaaggacagcagcaggc

SEQ ID NO: 113325 - DNA, 2200 bp, Homo sapiens
  misc_feature (2052)..(2052): n is a, c, g, or t
agaaggtgaaatagaccctaccccctgatggaggatccacttgtatgtataaggatgggaagctttgcaggcagccatctttggaagccatccaccacagtggctcaatcaacctggtgatgacacagagtgaagtccccactttccaagaattttccttcacaagaaagttcctttcatttcacccacacaggaatgttgactttaaatgagaccaagacctaaaaggccacattcacagataggtaacagggcatctctttgacaagcctcaatcgctcttgggggcttcaatttcctcatctgtaaaataaagatagcctagagttgagttctacagccttaaacctcaaaggaaaagcctttatacaggtgttctaatttgcaactatcaccagatatttcccataaggccaggtgcagtggctcatgcctgtaatcctatcacttcgggagaccaaggcaggtggattacttgaggttaggagttcgagaccagcctagccaacagggtgaaaccccacctctactaaaaagacaaaaattagccaggtgtggtggtgcactcccataatcccagttactgaggaggctaaggcacaagaatcacttgaacctgggaggcagaggttgcagtgagccaagatcatgccactgcactccagcctgggagacagagagagactctgtctcaacaacaacaacaacaaaaaattatttcccgtaggattttccaaaggagggttaggaatgtgaagtcaatagttcacaaatgcactcctacttttcggaggtatattaggaatgcatatcttgttggtacctacacaaagcctcctttgaattttaacttccagattttttctcttgcttatggtctgccaccatgggtaaagcacccccacatacatcagcacagagcccacatacatcaattttttcataacccccaaagagagcagtcagccaaatcagaaagtttcagggagatatcaagatagaaaaggctagatacccagtctgagaagtcagacaactccacaaaactaataataataatgtcaccattcataggtattattattcatatgtagaatatagaggagtcaggatttggaggcaggcctgggacctaggttcaaatcctggcatcaccacctacatctgtgtggcctccatagggtactttggtaataataaatattcaatgaggtcatataagctagtgttggcagaggcccagcccatagaaagctcacaaccaagagtggctgtctttattgtcacattgattttcagtctaagaagttgcaactcagaaaacaataagtcatctatgttgcaaggctgtttgctcttcttccatccagaaagtggctgttagagaaagaaactcacactgaccatgtgtctactccttgctaaacatttcccatgtgcagccttgagtaagcctccaagtattcctgaagttattgtgaatatgaagaaattgaggctccgaggcttagattacttgccccaggacagataaccgagatgaggcagagcggggattaaaaccaggtggccctgatgggacaaaggctcaatgtaaatagaagagtcagcccatgtgtccacatccaatgaagtaaacatggaaaatgcaagatcacccatttgacctttaccattaacctatctaggcctcagtttcttcatctgtaacacaggggcattgaaacgtaaaacccaaagtttcatgaatgcatgatttggggtttaaaactaaaatagtattatttcagtgttctgaactgtatgttttcattaagtatcattttaaaatcacattttctaatttcatgtctctgagaagtctagatcccttatcaactcatagtggttgagaatctcaaaattattcaaaaatatccttgaggtgtggtgtcccaaataacctgggacataaactagcatagctggagcactaactttcaaaataaaattaatcaaggaataatagtcagctcttctaaaacaaatacatatataaacatatgcacatangctgtagcctcagaataccatttactctaagaatgtaagctattctcctatgctcaaaataatgtaaatttaaggattgagaacttcagtggtaaactgtcacctgtatctctatggtttaaacaaataaagaaaagaataagaaaac

SEQ ID NO: 113326 - DNA, 308 bp, Homo sapiens
tcaggtgatccgcccacctcggcctcccaaagtgctgggattacaggtgtgagccaccacacccgtttcattcttttgttcactcattcctcattcaacaaacacacagtggaaatccatatttctgtttctgcttttaatcacaggaagagtgaattgtctacacagttgttgatgtgctggatacatgaaaaatgtagtgtgtgtttcaacctgcttgctttaaaatattgcatgcagtctgtggggttcaactctctatagttgtggcctcacagtttagtttatccaacaggaaaataaaacaa

SEQ ID NO: 113327 - DNA, 412 bp, Homo sapiens
aggtatgcttcagttatccaatttacttgcatccaggctatttagaattaaccatctaaccaactcaatgaaatttttagaaaactgaaacttatccctttaggctccaaaatagttttgttttatcagccgggtgcggtggctcacgcctgtaatcccagcactttgggaggccgaggcgggtggatcacgaggtcaggagatcgagaccatcctggctaacacggtgaaaccctgtctctactaaaaaaaaatacaaaaaattagctgggtatggtggcaggcgcctgtagtcccagctactcgggaggctgagacaggagaatggcatgaacccaggaggtggagcttgcagtgagccaagatggcgccactgcactccagcctgggtgacagagtgagactccttctc

SEQ ID NO: 113328 - DNA, 536 bp, Homo sapiens
aagcttgttagagactcagcacccaggtttctactgggggctagtcactctctgtctagcacataccaaaattccagactccaggaggaaagcaggtattcagcataaaccatatggtttgtacaaagagcttaggcagtcttctcagttttaggaatgatggagactctcccgaaatccaagttcccacatgccagccaaaagccaacgtagcaaacaggtctttctaagaatagcagcggggcctgctgtattaactcttttctgcacaaaaaggaatgtggagatagcatagaactagtcactgcagaaaccagcaatcatccctagagctggagagagaaaagacaaagtttggagtatcagaacctagaagtatgctggacaagtctccaccaggcagagactcatccctgtaagagaagggagctgttcagcttctgctggtaccatagagggagccggtgaggctgtttccgggcatgctgggacaaaggtggaagctggaagcaccacactgccctgtggaagaagca

SEQ ID NO: 113329 - DNA, 895 bp, Homo sapiens
tctaactgccagctcatgtatgctccttccagagagtcattctgtctgcacttagaggaaagaaaacatggactccttgacaccacgtctctgaggactcatcttgtgtcttccatcctggcacaagaaccaagtgtaccagacagcctttgaggctgaaaagagatcgaggaacagcaggggaaaggcaaatagcacaatatttgtttccacaactgatgttactacaatgaatatgaaactcagaattttctgttaagtcaagcactagctgaggttgaataacatgctatgacaatagtggtgctataaacccaaggacattgttatgagttttcacattaaaaaaaatggctggaaacttagatttaattaagggcacacaattatggcaagaggggtgtagctgaaaaccatagagagtgagaaatacaggcagtaagattctcagagccatgtttgcgtatctacattgcctgtactttatggaattctggttcttggtgatatttggagttcagatagtggatttatagtgggaaagaggattttgaatatagagatagtagaactagggaatgattttttaaaaataaaaggtaaagaacagaataggccgggtgcagtggctcatgcctataatcccagtgctttgggaggcccaagagggggaattgcttgaggccaggagtttgagacagcctggccaacataaagagaccccatctctacaaaagttaaaatttaaaaattagctggtcgtggtggtgcatgtctgtaatcccagcaactcagaaggctgaaacaggaggatcacttgacaccaggatttcaaggttgcagtgaactgtgattataccactgcactccagcctgcctgtttctaacttaaaaa

SEQ ID NO: 113330 - DNA, 601 bp, Homo sapiens
caaataggaaataaaacaagctttcttagaaataatatgccttataggagaaacattaagaaataaatatttgcctttggatgggaatagaaaactgtaaactggactctaagaatattcctgtgtgccctgaagaaatataatgtttgctatattttcagtttcagtggatgacatgtgttttggttctttgaacatttttttgcatgcttgttttgactgtaaaagttgacttaccagccaactgccaacttgcaaagtgccttctcaggtaccaactctgcagttctggtagctaccaggtagtgacagttctttaaatgtgtccatgcagcccaacaagctgagagacattagacataagacaactacatatgctttctttttgtttatagtccagaaatattagtacctatatccaatataaatatcactaattactacatatgcatacatttaaaaaaatttattgtataaacataagcacattaacagaagccagtagttccatcacccaaacagtgtaaattgtttttatttttctgttttaccttccactttttgtacatatgcatctataatatttgcaaatataaataga

SEQ ID NO: 113331 - DNA, 1059 bp, Homo sapiens
tgtagagctaaaagaaaagaaagaagaaaataaaaataaaagaaaggtagcttcacctccacccaaatttggaaacatctattcatgcattttacagatatatgtgtgacatacactatgtaggagaaaattcaagctgtgaaagagaaaaccagtgcaatggctgcctgcatggagattacagtgcaatgaggaaaatagatgtgaataaatgaatgcaagtgtcatcgagaggaaacccaagcagctactggaatgtagaagccatggacttcaacaagtcttgaaaatggagtgagtgagaaggaaagattcttggcggaaaaaaaaagctggagttaactgaagaagtgaaaagaacatttcaagacaaaaaaatggtaaagtaaaatgactgaggtaggaaatcgaaaaatccatttgagaaaataaaagaagccaagcattggatggatcttaaacgacaagtgagaaaaaggcacaaaacaagtctgaagagaaatacatgaagaaactaaggatcaagcaccaagtcaactgcacaagatgttataatatgttcggcttaacttggaaccattgcagtattacctcagtcaactttctttactataattgaaagtgaatgattaccggctttttagctaatatcaaaaaagattcattccaatctagaagactgcctgcaagcaatgcgaacacgtgtgtctagtttcttggcagggtctcccagtttcccctgtcttttttctttctcctgatgcaaaatcacagaatgctttgacagctctgtgacccagccaactttagatttttcccagtaagcttcaaacaaaaccgagatctcaaacattcccaggcactgataaagttatctaggtttttgcccaaagcactgaaagaaactggccttggccctgagccaaatttcttaaaccttcctgaatatgccataactggacctccctcactagagctgtatttaggtagaacgtgcatttctctcgctgtcttctagaggattgctgcagactgtgtaataaatgctttggtctggtc

SEQ ID NO: 113332 - DNA, 816 bp, Homo sapiens
gcttaagcagttctcctgcctcagcctcccccgcggcatggtggtgtgcatctgcagtcccagctactcaggaggctgaggtgggaggatcacctgagcccagaaggtcaaggctgcagtgagccaaggtcacgccactgcacttcagcctgggcgacagaccctgtctcaaacaaacaagcaaacaaaaaccctcttgatcccatttcccaaaaaacgatttttttgagatcttatcatctcctggcttggtgcagagtacaggaaatcgagacaaagtacaacacacaaggaataaggagggagggaagcgtgggggaggctgacatcgtggactctcccagctcagtcgacccatgcgccttccttcatggaagaaaggaatggaagatgaatcatgccttcagcacagagagaccttcctcactagtaaatgcgcctccagaaatgtccaagaactcagtgccagagccaggctggctgcatgagaatcacctgcgagcttttgcaaacataggcccctactggctccaaatgtattcgtctcttggagaggaggagagaggcagaacaaggaacaggatgggaagaaaccagccttgtgcacaggaggatgctgggattcctcctgcaagtttagcgcaatgcagcctattttacaaggtcacagaagctcagagaggtaaacctgcccaggttctcatagcttgtaagtgacaaaacaaaacccgcccaagtctctgtctctagagatatttccacttgctttaactctggagctgtcttagttgtaaagacagattccactcctcactc

SEQ ID NO: 113333 - DNA, 211 bp, Homo sapiens
tgtgatttaggaggcaagaagccagcccaacctggaagagaccagctaatgagcaacaaagccctaacagcacttgaagtaagagacagcaaaaggcccagcactactgaaatgtaagccggcaagactcctgtcacagaagagaagaggtatgtgcgtgttcatgctcattttcatcctcttctctcattcaaccggcttttcccacccc

SEQ ID NO: 113334 - DNA, 563 bp, Homo sapiens
tcttactgtcgctcagcttacctgtgtctcagcaaagtcgtggactttggtttgaaataaattatcatgctgccaaaagaaaattatccaaaaaacaaagaatgactggtagcattttagtcccatacctggggtattgtctactatgcatgaaggctcaagttagagacaggatcacattcacatgctagtaaatggttctgggtcttttgtgtttttttttgtttgttttgtgtttcattctgaaaataaaacatcatagatagcagctggtttgtccattgtcttctttcttggaaatcttatggaaggttcctttgaacactatccttggcttctctgttaggacaaactgaaactgtgattgataacaaaccatagaagttaatttaaacaggattatccattttaattgacttgtaatcgtgagaataacaacaacaacaacaaaaaacccagaacctctaaatggtaattcttgaggggtgaaattgtatctttgctccgttctggatgttaccaggcaccgttaaaaaattaggaacaggctagacacgctggtt

SEQ ID NO: 113335 - DNA, 139 bp, Homo sapiens
tgtcacccaggctggaatgcagtggcatgaccatagctcaatgaagcctgaagtcctggctgaaccaatcttcctgcctcagaccactgtgtagctgggacgacaggtgtgcaccaccatgccagcttatttttattct

SEQ ID NO: 113336 - DNA, 135 bp, Homo sapiens
taagtcatttttcccctaacttttattcacacttccaattatgaacttctaacacataaagaaaattgagatttttgtcatgcaatgctgaaacccaaactgacatgtaggaggaaggagcagcagttctgtggg

SEQ ID NO: 113337 - DNA, 827 bp, Homo sapiens
cagaatgggcttggcttctttcactctgggctgtgtttatgagcatcacccagattgctgcatggaagccatcgtttgttcattttcaccaccatagagtattctactgttgatgggacataggctatttattccttctactgttgagggacgcatagttatttccagctggagactggtatatgtctcttggctaccttctgcatgcatttctgttggaggttgtttcaggtatctcttaacgtataacagaccaccctcaaattgagtccttgaaacaattaccattttcttctttctcaggatttggtgcatgggatgggctcagttgggcagttcttctgttccatgtgatggtactggggctgcagtcattcagaggctcaactgggctgaacgtgcaaggtttcttgctcacgtggccatcagtggtgctggctgctgttgggagctccactggacttctgtccagagctcctcagctcacctctctgtatccttgccctgtggctcaggcttctaacaatacagaggctggattccaagaggagggaattagaagcgttcagccttcttaagaccaggattcagatgtcccagactgtcactgtattgaccggagcatttacaggccagcctagtaatttttccatcttgggcaggaatgggtggcatatgctgggggtaggggtagcattgttggggatcatctttggagctgtgtgccaaggagtaaattgctcggctgctttctacctgaggaagtccgctatgcttgcttgtggagagtggattgtgtgctcagagtccacaaggatttaagaatc

SEQ ID NO: 113338 - DNA, 2084 bp, Homo sapiens
atgcttgtggtcgtctctagcaggatcccccatgggatgggctcagttgggcagttcttctgttccatgtgatggtactggggctgcagtcattcagaggctcaactgggctgaacgtgcaaggtttcttgctcacgtggccatcagtggtgctggctgctgttgggagctccactggacttctgtccagagctcctcagctcacctctctgtatccttgccctgtggctcaggcttctaacaatacagaggctggattccaagaggagggaattagaagcgttcagccttcttaagaccaggattcagatgtcccagactgtcactgtattgaccggagcatttacaggccagcctagtaatttttccatcttgggcaggaatgggtggcatatgctgggggtaggggtagcattgttggggatcatctttggagctgtgtgccaaggagtaaattgctcggctgctttctacctgaggaagtccgctatgcttgcttgtggagagtggattgtgtgctcagagtccacaaggatttaagaatccgagccctgctgcccttgcctcagcctgtgcattagggcccggtggtgagagcactgagccattgtgaatcaaggcccctccctcgacctgcatactaacaggccagaagagcttgcttgattttggtcctaggctcctgcctgtgggttggattccaggggcactctctcctccacaaaccagacggtggcaggtacatcccctcaatggaaattgcccacacttcaccctaaagacagatcctgctgttcagcaacaatgtgagtggcccacacatttgtccagcatgaaaccgtttgcagattcctttccagtacacagtcccatcagccggtcacttcacgatgacagctcctcgaagcaccttttggtttgccgttgtgtagcttagaagtaggagcctgcacggcttcaggaattcacagaaggagcacactttgtgcttggagaagttaattataggaatatcctgcaacctgctgctctgagcctgtgcacctggggtgtttccctggaggtcctgtgtatgaggatactcatcagcatggggtttgggaagcctagcactggagacaacctaggtggtcctctccaggggagtaggtaagagccctacagcagtgaaaagcattgaaggaaaagtgtgttcagcagtgctcttaatctgatcagagcagcctgaacacattctaaacacagggcatttagaactagggtagaggcactagagcaccatagatacaaactcagattctgaaggtaaatgcccaggttcaaatccaagccccctcgccaagtgaccacgactcccccgagtcacctgacctctgtgtttacatcctcaaagttaagtagtcaggaaagggggcttggggcttgccacatggatggttgccactctcctttgcaaagtgtagtccccaaaaacaggtggaagagggaagggtccaattagaaggccgagtaccagctgccatgaatatgccagagctgctggctagtgataaataactgaaacccagggggacagcagagcttgggtgaccatacattctaggaaagaaaacatgcctgttgtcctggctttttatccagcttagacaaagatgggcaaagaaaataatttagaaaatggtagagatgggcacagagaaagggcacggagggaggcacaaacagaaggccaagtgatggtggaggcagacattggagaaatgcctttacaagccggggaatgccaaggatgctggcaaccctgggagtgggaagaacctggaacacaccctccgtcagagtctccagaaggaactggcccttcatcacctttcggacttctggcctccagaactgggcaagaaaatgtttctgctgttggaggccatccagctggtggtcatttgttatggttgccacagaaaacgaatatagatttagacatctaatttgcatatatagatatgcatgtgtatttgttaaataaaagataaagcatgacaactcgatggacaacgttacaactcattaaattgtgttggtta

SEQ ID NO: 113339 - DNA, 192 bp, Homo sapiens
tttggtcttaatcttaagagaccatggcagggaaagggactgaggcttctataaaagaaactgacaggtgggaaggatcccacagtccactttacctcctgttagcctcatctcaggagttggctcctacacccaccgccatgtcccgtggtgctgctccagcagggcggccctgtcttgccttcagtgaag

SEQ ID NO: 113340 - DNA, 338 bp, Homo sapiens
tcggccgccgggattccttcggccgccgggattccttcggccgccgggattccttcggccgccgggattccttcggccgccgggattccttcattcttacatggataagctcaatttcattaaatacatctcttagaatataaaatgaacttcaaatattactggacagaaagttcaaatattacaggacaggttaaatgagagccaccaagcagagagtgtgcacctaaaggtggacttgctgccacagagtgctcgcaactgggccagggccaggcgcagacatgggctggttttgaactccacactttgaaggataagactgcagctttgcaaac

SEQ ID NO: 113341 - DNA, 257 bp, Homo sapiens
ggaggctcttcacctgcaatatctaccaggcccacatgttgttctgccgcctctcctacagagcatcttgatcactgtggcctttgtcctcctaccacaatgagcggctcccatggagagacaggcagaaagaggtccctgtaaatcagagagcatgaggggtccaaagaacatacctttcctttggacttggcatatgctggactcaagtttagggtcatagttataaacccaactggctcaaaatacttccccag

SEQ ID NO: 113342 - DNA, 637 bp, Homo sapiens
caagaacttaaattattatagagataaccaaacatataaaacctagaaaactactacaatcaccgctcatatatctactattgaaaaattatcatttctgtctctacaaaaaaatacaaaaattagccaggtgtggtgccatgcatgtgtagtcccaggtacttggaagattgaggtaggaggatggcttgagtcaagaatgtggaggctgcagtgagtcgagatcatgccactgcattctcgcctgggtgatagagtgagactccctgtcaaaaacaaaaactaacatttgaccatatttgattcatctactatctattataaatacttatatactgctatttttgctgaacaatttaaaagtaaatatagataggcatcatgacatttgtcccctaaatacttcaaatggtacagccgtcaaaataaggatatttttctatataaccataatatctttatcacatataacaaagtgaataatacttccctggtattatttaatatccagatatttaaaatatcaaattttactagttttctccacaatggattttatagctagtttctttgaatttgacatgattgaataaaggttcagacattacttttggttgtcatgtcttcatgagtctaa

SEQ ID NO: 113343 - DNA, 372 bp, Homo sapiens
cagtgctctacatcgttagtcatcaggtaaatgcaaattaaaaccacaatggactaccattaccaccaacctactgactggatcaacttaaagactgacactacaaaacatcagagagcaggaggagcaaccagagctcacatgtatacactgccagtgggaatctgtgtgtgtgtgtagagacagggcctcactgttactcaggctacagtgcagtagcgtgatcacaggtcaccgcagcctcgagcttcagggatcaatagatcctctcacctcactttgaaacctttgaaaacgcccattctactcacagctactctactcttagcacaaccaatactaattttcaggtttttaaaatatcactctcca

SEQ ID NO: 113344 - DNA, 190 bp, Homo sapiens
ctgctctactttctggggtgctcttactccacttctaattgtctaacttgcacatcctccgtgacctacctctggacttcaggaacacagagagagttgaaaaattccctggctgaatatagccaagtctactgatgtcagggaagtgttccagggtgggatatagctggagtctgggcttcctacagaa

SEQ ID NO: 113345 - DNA, 462 bp, Homo sapiens
cattctccatgtgatgtgcctgctcctacttcaccttccaccatgattgtaagcttcctgaggcctccctagaagccaaacagatgctggcaccatgcttcctgtaaagccttcagaaccgtgagccaattaaacctcttctctttataaattacccagtctcaagtatgtctttatagcaatgcaagaatggcctaccacagtggtataaagtatggatcaaagttcttgtttttctactgatactcagttgttctggtatcattggttgagtagactatcatttctccagtaattccttttgcatctttgtcaaaaattagttgcccatatatgcatatgtatatgaactcatatttcttggaaacttctctggggatccttcgagggctaggtaaaggcgggctcctccagtaaagattggcatttgcttctgccatgtgcctaataaaatcactttac

SEQ ID NO: 113346 - DNA, 519 bp, Homo sapiens
  misc_feature (11)..(11): n is a, c, g, or t
  misc_feature (15)..(15): n is a, c, g, or t
  misc_feature (19)..(19): n is a, c, g, or t
tccaacggccntagngtgnccgaaacaaattatggtgaaaccccgtctctactacaaatataaaaattagctgggtgtggtgtcaggcgcctgtaatcccagctactcaagaggttgaggcaggagaatcagttgaacctgggaggtggagattgcagtgagccaagatcatgccattgcactccagcctgggtgacaagagcaaaactccatcccccctgcccaaaaaaaaaattaattttcacagaaaattaatagcataggtattattatcctcattttacagagaaagaaacagccatagagaaaaatgacttgctcacaacacaggcaactttgactctagagataacacttattacagtaaaatccctcttcagacacaaaatacatgattatcttaaacacattcttaataaaaatttaacaaaaattgttaaatgttgtcatatatgtgtgtgcaaaacgtataaaatatacagaaaagagaaatacttcctgtatttaaaccatataaac

SEQ ID NO: 113347 - DNA, 411 bp, Homo sapiens
ggcatctggaagaggatagcccagcaataatcactcacagggcttcagtctaaaaagtattctaattgagcaatatagcagatctcttttgcactgtcttaccagctcaagaatggacacagccagtcatgattcttattcttccattacctttcccaccaccacccagctacctggatcaaaaggataagcaactgacccaagatgagccagtgagattgtagcttccagaaatttgaatttaagacaaacaaaaacttgtcttaaccaggaaagagatagactcagtaaccctgggggattggtttcaggaagtccacaggtgccaaaatccacagatgctcaagtcccttatgtaaaacagcatagtatttccaagtaacctatgcacatccttccatatacaggagt

SEQ ID NO: 113348 - DNA, 394 bp, Homo sapiens
gttgacagagagacctggtgagaggtgattggatcatggggccagttttccccaggctgttctcatgatagcaagtgagatctcatgagatctgatggttttataagaggctcttcccccttcgctcctcactgctctctctctcctgctgccatgtgaagaaggtccttgctttccctttgccttctgccatgattgtaagtttcctgaggcctccccagccacatggaactgtgagtaaattaaacctcttttctttataaattagccagtctcaggtatgtctttatcacagtgttaaaacagaccaatacatattctcttgtggctctttctcattaccttccccttttcccaccatacgttaaactccaagagtaggagcagctttcct

SEQ ID NO: 113349 - DNA, 756 bp, Homo sapiens
ttttaaccatgcaagtagagtttgttcctaagctcttacttatttattttttgagacacagtcttgctctgtcgcccaggctggagtgcagtggcgtgatctcggctcactgcaacctctgtctcctggttcaagcgattctccagcctcaacctcccgagtagctgggacaatagggcatgccaccgcatctggctaatttttgtatttttagtagagacagggtttcaccatgttggccaggctggtctcgaactcctcacctcaggtgattgcccgccttggcctcccaaagtgctgggattacaggcgtgagccaccatgcccggcctgtttttttaaattataaaatttcctgatggaattcctaccagttccacttaaagttaaattgtttaatgtgagataatttaaaactctataaagaatttgaaaatgaagatgttccctaataagacctcttttatggtttttagttttttttttttctgaggcggagtctggctctgtcgccactgcactccagactgggtgacagagccagcctccatctcaaaaataaataaataaaatactaataagtattgtaaatattgaagggataagtttcctaatccttcttagagcatctctggaaactagtatactgataagtatatttaggtaaattccagatagcattatagaagggattatgaaaatgttctgagtgctgaaattgaaaggaatatgctgtgaattgtttaaatgtattgg

SEQ ID NO: 113350 - DNA, 803 bp, Homo sapiens
gaaatggcaagacttctcttccgggttgagcaggtatatacacacctgtgcccaaaagtcaagggagctgaggggctgaagaaagaggctgatgagtccagtttctcagaaagaaatatttattagggacttagaagcagtatctcaggcatccatgagatataggatgcatgaatccaccctccagaaaatacctttttagttagcaaatatttagggcaaaggcttgtgcagctggtcatatctcatacttccttgccaaaatcatgaccacgggggaaactaaataagcacctttataaactatgctaccagcattgtttaaagaccttgctgcagaacactttggtttgtaggagtcaaatatcggtcatcatggtggtttcacttcaagatggcatcacccttgccaggcaataggctgttttcctacaacttcctaacttatgcttttttggagcatccgttcgtttgtactattttataaaactctaaaatgtttgcttttattctgctatagcaagctaagtgttattttacacaaattaacttgatttcttcattatatccattgcatggggttggtgtgagaattattcaagaaaactgaacggcacatagtaaacactcaataaatgtcactataattattgcatttattagctttatgctactatggctattattagttttatggtgtttcaggtgttaactaattcacacacatttttatattttttatgcacctttacacaaactaagtagtcaccagggtaccataagtaccccgaaactaaaccaaa

SEQ ID NO: 113351 - DNA, 808 bp, Homo sapiens
ggaagctgtggcttcaggaaacatcagcagtgctgtttctcaccaacgcccgtctctattcctcccttcctcttacaacctttttctttcttcttaaccttttctgtggcatctggtggttttcctgggcccattcggggtagagtagaaatgctgcccaccctgctgagaatgaggccccggaccttgcccagagatgctgcctgcctgctgttgggatgcctcacccaaggaggcctaaagtggcctgtgcctggaggctgagggcagctgtcatttagggagccaaacctggcctctgccctggcctttccctcagaccacgggcatcacatgacttccttagccacttctgtgagattccacagtggccatgatgctgtcctcctcttgatggagtgagtcccggcctgaggctcctgcgtgccccctgcctcggcccgtcgtgttctcccttcccacaaccctctgcgcccccaggtcctcccagaactccctgatgtctccaaggccaccctcaaagggaccctaatcccatggtttattctccagccgctggcatgccccacactgctcttctcaatcagactttacacctccctccggggaagcagccatgtccaggcactgtggtaactggagtagagggtaacatcaggatctttcagacatttgaagtcagcctaaaaaggcacgcacatttggcagccttgttattttagcaataggcagtgttttccttctatctagtttctttctacccataaagtcataatttggcaaattataaacatgatgtcagagtata

SEQ ID NO: 113352 - DNA, 259 bp, Homo sapiens
tataaggacacggatcccattcatgagagctaatcaccccatggcctaatcacctcccaaaggccccacctcctcataccatcaccttgagggttaagatttcaacatatgaacttggggacacagactttcagagcatagcacccccaatttcattccatatccccccaggatcccccatggcaccagccacctcaccctgtgtcacagttgactgccacataacacttgccccagatctggcttactgtacatctca

SEQ ID NO: 113353 - DNA, 644 bp, Homo sapiens
agtagctgggactacaggcatccaccaccatgcccggctaattttttatatttttagtagagatggggtttcaccgtgttagccaggatggtctcgatctcctgacctcatgatccacccacctcggcctcccaaagtgctgggattacagctgtgagccactgcacccggcccaattattctatattatttaactgttaattctaatatctgaaattcttgggagtttaagtttattgtttgttgtgtctgcagattctgtaatatggtggtttgttttcttttatctcttattgtgagctcatgtttaattggccgttcttcaaaggatacctggaaacctacactgaggatgtttaccgccattgaagataaatatgtgtgtgtggggtgtgtgttggggggcagagacatggaactttctggttaagtttggaatgtacagatttaattcctctatctttcagctagtttaaggcttaaatgcctgtttatagtgctaataatggcatttgtcctcaggacaatcctgtcttcttaactatacttaccactcatctccatgagactccaacacaaaataaaaattaatttttattcagaacttaagttgttttgaagcaacagggcccttcagagtttct

SEQ ID NO: 113354 - DNA, 619 bp, Homo sapiens
cctgtgtcctacccaggttattcatttccagctactgctcttcctttgctcatagcacacaacaccagttgttaggtcctggaggaagtaaaaatatgtgtaactatggtccctggctatatgaatcaggatgctctggacaagaattaaattatgaggaaaatttattttatttcataacattagtacgtgagtaggtaagcccaggagtttggtgattcagcaactctgagacctcttaaggggcctgaattctttccatctttcttccttgccattctaattaggtcagctgtgctctcagactgcctgccttcctgctgctgcagtttcaggcatcacacccagagataacattcataaaagaacaggagcatctcttctgtgttttcttctaaggaatgaaggaaccatttcccagaagtccttcaagaatcctcttctaggccgggcacagcggctcacacctataatctcaacactttgggaggccaaggttgggggattgtttgagtccaggagtttaagaccagcctggaacatagcaagaccctgtctctacaaaaaatataaaaaatgagcggggcatggtggctctcgcctgtggttccacctacta

SEQ ID NO: 113355 - DNA, 371 bp, Homo sapiens
gaaagggcagtgcaaagggagaaaaaactgtatcactcacagatgctcagctctgagccgatgtttctgctgccagctgtcctgcattgctgcagactccacttgctcactagtttcttgaccttatgggtttcttcctcactcaggaggcaaagtatttcctctagggaattaaggttctatcaccacctaaatatgtcattggcaagatgttaaaatgagccaaaataaaccatgtgtactccatcactgggagtaatttctctgtgactggagatgttgaaacagagttcatagtgtccacttggaaggattgttgtattatagttggagattacttttcaaggtctttccaacctcaagagattttg

SEQ ID NO: 113356 - DNA, 109 bp, Homo sapiens
aagctgccagcctagagaggaagaccaactccctgagttgcttctaagccatccaggcctgacttaaatgcaggtctctgctgatgtttgtgggaggaacaaagccttt

SEQ ID NO: 113357 - DNA, 985 bp, Homo sapiens
actgtatttgtacacagtcttctaagccatgaccgatctgcccgtgtttcacttaagagagaattaaggaaaatcatccagaattcccactccaaaagcccaagctctgcagccctgcagtgtggttttgctccatctggagagaacctcacacagactcccctgccaaaatgatgtaacatgatgactcagggatgtgagcgtgagaggaaccaacatttagttcttatacccacatatgctgtgtgttgtgtgattaggtttatttaatgaacttaatgcaagctgagaggcttgacaaaacgtccccttttgtggactgaagtagctatctttcagagaaagcatgcagatttagttggtgttaggttgtttatgttgaataaaaatctatttaaagacctggctgaagtgcattcagcctttcactgtctgcacttacaataaaaaagaaagattttattatgcatgacagagatccagattcttagagattgcctctttccctctggtctgtggaatctgccagaagccatctgttaatggatcttggaactggctgtagaaggcagagtaggttcctttgagaactgataggtccaaattattctctatccttgggtgccagatacgttgttccaaataagcattagtttgaatttgtaaagaaaacagctttgtacagtagtcattctacaaatagttttaagcagcattttgtatttatataagacaccatcctgctcgaccttcccctgggcacaaagctcacacctggtttacccttttcagagaggaggtgagtcacggaggtagccataataagtgttagaaaagagtgcctcctgcttcagctgaggaagacatttatcatcctccttttgtcctttaattcacgtctttgacatttggaaagtatttggaaagccaaaactacagaccaaaaattgtgcccttaattgagtgtgattgttaaaaaaaaaaa

SEQ ID NO: 113358 - DNA, 505 bp, Homo sapiens
gaaaattcataggagttcatccctgaatttatgcctgccaaatgcatgttccagcctggccagaaaccccaacaatattaagccctttgtttccaagaaatcacttaaagctttgttccctcacttccccagaataggctttgtgactgtcagggaagctgaagccagaccagcttatttttccttgggagctttcatccaaccattgaaattgtgccttttatttacaaaggtaggctgtgcttacttcacagtttttatattaattacctttcatattcatttacatgtagatagttgtggaaggctgcaaaatggcccctaaagatgtccagatcttaatccctggaacctgttaatgtgttactttccatggcaaaagaactttgcacatgtgattaaggctcttaaagtgagattatcctggattatttgggtagatccaatgtaatcccaagggtctttttttttttttttttcaggatctcatagtaaagtttaagga

SEQ ID NO: 113359 - DNA, 231 bp, Homo sapiens
tttttttaatatctgatgaagttgtttttagggaacactggattgcttttaaagtactttcatcagtatccagagaaagtgtcctggagtagcaccttatatcctcttttctagtttgtcagtttctaactcccattctactatttcaactatattttaaagttttttctcccttttttccagagaacctattaatattgcatcatgtggaatgtatttttcaaaatgacc

SEQ ID NO: 113360 - DNA, 762 bp, Homo sapiens
gtttattctagcagtgcacatttggtttaactgtgatgtaatgttaagggaaaaaatgtcaagacaaatagatgaatcccaactatgtaaaaacaaacaaaaagtaaaactggaaagaaaatgttaatagtggttgtctctggttgacaagattctgggtaattcattttccttcgtgtttatatttgttcgttccagagtttctaaggtgagcatgcatgactttctaagaaggaaaagcaaacaagaaataagggcaagtctacatagataaagatcgtatagtgagacaatgtcttagtgtaacaatccttgtgacatttgaaatttcataccatatctagtaccataccatagtgagccaaaggaaaagttacaccaatacactcctatgtgacttgcttatcggaatttttaccccgtagaaatgaacaatccctccctccgcccctgtcattttttttcattctttaaagtctgtcatcttaaacatacttgaggaactaattcataggtaggaactttatagtggattctgtttcaaaatgttgattccttgttatacaaataaagtggtgtttattagaatcttggtaaatttcttggatatgtaatacttatacatgtaaaaaaaatttcaggtaactaaagtgtctgtagtgaaaatgaagtctctcttcttccatcccctaattccccttccagagacaataattgttcctggtttcttccatatctttccagggatcatctatgtatatg

SEQ ID NO: 113361 - DNA, 529 bp, Homo sapiens
cccagagccaatgcctgccccttcttcccaaatactggcctcaggcttccttgactgagagcactttcctttccaagcactttgggctttccaggcagagagaaacaaacaacgcatggacccagtgcccacccaggtcagtggctgttcagcacaacacagcagaagggcagctccatctgcggggacttcatcatgtttgacttgcacagttgtggtcggtgccagatcacagtaagaagactggtattcttctgttacaggcacactaatgcatcatccttccaccactaaagtaaatcttagcaatcaagtttctttccagatactgtctaaactaaaacctagagggctaccactgttcaggtgctatgctgggatatgcttgtgacagcagcattgttgtctctttcaggagctagtgtggactctctcagtgtcatcgagaacgcaccactgcactccagcccaggagacagtgcgaaacaccgtgtcaaaaaaaaaaaaaaaaaagaatcagagaaatgta

SEQ ID NO: 113362 - DNA, 258 bp, Homo sapiens
cccgtctttaactcaactaaggaaaagtcctcaacatttttggtgcgcaacgtgggggctcgagaagtgaaaccatagatgtaaaggtgaagagtgtcggcaaatacactttctgccatgtggaaaaagctggcctgcagtgaaagggagaaatacagcagacacacatggagactctgaggcaagaaacaaagacctttcaagaagtattaaggaagccagatctcatgccttacagcacagtgggaagaaccactg

SEQ ID NO: 113363 - DNA, 379 bp, Homo sapiens
gctagtctagaggtcccgagatcttcttagaggattagatgaagtgatctggtcagttactttcaggagcttgtgacgttcatgcggttatgaaaaagtggttgacagagaagaacaaggttcatttccctctgtctgcggcctcatgagtagttttatcctttggaggaacagcagggctagaaagccagagagacaggggctctggccctttctgatgctgtttttcagcacctgctttccaaattttcagtcatcatttcctgtgacatttgttctttcataagaataacaacctcatgtgttcattttattttcactttactaattcatcaccacgtagttaacttaccatggtagaaaaacgagaagcggcgaa

SEQ ID NO: 113364 - DNA, 706 bp, Homo sapiens
  misc_feature (236)..(236): n is a, c, g, or t
  misc_feature (252)..(252): n is a, c, g, or t
  misc_feature (264)..(264): n is a, c, g, or t
  misc_feature (275)..(276): n is a, c, g, or t
  misc_feature (294)..(294): n is a, c, g, or t
  misc_feature (305)..(305): n is a, c, g, or t
  misc_feature (308)..(308): n is a, c, g, or t
  misc_feature (316)..(316): n is a, c, g, or t
  misc_feature (324)..(324): n is a, c, g, or t
  misc_feature (329)..(331): n is a, c, g, or t
  misc_feature (346)..(347): n is a, c, g, or t
  misc_feature (349)..(350): n is a, c, g, or t
  misc_feature (354)..(354): n is a, c, g, or t
  misc_feature (356)..(356): n is a, c, g, or t
  misc_feature (360)..(360): n is a, c, g, or t
  misc_feature (387)..(387): n is a, c, g, or t
aggtgccgtgcccgtcctccctgcccacgcaggtgctcagagggacaggtgggccaggactcctccatgtggggacgaggcaccctcctccccagccacgccccaaccacccctggccccccaccccacccccaaggggcctcccagcgcccaggaccgtgtctgggaaaaggtctttgcccggagagtgggaagagagaggggagggtgagcagaggacaggccgggagtttttnggaaaggaaaaaaaanaataaaaaaaanaaaaaaaaaannttgcacaagctggaatanaatggaaaaanaanaaattaanaaaagatnaaaannntgggctaaaaaaatnntnncaantnaacntctaaaataaatgggaacaaaaatgcnaaaataaaggatgaggctgctgtgtggcctgtggctgtggctctccttgctgaaagtcctgcaggcccagaccccaacccccctgccactcccgcccccgatgcagagcttccaaggaaaccagttccagggggaatggttcgtcctgggcctggcgggcaacagcttcaggccggagcacagggcgctgctgaacgctttcaccgcaacttttgagctaagtgatgatggccgctttgaggtgtggaatgcgatgactcggtgagtggctgtccctgccgttccaagcgggtgaggaggatcccgggcctgggtccca

SEQ ID NO: 113365 - DNA, 1717 bp, Homo sapiens
aggtgccgtgcccgtcctccctgcccacgcaggtgctcagagggacaggtgggccaggactcctccatgtggggacgaggcaccctcctccccagccacgccccaaccacccctggccccccaccccacccccaaggggcctcccagcgcccaggaccgtgtctgggaaaaggtctttgcccggagagtgggaagagagaggggagggtgagcagaggacaggccgggagttttccgggaacggaggaagagcagtggaggagatgagatctcagtcttgcccaggctggagtccagtggcacaatcatagcttactgcaggctcaaactcctgggctaaagcaatcctcccacctcagcctctcaagtagctgggaccacagggatgaggctgctgtgtggcctgtggctgtggctctccttgctgaaagtcctgcaggcccagaccccaacccccctgccactcccgcccccgatgcagagcttccaaggaaaccagttccagggggaatggttcgtcctgggcctggcgggcaacagcttcaggccggagcacagggcgctgctgaacgctttcaccgcaacttttgagctaagtgatgatggccgctttgaggtgtggaatgcgatgactcgaggccagcactgtgacacatggtcttatgtgctgataccggcagcccagcctgggcagttcactgtggaccacggtgtggagcccggggcggacagagaggagacccgggtggtggacagcgactacacccagttcgccctgatgctgtcccgcagacacacgagcaggctggccgtcctcaggatcagcctgctgggcaggagctggttgctgcctcccgggacgctggaccagttcatctgcctgggcagagctcagggcctctcggatgacaacattgtcttcccagatgtgactggaggtgccctggacctcagcagcctgccctgggtggcagccccagcctgaccactcagacagccgcggcccccaaggcctgactcttcttgtgggagggcgaggtcagcctgagtccctcctcttcctggagggatgcccaccgtgcccttctgattcccgcctctggtcctttacatgtgcataaccacatgcacacacactcacgcatgagcaaacgtgtacagactggcacatgcctccacatgcgaacacccacttacacacacgccactcacactggcacacatgctgtctacccgtgcacaggcacacgtgctggtctgcacacacctgcacacacctgcacactcgctatgccaggcctcctgggtctgcagtgagtctgggggcccatggggacagggacaggtgaggggcttcctgaggacctggggctgttgggagccgctgtgggccacatcttctgccccttctcagcctccctcaccccagccccttcccctagacccactgctggtcccctttctccctcctgcttctcacctgaagccacctgcccctcctttgtgccctcccttgcttcctcctgggctctgtcccctgctccccctttgtcctccatcccgactccatctcccccaccaggctggtcaccccaggccagcgtctgttgaaggatgaagcagctcctgtccggcccagccctgcctcacagctgtgcgagctctgccctcctcagctctcaaacctgaataaatgcaccaagcccagaaaaaaaaa

SEQ ID NO: 113366 - DNA, 1772 bp, Homo sapiens
atcccagcacttccggggctgggcgcgctggctcacacctgtaatcccaggacttcaggggccgggcgcgctggctcacacctgtaatcctagcactttgggggccgggcgcggtcgcgcacacctgtaatcctagcactttgggggccgggcgcggtggcgcacacctgtaatcccagcactttaggggccgggcgcagtggcgcacacctgtaatcccagtacttcaggaggcagaggcagaaggatcacttgaactcaggagtttgagaccagcctgagcaacatagttagacaccatctccactcatgacgcttggccactcccgccgtgggtccctctgaataagtggctgaaatctcctgaggggcccacctcagcatggacctgccagcttccggagccttccgcctccacctgtcccctcctacagaggccagcactgtgacacatggtcttatgtgctgataccggcagcccagcctgggcagttcactgtggaccacggtgtgggtaagccagtcacaggagggagggacggggtgctggcccacagggatgtgacgtctgtgccgcctcagagcccggggcggacagagaggagacccgggtggtggacagcgactacacccagttcgccctgatgctgtcccgcagacacacgagcaggctggccgtcctcaggatcagcctgctgggtgagcctcccaccccgtcctgggcccgtgtgtggccctggaggcacctccttccaggctttgggtcagaccctgcctccccaccccgcctggagtgacttgggggtacagatagttcaatctcccacctacccagcccccaaccccctgccaagtgcacagacccatgctgggctccctgggctgcaggcaggagctggttgctgcctcccgggacgctggaccagttcatctgcctgggcagagctcagggcctctcggatgacaacattgtcttcccagatgtgactggaggtgccctggacctcagcagcctgccctgggtggcagccccagcctgaccactcagacagccgcggcccccaaggcctgactcttcttgtgggagggcgaggtcagcctgagtccctcctcttcctggagggatgcccaccgtgcccttctgattcccgcctctggtcctttacatgtgcataaccacatgcacacacactcacgcatgagcaaacgtgtacagactggcacatgcctccacatgcgaacacccacttacacacacgccactcacactggcacacatgctgtctacccgtgcacaggcacacgtgctggtctgcacacacctgcacacacctgcacactcgctatgccaggcctcctgggtctgcagtgagtctgggggcccatggggacagggacaggtgaggggcttcctgaggacctggggctgttgggagccgctgtgggccacatcttctgccccttctcagcctccctcaccccagccccttcccctagacccactgctggtcccctttctccctcctgcttctcacctgaagccacctgcccctcctttgtgccctcccttgcttcctcctgggctctgtcccctgctccccctttgtcctccatcccgactccatctcccccaccaggctggtcaccccaggccagcgtctgttgaaggatgaagcagctcctgtccggcccagccctgcctcacagctgtgcgagctctgccctcctcagctctcaaacctgaataaatgcaccaagcccagaaaaaaaaa

SEQ ID NO: 113367 - DNA, 1056 bp, Homo sapiens
aggtgccgtgcccgtcctccctgcccacgcaggtgctcagagggacaggtgggccaggactcctccatgtggggacgaggcaccctcctccccagccacgccccaaccacccctggccccccaccccacccccaaggggcctcccagcgcccaggaccgtgtctgggaaaaggtctttgcccggagagtgggaagagagaggggagggtgagcagaggacaggccgggagttttccgggaacggaggaagagcagtggaggagatgagatctcagtcttgcccaggctggagtccagtggcacaatcatagcttactgcaggctcaaactcctgggctaaagcaatcctcccacctcagcctctcaagtagctgggaccacagggatgaggctgctgtgtggcctgtggctgtggctctccttgctgaaagtcctgcaggcccagaccccaacccccctgccactcccgcccccgatgcagagcttccaaggaaaccagttccagggggaatggttcgtcctgggcctggcgggcaacagcttcaggccggagcacagggcgctgctgaacgctttcaccgcaacttttgagctaagtgatgatggccgctttgaggtgtggaatgcgatgactcgaggccagcactgtgacacatggtcttatgtgctgataccggcagcccagcctgggcagttcactgtggaccacggtgtgggcaggagctggttgctgcctcccgggacgctggaccagttcatctgcctgggcagagctcagggcctctcggatgacaacattgtcttcccagatgtgactggaggtgccctggacctcagcagcctgccctgggtggcagccccagcctgaccactcagacagccgcggcccccaaggcctgactcttcttgtgggagggcgaggctggtcaccccaggccagcgtctgttgaaggatgaagcagctcctgtccggcccagccctgcctcacagctgtgcgagctctgccctcctcagctctcaaacctgaataaatgcaccaagcccagaaaaaaaaa

SEQ ID NO: 113368 - DNA, 1228 bp, Homo sapiens
atcccagcacttccggggctgggcgcgctggctcacacctgtaatcccaggacttcaggggccgggcgcgctggctcacacctgtaatcctagcactttgggggccgggcgcggtcgcgcacacctgtaatcctagcactttgggggccgggcgcggtggcgcacacctgtaatcccagcactttaggggccgggcgcagtggcgcacacctgtaatcccagtacttcaggaggcagaggcagaaggatcacttgaactcaggagtttgagaccagcctgagcaacatagttagacaccatctccactcatgacgcttggccactcccgccgtgggtccctctgaataagtggctgaaatctcctgaggggcccacctcagcatggacctgccagcttccggagccttccgcctccacctgtcccctcctacagaggccagcactgtgacacatggtcttatgtgctgataccggcagcccagcctgggcagttcactgtggaccacggtgtgggtaagccagtcacaggagggagggacggggtgctggcccacagggatgtgacgtctgtgccgcctcagagcccggggcggacagagaggagacccgggtggtggacagcgactacacccagttcgccctgatgctgtcccgcagacacacgagcaggctggccgtcctcaggatcagcctgctgggtgagcctcccaccccgtcctgggcccgtgtgtggccctggaggcacctccttccaggctttgggtcagaccctgcctccccaccccgcctggagtgacttgggggtacagatagttcaatctcccacctacccagcccccaaccccctgccaagtgcacagacccatgctgggctccctgggctgcaggcaggagctggttgctgcctcccgggacgctggaccagttcatctgcctgggcagagctcagggcctctcggatgacaacattgtcttcccagatgtgactggaggtgccctggacctcagcagcctgccctgggtggcagccccagcctgaccactcagacagccgcggcccccaaggcctgactcttcttgtgggagggcgaggctggtcaccccaggccagcgtctgttgaaggatgaagcagctcctgtccggcccagccctgcctcacagctgtgcgagctctgccctcctcagctctcaaacctgaataaatgcaccaagcccagaaaaaaaaa

SEQ ID NO: 113369 - DNA, 1173 bp, Homo sapiens
aggtgccgtgcccgtcctccctgcccacgcaggtgctcagagggacaggtgggccaggactcctccatgtggggacgaggcaccctcctccccagccacgccccaaccacccctggccccccaccccacccccaaggggcctcccagcgcccaggaccgtgtctgggaaaaggtctttgcccggagagtgggaagagagaggggagggtgagcagaggacaggccgggagttttccgggaacggaggaagagcagtggaggagatgagatctcagtcttgcccaggctggagtccagtggcacaatcatagcttactgcaggctcaaactcctgggctaaagcaatcctcccacctcagcctctcaagtagctgggaccacagggatgaggctgctgtgtggcctgtggctgtggctctccttgctgaaagtcctgcaggcccagaccccaacccccctgccactcccgcccccgatgcagagcttccaaggaaaccagttccagggggaatggttcgtcctgggcctggcgggcaacagcttcaggccggagcacagggcgctgctgaacgctttcaccgcaacttttgagctaagtgatgatggccgctttgaggtgtggaatgcgatgactcgaggccagcactgtgacacatggtcttatgtgctgataccggcagcccagcctgggcagttcactgtggaccacggtgtggagcccggggcggacagagaggagacccgggtggtggacagcgactacacccagttcgccctgatgctgtcccgcagacacacgagcaggctggccgtcctcaggatcagcctgctgggcaggagctggttgctgcctcccgggacgctggaccagttcatctgcctgggcagagctcagggcctctcggatgacaacattgtcttcccagatgtgactggaggtgccctggacctcagcagcctgccctgggtggcagccccagcctgaccactcagacagccgcggcccccaaggcctgactcttcttgtgggagggcgaggctggtcaccccaggccagcgtctgttgaaggatgaagcagctcctgtccggcccagccctgcctcacagctgtgcgagctctgccctcctcagctctcaaacctgaataaatgcaccaagcccagaaaaaaaaa

SEQ ID NO: 113370 - DNA, 994 bp, Homo sapiens
aggtgccgtgcccgtcctccctgcccacgcaggtgctcagagggacaggtgggccaggactcctccatgtggggacgaggcaccctcctccccagccacgccccaaccacccctggccccccaccccacccccaaggggcctcccagcgcccaggaccgtgtctgggaaaaggtctttgcccggagagtgggaagagagaggggagggtgagcagaggacaggccgggagttttccgggaacggaggaagagcagtggaggagatgagatctcagtcttgcccaggctggagtccagtggcacaatcatagcttactgcaggctcaaactcctgggctaaagcaatcctcccacctcagcctctcaagtagctgggaccacagggatgaggctgctgtgtggcctgtggctgtggctctccttgctgaaagtcctgcaggcccagaccccaacccccctgccactcccgcccccgatgcagagcttccaaggaaaccagttccagggggaatggttcgtcctgggcctggcgggcaacagcttcaggccggagcacagggcgctgctgaacgctttcaccgcaacttttgagctaagtgatgatggccgctttgaggtgtggaatgcgatgactcgaggccagcactgtgacacatggtcttatgtgctgataccggcagcccagcctgggcagttcactgtggaccacggtgtggacacacgagcaggctggccgtcctcaggatcagcctgctgggcaggagctggttgctgcctcccgggacgctggaccagttcatctgcctgggcagagctcagggcctctcggatgacaacattgtcttcccagatgtgactggctggtcaccccaggccagcgtctgttgaaggatgaagcagctcctgtccggcccagccctgcctcacagctgtgcgagctctgccctcctcagctctcaaacctgaataaatgcaccaagcccagaaaaaaaaa

SEQ ID NO: 113371 - DNA, 1600 bp, Homo sapiens
aggtgccgtgcccgtcctccctgcccacgcaggtgctcagagggacaggtgggccaggactcctccatgtggggacgaggcaccctcctccccagccacgccccaaccacccctggccccccaccccacccccaaggggcctcccagcgcccaggaccgtgtctgggaaaaggtctttgcccggagagtgggaagagagaggggagggtgagcagaggacaggccgggagttttccgggaacggaggaagagcagtggaggagatgagatctcagtcttgcccaggctggagtccagtggcacaatcatagcttactgcaggctcaaactcctgggctaaagcaatcctcccacctcagcctctcaagtagctgggaccacagggatgaggctgctgtgtggcctgtggctgtggctctccttgctgaaagtcctgcaggcccagaccccaacccccctgccactcccgcccccgatgcagagcttccaaggaaaccagttccagggggaatggttcgtcctgggcctggcgggcaacagcttcaggccggagcacagggcgctgctgaacgctttcaccgcaacttttgagctaagtgatgatggccgctttgaggtgtggaatgcgatgactcgaggccagcactgtgacacatggtcttatgtgctgataccggcagcccagcctgggcagttcactgtggaccacggtgtgggcaggagctggttgctgcctcccgggacgctggaccagttcatctgcctgggcagagctcagggcctctcggatgacaacattgtcttcccagatgtgactggaggtgccctggacctcagcagcctgccctgggtggcagccccagcctgaccactcagacagccgcggcccccaaggcctgactcttcttgtgggagggcgaggtcagcctgagtccctcctcttcctggagggatgcccaccgtgcccttctgattcccgcctctggtcctttacatgtgcataaccacatgcacacacactcacgcatgagcaaacgtgtacagactggcacatgcctccacatgcgaacacccacttacacacacgccactcacactggcacacatgctgtctacccgtgcacaggcacacgtgctggtctgcacacacctgcacacacctgcacactcgctatgccaggcctcctgggtctgcagtgagtctgggggcccatggggacagggacaggtgaggggcttcctgaggacctggggctgttgggagccgctgtgggccacatcttctgccccttctcagcctccctcaccccagccccttcccctagacccactgctggtcccctttctccctcctgcttctcacctgaagccacctgcccctcctttgtgccctcccttgcttcctcctgggctctgtcccctgctccccctttgtcctccatcccgactccatctcccccaccaggctggtcaccccaggccagcgtctgttgaaggatgaagcagctcctgtccggcccagccctgcctcacagctgtgcgagctctgccctcctcagctctcaaacctgaataaatgcaccaagcccagaaaaaaaaa

SEQ ID NO: 113372 - DNA, 1097 bp, Homo sapiens
aggtgccgtgcccgtcctccctgcccacgcaggtgctcagagggacaggtgggccaggactcctccatgtggggacgaggcaccctcctccccagccacgccccaaccacccctggccccccaccccacccccaaggggcctcccagcgcccaggaccgtgtctgggaaaaggtctttgcccggagagtgggaagagagaggggagggtgagcagaggacaggccgggagttttccgggaacggaggaagagcagtggaggagatgagatctcagtcttgcccaggctggagtccagtggcacaatcatagcttactgcaggctcaaactcctgggctaaagcaatcctcccacctcagcctctcaagtagctgggaccacagggatgaggctgctgtgtggcctgtggctgtggctctccttgctgaaagtcctgcaggcccagaccccaacccccctgccactcccgcccccgatgcagagcttccaaggaaaccagttccagggggaatggttcgtcctgggcctggcgggcaacagcttcaggccggagcacagggcgctgctgaacgctttcaccgcaacttttgagctaagtgatgatggccgctttgaggtgtggaatgcgatgactcgaggccagcactgtgacacatggtcttatgtgctgataccggcagcccagcctgggcagttcactgtggaccacggtgtggacacacgagcaggctggccgtcctcaggatcagcctgctgggcaggagctggttgctgcctcccgggacgctggaccagttcatctgcctgggcagagctcagggcctctcggatgacaacattgtcttcccagatgtgactggaggtgccctggacctcagcagcctgccctgggtggcagccccagcctgaccactcagacagccgcggcccccaaggcctgactcttcttgtgggagggcgaggctggtcaccccaggccagcgtctgttgaaggatgaagcagctcctgtccggcccagccctgcctcacagctgtgcgagctctgccctcctcagctctcaaacctgaataaatgcaccaagcccagaaaaaaaaa

SEQ ID NO: 113373 - DNA, 664 bp, Homo sapiens
gtccctgtgggcccagcagctgccaggatgaggctgctgtgtggcctgtggctgtggctctccttgctgaaagtcctgcaggcccagaccccaacccccctgccactcccgcccccgatgcagagcttccaaggaaaccagttccagggggaatggttcgtcctgggcctggcgggcaacagcttcaggccggagcacagggcgctgctgaacgctttcaccgcaacttttgagctaagtgatgatggccgctttgaggtgtggaatgcgatgactcgaggccagcactgtgacacatggtcttatgtgctgataccggcagcccagcctgggcagttcactgtggaccacggtgtgggcaggagctggttgctgcctcccgggacgctggaccagttcatctgcctgggcagagctcagggcctctcggatgacaacattgtcttcccagatgtgactggtaacatggttcacctgcaggcatgctgggcagtaggcacggggcccgcaggaatgagtttggttgaccctagaggagctggacccagtgtctacccagggagctcagccccagcctgcgctcaggggtctccaggctcctgggtccctgtgctcaaaccaggctctgagccacctcctgccgccccgggtcccctgtcctggg

SEQ ID NO: 113374 - DNA, 813 bp, Homo sapiens
tctgtgcgtgaggggaaacaggctcgggaaggccgcacagccactggccagggtcaccatgtccctgccagacccagattccagggggaatggttcgtcctgggcctggcgggcaacagcttcaggccggagcacagggcgctgctgaacgctttcaccgcaacttttgagctaagtgatgatggccgctttgaggtgtggaatgcgatgactcgtacttcaggaggcagaggcagaaggatcacttgaactcaggagtttgagaccagcctgagcaacatagttagacaccatctccactcatgacgcttggccactcccgccgtgggtccctctgaataagtggctgaaatctcctgaggggcccacctcagcatggacctgccagcttccggagccttccgcctccacctgtcccctcctacagaggccagcactgtgacacatggtcttatgtgctgataccggcagcccagcctgggcagttcactgtggaccacggtgtgggcaggagctggttgctgcctcccgggacgctggaccagttcatctgcctgggcagagctcagggcctctcggatgacaacattgtcttcccagatgtgactggtaacatggttcacctgcaggcatgctgggcagtaggcacggggcccgcaggaatgagtttggttgaccctagaggagctggacccagtgtctacccagggagctcagccccagcctgcgctcaggggtctccaggctcctgggtccctgtgctcaaaccaggctctgagccacctcctgccgccccgggtcccctgtcctggg

SEQ ID NO: 113375 - DNA, 1769 bp, Homo sapiens
  misc_feature (1264)..(1264): n is a, c, g, or t
  misc_feature (1271)..(1271): n is a, c, g, or t
  misc_feature (1422)..(1422): n is a, c, g, or t
  misc_feature (1488)..(1488): n is a, c, g, or t
  misc_feature (1495)..(1495): n is a, c, g, or t
gaattacgcatcaaatttgattctcagagcaataaattatccatgaagtgctctcgttctcagtagcggcatcatggccagtagtgtctttgaggagttcaccacttagattactgagtaattgtggtttccacatttgaaaacaactccttttataattattcactgctttttgtcagtgaaatagacatcttgcctcctgaagtagcttcatcacagagtgtcatgaagacagacagtcaggctgaaatggacagttctttgtggactctacccttcccttcaaggagtatgtcatatatcacaaaagaaattgccttacactggttcatgtttgcagttactgttgtacattgcatagatgtacacacgaatttaaatgtgatgtctttgtatatatctgtataatgttgagattacttacgaaatatgtctgagtgacacttttcacccttgtacagccaaaataatgtatatatggaaagtgacagacaaattctctaatctctttggtacctataacttattagaatcctctggatgagggttagaagagactttttccaaacttctacatgtagaagtatcataaatgtgctacacatttatgtttgtggatttaattaaagtattttaatatggttttcagtgctaaaattggagtcagatacttcttggttttaagctgtctacctaattgctgtctcccagcagactggtggcatgcccagtggctttgggggcaaggatagaaatgccatcaggaaatagctgaattcattgtgaaacatgaattcagtcatggtgataattggaaactcctttcaggtttttgcaagtagattttgtaatgtttgtgtatgcagccttgctgttgagtcagtccaaggggttttacttaggacaagttgtaccttgccctctctccagctctgctcccacattttcacatacctagctgtttctacctcattgggtaagtcatttaccactctgtgcctcagtttactctgtagtttaccattagactgtgagctccttgagggactttgtcataatcactgttacatcccagtgcctcacaccatgcctggcccttaagaagtgctcaataaatgtctgaacaaataagtgagtggagtgagtgaattgtaagatcagaataataatatttggttgtctatcgtacaagattcctgtatcgttgaatattgcttttaaagaaatatttgaagcgacttcaaattcagactgtgtttaaaangatttanaatcggaatccaaaatcaaagtattaaaaaataatgctgagtgtttaggattcacatacctctgagctctggtggctttgccagtcctgtccctctgctgagcaccagcccttcctgcagcagtcctgccggtgtgttctgtgcacctggngatgaagtgtgctcctcccccagcggttagcctcaatgcttttcctccctctgttttattatttgnaattagncaagaaaagcctgctgggcgggcacctgctgactcatcaactggacctggtggggtccgtacccgtccttgccacgaataggggaaataccgcgcaggcacgagccacagccctaggggtaaaaacttcacggttgcgaccttgctcgccgcaaacgccaccagttgcagcagcgccgaccgcgcggcatggaacgtccggtgcgccagacggcaaacagccgcagccggtggctactacgtccggcgcgcttttccgccacatgccgcagctt

SEQ ID NO: 113376 - DNA, 1987 bp, Homo sapiens
  misc_feature (1482)..(1482): n is a, c, g, or t
  misc_feature (1489)..(1489): n is a, c, g, or t
  misc_feature (1640)..(1640): n is a, c, g, or t
  misc_feature (1706)..(1706): n is a, c, g, or t
  misc_feature (1713)..(1713): n is a, c, g, or t
cagaagcttcttcatgaactctgcgaattcgctcctcgggaacggcctgtaagatgaacatggtcactcaacctgataggtccatagagatagtctctggaggatctatgaccatagtggctgtggatttgtcacactaatttgtatcagcgcggtcggcaggcgaagtcgtttctcgagcggaaatctcagcagtggtacgtacttgagagttcattaacatggaatctatctaatccgagtagatcgctagcgtcgtacgcttcgtaacaatcaacagtgtacggcatcatggccagtagtgtctttgaggagttcaccacttagattactgagtaattgtggtttccacatttgaaaacaactccttttataattattcactgctttttgtcagtgaaatagacatcttgcctcctgaagtagcttcatcacagagtgtcatgaagacagacagtcaggctgaaatggacagttctttgtggactctacccttcccttcaaggagtatgtcatatatcacaaaagaaattgccttacactggttcatgtttgcagttactgttgtacattgcatagatgtacacacgaatttaaatgtgatgtctttgtatatatctgtataatgttgagattacttacgaaatatgtctgagtgacacttttcacccttgtacagccaaaataatgtatatatggaaagtgacagacaaattctctaatctctttggtacctataacttattagaatcctctggatgagggttagaagagactttttccaaacttctacatgtagaagtatcataaatgtgctacacatttatgtttgtggatttaattaaagtattttaatatggttttcagtgctaaaattggagtcagatacttcttggttttaagctgtctacctaattgctgtctcccagcagactggtggcatgcccagtggctttgggggcaaggatagaaatgccatcaggaaatagctgaattcattgtgaaacatgaattcagtcatggtgataattggaaactcctttcaggtttttgcaagtagattttgtaatgtttgtgtatgcagccttgctgttgagtcagtccaaggggttttacttaggacaagttgtaccttgccctctctccagctctgctcccacattttcacatacctagctgtttctacctcattgggtaagtcatttaccactctgtgcctcagtttactctgtagtttaccattagactgtgagctccttgagggactttgtcataatcactgttacatcccagtgcctcacaccatgcctggcccttaagaagtgctcaataaatgtctgaacaaataagtgagtggagtgagtgaattgtaagatcagaataataatatttggttgtctatcgtacaagattcctgtatcgttgaatattgcttttaaagaaatatttgaagcgacttcaaattcagactgtgtttaaaangatttanaatcggaatccaaaatcaaagtattaaaaaataatgctgagtgtttaggattcacatacctctgagctctggtggctttgccagtcctgtccctctgctgagcaccagcccttcctgcagcagtcctgccggtgtgttctgtgcacctggngatgaagtgtgctcctcccccagcggttagcctcaatgcttttcctccctctgttttattatttgnaattagncaagaaaagcctgctgggcgggcacctgctgactcatcaactggacctggtggggtccgtacccgtccttgccacgaataggggaaataccgcgcaggcacgagccacagccctaggggtaaaaacttcacggttgcgaccttgctcgccgcaaacgccaccagttgcagcagcgccgaccgcgcggcatggaacgtccggtgcgccagacggcaaacagccgcagccggtggctactacgtccggcgcgcttttccgccacatgccgcagctt

SEQ ID NO: 113377 - DNA, 328 bp, Homo sapiens
tcaagagaatgggaaaactttattagttaataaagaaggaaggattcagttatgctttagctggaggtttttggtatggggaagctgaagataagctagctaccacgttagtgtgagcagcacatttggctttcttgattgatcctaagttggaagtggaaagaaacatgaaaaaagttttctgtcattgaccaagtccgaccttttttgctctcgattgttgcagaggttgtggtttagttccctggatttttttttgtaggttttttttgctctatcgtcctgtttggtgtggtggttttccaatatatattcagtccttcagatt

SEQ ID NO: 113378 - DNA, 451 bp, Homo sapiens
gacttaactgtctgtggatttcacattggcgatttcccatcttctccagggtccctggagaacattgagagggttttcccgttttggatgaagtgtgaataggaatccatggaccagagagcggccttggaagccatgttcactcagccccaggtggtcttcccagactttgttcataacagagaccaagacgtgcatccatgtttagcctgagcagaaaaagttgccccaaaccagctgatgtgctgggtaaatgttggcctaagcatgcttgtgtttttagtgatttgaaacgtaaaggcagcccactgacattttttaaagctttgcataattggtttttaattgtggctctttggaatagcattggccttcttccccctgactcagatgctttttttgtctcatacttgtttggcagagaggtccaatctgtcctctcttggaacag

SEQ ID NO: 113379 - DNA, 324 bp, Homo sapiens
tctctccttgtcttaacatgtaatgtcctaccatgtaataacatgtataacatgttacaataacaatggctaatgctaagtgctaacgctaaagttccttctaagcagtccgtgtatgatctcattaactcctcagagcaaatctatgaagtaggtacataggcgcagaaagatgtcgttagcccagagtaatgtgttgacagattggaaacccacataatttgtctctagggcctctgctcttcaccaaacctcctagctatcaagtaaagacaaagggaaaaatcttcaaatacttcctcttgtcttaaagggataattttg

SEQ ID NO: 113380 - DNA, 905 bp, Homo sapiens
gcacataatttttatttctaaaagttcccctctttcttgtcttgtgataaaactagtgtaacaaaaaaacaaaaacaaaaaacacaataacaaaaaaaatcctgccaaagcctgtttgtgaatattactccattccattataaattacaagattttctgtgactttttctggttaataaggagaaaagttatatcccagtaaagacacgaaagcttcaggtaattaaaagctctactaagtaatgaaaagctaatcctgtagtgaagacgtgtgggctgaaagaagatgaggtgttaaatatgcaaactaaatgtctatttattgctaatacagccctcacaagaacaaatcggatgccatgacaagtgttcttatcaacaacatttgttttcttcaagagaattgaaaagctaaaacatggacttctgcctggccacacacaaagcacagccccctcctaagaacccagaatgggaaagaaagctctagaagcaaagtacatggccactgaaagccacatacatgctaatgaggtcacgctgggcaaggtgacatcgcagctgcagagccttgttagaagtatgtgacatctacaagcacacctggacaacccactcatttggaagtaggctttattcggtcaggagtctctgaacgactttccagtctaagcattcaaaatgaaggcacaaaagaggttaaaaccacttaacccagttgtaacaagggaatttgtaccagaatttaagattacaacctggatgagatcaaaacccttaggcttccaaagggacttcacaacctttccagggttctgtggatgctacctgttaacacggtttacaatgcctcaccaataaggagagatgggtggggcaggtgaacaaggctacccagtccatgc

SEQ ID NO: 113381 - DNA, 579 bp, Homo sapiens
cttctgagcctcaattcctatatctataaaatggccatataccaactcatagtgtcattataaagatttaaagactcaccagttgtcacatgtcctcccacatcatagaccatgtggatgcttaatgagcagtggctaataaataccacttgcagtccagggcaagaagggcaattagaaaatgaattcgaggttcactttgcttctagtctatagactatttgcgggtggtatgtggcactaatgaatataaatgggtttgatcgttcactcgcattattgaatatttcatgcacctttacgcatggaatagtatgaactgatacacataaaatgactaaggtgattattctccacactagaggcaaacagaatcctgatttatgcagttcctcgttgttcctttcagttttgacccatggcaataagtgggaaatagattcacccaactcactccaaattctttataatttctttcaaagacagagattgctacattaagtatagttgtccctttaaaggaatatgggcagaaaaggcaaaagtcagattaaggggaaatagaagttgtataagtat

SEQ ID NO: 113382 - DNA, 202 bp, Homo sapiens
tgtagaccaatgtattcatctcataaatgtgcaaagagatgcttagaactgttaaatgacttgcccatgttggcatagctgataagaggcagagttaggacttcacacggttcttctgactccaagtccaaagctctctccataacatcgacgtgcctcattgcctttgggttatgcatattgtggcatttatagaaatgtc

SEQ ID NO: 113383 - DNA, 369 bp, Homo sapiens
tcacaagaactgcatctggattaagacatattagccctggctaagcagggtgactcacacctataatcccaagatttttggagtctgaggcaagagaatcacttgagcccatgagtttgaaaccagcctgggcaacatagtgagaccccatctgtataaaaaaatttttttaattagcctggtatggtagcatatgccggtagccctagccacacaagatgatcctcctgcctcagcctctgcagtagctaggactacaggcacatatccctgtgcctggctagtaaataggttgaaataacttaaagttatttatttttatttatttattttttgagactgagtctcactgttgtcctggctggatgg

SEQ ID NO: 113384 - DNA, 165 bp, Homo sapiens
ctcaccaactccaattggttcaaagatttaaacacagatcttgaaatcataaaagtactaagacaatatattagagtttttttatattttatatataaattaattatatattttacattttattttgtatattttattatatatatttatataaatttatatttt

SEQ ID NO: 113385 - DNA, 534 bp, Homo sapiens
ctgccctgcaaggaaaacctggctctgccctggtgtcctggcctccctgggcatatgtgggggagaattcctaatggtattggttacaggctcctatgcgagaccactcatctgtgtaggagaaaggaaaaagatgggggaaagaagagcagcagggagaggagaagcctctggatgatactctaaccccctgccatccaacacctgaacatcagtctcttcatccagtgctctcagctggcccagcccccagcctggggtcagatgagagcttcctgcaaatgcagatctctttcctgtggctccttctcaattacagacagctcctccacaaggtgcactctggccttgtgctccctccccaaaccagcccagccctcccagcctgcatcatcgtggtcctgtaggggctagaggttctcacacccatcgtggtctggcagaggctggtggttctcacacccatcgtggtccggcaggggcttagtggttcttatacccatcgtggttcaggaggggctagtggttctcaca

SEQ ID NO: 113386 - DNA, 326 bp, Homo sapiens
actgtgttgcctaggctggtcttgagctcctgggctgaagcaattatagcacttcagcctcccaaaatgttgggattacagatgtgagccatggcacccagcccttttttttttttttttaagagctgcgtgtttttattgctgtcttttcccttagagcaagaaattaaattgagagcaagagaaaatgctgcacaaaagaagctctgggctgggcgcggtggctcatgcctgtaatcccagcactttggaggccgaggcaggtggatcacgaggtcaggagttcgagaccagcctggccaagatggtgaaaccccatctctact

SEQ ID NO: 113387 - DNA, 379 bp, Homo sapiens
catgagcctgtaatcccagctacttgggaggctgaaacaggagaattgttggaacctggtggcagaggctacagtgagccaaaatcacgccactgcactccagcctgggcaatagagcgaggctgtctcaacaaacaaacaaaatacaacaacaacaaaaagaactaggatacctcagaaggtactttggaaaacatggggttttgaaagtctgagagcatctatgagaggaatgggtaagacagatctagatttaccgcagagtagttagggcacactgtctttccccttcagctgttggtacagcactgtgagatggcagtgtaactgcaaactccaatgagcaagtatttcccaaccctacctaattttcagactc

SEQ ID NO: 113388 - DNA, 170 bp, Homo sapiens
ctcccctagacaatgctcccccagtaggtaccaacactgggccttgaattgggggaggcaggagtctacacagcctccaggctctcctatttccttaggcctgaaccagcttcccgaatctatttccccacaagtaaaatggatgttaaaatacctgctttagctccagg

SEQ ID NO: 113389 - DNA, 183 bp, Homo sapiens
ccccatcaagaaacagaatctatttccccaccttttaaatatgaggtgtggagtgaccattagcttgaaatgaccaatgggacatcagcaagcaaacaaaccaaacccccaaaacacttggggcctctgagttcctcaattttccctgccactgccaccatgtagataacctgccatgctaga

SEQ ID NO: 113390 - DNA, 138 bp, Homo sapiens
gtgagcatcctaagtagagttgcctcaggtcttcctgcgatttttttggggggcctagagtctcatcaacattgctcaagttgattcaagagaaaggagggtggtagttataagataaatgacagaccaaatattaga

SEQ ID NO: 113391 - DNA, 182 bp, Homo sapiens
ggaggggctattccactttgtatttctagaacatagcacagtgcctggcccataaacgaaagctccagaaatacgtgttgtatggaattacgtcccgaggttccttccactatcaatcatctacttaaaaaggagaaaatgctctctttaccttaagtacctttcattattaaaaaaaaaaa

SEQ ID NO: 113392 - DNA, 521 bp, Homo sapiens
gggatagcattgggagatatacctaatgctagatgatgagttagtgggtgcagcgcaccagcatggcacatgtatacatatgtaactaacctgcacaatgtgcacatgtaccctaaaacttaaagtataataaaaaaaaaaaaaagaattttagtttttaccctaagagcattgtgaagctgttgtaggtttttaagggggtagtatggataggaggtaacacttattatcatacttgtacatctaaaatattgtaggcagaatgtagacagcaggagagcttgatagtagatccagagacacccagcaagagacagtgtaattgtagtcaggggctgcaggagcaatggagaagtgggcagatttaaaggcagggtgtcccggatggagcacactgttgaatggcggaagcacgcactgagtttgggaagactgaggaaggggcaataggttcgtcagggctggaaggcagcaggggcatgcgaagttggagacaccaagagtagatgccaagaagaact

SEQ ID NO: 113393 - DNA, 345 bp, Homo sapiens
agaaataaaaggaatgcagatcagaatgaaagatataaatttacctttatttgcagataacatgatcatcttacatgaaaaaattctacaaaatctatcaaaaaagcctcctagaacatataaataaggttagcaagttgatagaacaaaataaacacaaaaatcaattgtgtatatatacgcacacacacacactatatataaaaaattagcacatagaaacaaaaatgtaaaatgaaataccatttgcaaacatttttaaaattaaatacttagctttaaatatagccaaacatttgcaggtcttgtatgcttcaaactataaaacactgatttaaaaaatca

SEQ ID NO: 113394 - DNA, 289 bp, Homo sapiens
ggtctgttttcctcctagagctttaggagatgattgggagatgtccttgtgtttcctgtgcctgcctaatgtcactgacacaatgcaaatcaataaaccctgtatggtttagaaagtctaaaagactttgtcactaagtttttggagcagatttgaacagaaagttaacatatttgttggatattaagtatagaaagagaaactatatgtattgtctttcttactcctataattctaagctggtgtattccaccaaaaatccaattccaggtgtttttctttctttttt

SEQ ID NO: 113395 - DNA, 584 bp, Homo sapiens
gcagcagttggaggggaggacagtaaccagggaaggttagcgccagcagggctgcacgccacaggctggggctgggggagagggaaggtacagagagcggcaaactgtcgaactccttcctcttcatgcttcacggttccccagccacgtgtttggtgtaaatgaggagggccggaggggccagcctgcagggtgggttccagttgccctgaaaggcagggagcaggcagagatagagtgcagggcatggcattggaggcccagtccaccctgttcaccctcctctcccacatcaggctggcactctgcacatttagggtgtggccaagcctcagccagcagaagcaagtctggtcttgctgaccagcctggccggctggcggagaaaaggagaagacggtgtctctagggagatcccgggcctgagcggcagcgtctgtcaaatgtgtttggcttctgtctcttgagtagcccatctgaaatgaggaaagggccaaggggccccggggctcaggtccaccacccacactcccattctcacagccctgctggaccaaggcatctctcaagtgggccgcactggc

SEQ ID NO: 113396 - DNA, 694 bp, Homo sapiens
gaagacggctcaatgcagttattgaagaataagaaggcccatgatacgctgtctgcaagctggaaaactggggaagttggtggcatatctcagtccaagttcaaaggcccgaacaccaagggagctgatgatgtaactctgtctaaggccaaaggtctgaggacctgggaggccagagtctaaaggctggagacctggagttctgatgttcaaccaagggcaggagaagatgagtgtcccagctccagaagagaaagtgggcaaattcacttttcctctatttttgttctatccaggccctcaactgactggatggtgcccacccacattgggttacgggggatctttcttactcagttcaccaattcaaatgctgatctcttccagaaacaccctcctcatggatacatccatacataatgctttacccgctttctcggtgtctgttaacccagtcaagttgacacctaaattaaccaccacagtcacacagctatgaagtggtagaacagggacactgagcaggttgcctgggtgcagagctgatgccttagccctggcatactgcctcctgctccttgtagaaagggacaaaggtggcacttgcaacttcatggtcttctttggaatttctctggatgatttttcaaccatgctctgatatgtgctctcgaaaccctgaagtgacgttcta

SEQ ID NO: 113397 - DNA, 566 bp, Homo sapiens
ctttttttaaattttatttttcttttgggacagagtcttactgccacccagtctggaatgcagtggcataatcgtggttccctgcaacctcaaactcctgggctggagtgatcctctcgtcttggcttcataaagcaccaggatcacagataaactgtaatagtacctggtcacaacagcgtactttaaatcagtggtcagagaaggtgcccgagagggagaagcacaaagacctgaaggagggtgaggggtaagccacacagatacctggggacagcattccaggtcaaagaaggaacaagggcactagtcggaggcagcagacatggggcttcagagcaggcaagaggcccgtgtgctggaacagaatgagaatgggagtgggtgacgatggaaaagacaagagcctcccaaaacaggcaggagtcaggcacagcattcagtgtggggcccaagctgagacctggcagaaggaaggaagagggaaagcatgcctatcccccaaacacatggggtaagggggcacatgggcagaagaaaggaacaaaaattgaccacacaaaggc

SEQ ID NO: 113398 - DNA, 297 bp, Homo sapiens
  misc_feature (33)..(33): n is a, c, g, or t
  misc_feature (58)..(58): n is a, c, g, or t
ctgctaaaaaattaaacatatccaccaacagancaaaaaaacaaactacaactttagngaaggaaagcttgagaagaaatcgtcaaatgttgcaggattcttgtaagcacagagaactatgaagacctgacaaggagggtatctttttctttcatgcttgtccaacaagagagcacattgttagtgtgcttgaattccaacaaaagaaggcatagaatgaatcttggttgttcccttttacttgctaaatatgtactgaatgaataaatggtgcattatacatctataaaacagctg

SEQ ID NO: 113399 - DNA, 777 bp, Homo sapiens
gtaaactataattcaaattcttattttcaaatcatttaaacattttgtttctacttattcaatcctaaatacttaaaaggtagagatgtgttatagaagctgctttttgttttctacaaaagaggttaattgatatcctcagtcatataaggaacttgtggcagaataagaattagtgtcccagccaggcgcagtggctcacacttgtaatcctagcactttgggaggccgagaggggcagatcacctgaggtcaggagttcgagaccagcctgaccaacatagtgaaaccccatctctgctaaaaatacaaaaattagccaggcgtggtggcacgcacctgttatcccagcaacttgggaggctgaggcaggagaatcgcttgaacctgggaggcagaggttgcagtgagccgagatcacaccactgcactccagcctgggcaacagagtgagattccgtctgggaaaaaaaaaaaaaaagaaaaaagaatgagtgtccctaaagctctccattcccatctgatggttgttcagcaacatccttgttggttcgctctttttttcctcttcattaagtgaaagcaaactgctgttttcaacatacgtattttctgagagattatacattgctattaccttttggctcagactcgatttttctatgctttcaactttttttttttttctagctaggatttgaacctatatcctttcaacttcttttagaaccattttaatgcctagagcattggactcagaagtctagcttctggccg

SEQ ID NO: 113400 - DNA, 249 bp, Homo sapiens
ggtttttcaaccagcgacctggcatttccattttacaaagcatgtagcttgttctgttcaacggaacctctgggctcacctccctcacaaccacttccctcaggccatagtggtagcttggaggtctgttaaatgtcacagaacttttgtctagactgccctttttcctttgctatggagaaaattctgatccttcaaggtcctgttcaaatgtcacctcatccttcaagtgctctttgcctctttcag

SEQ ID NO: 113401 - DNA, 535 bp, Homo sapiens
ctctgtaaatgcctgagaaatagtggcagaagacaggataaatctgcttatggctttttgccttagggtaattccctccttccatgatttgtgttattctttgttgttcctcatagaccaatatcaaactctgaccacgcaggccagtcataacaatcccatataatctagttccttgtacttgacagaggaaacagatgccgcataatgtggtggtgaaaagtacagtctttggattcatactgcctaagttaaaactctgctgcttacaagttgtgtaatattggacaagtcacttaacttcactgtgcttcagcttcctcctcttaaatatgggaatattagtatacctaccttactagaataacatgacatatgataaatagtatatattggttgctgctaatgttactgggattatgatgatcattatgccattatttacttatatgttcatctaaggtctactctagaggtatgtctgttaactagaggtattctgactcaaattgctggaagagacagaggacagcat

SEQ ID NO: 113402 - DNA, 326 bp, Homo sapiens
gactgatgtgagatggcatcttactgtggtttttgcttgcatttatttatttgatgattagtaaggatgagtgttttttcatatacttgagtgtcttcttttgagaaaatatctgttcatgtcctttgccttttcttgatttaaattttaagttctggggtacatgtgcaggaagcgcagttttgttacatagataaacgtgtgtggtggtggtttgctgcacctatcaacccatcacctaggtattaagcccagcatgcattagctatttttcctgatgctctccctctcctcaaccccctacagaaaattatagtgtgtgttgt

SEQ ID NO: 113403 - DNA, 827 bp, Homo sapiens
agagccctcctgatccaatcacctcctaaaggtcccacctctcgatattgccacattgggaattaggtatcaagatgagtttcagaggagacaaacatttaaaccatagtagcatgctatgctggcatcagccagaagtggacgtctattataccacagccatattctgaagtggccctgaaaatggtgatgaaggaaaatcctcccaggaggcagaacttccagtgattcatttggttgttcattttgttgggactgagaacagccagatgactggatccacactgcctcataagcaatggctaatgggttatccaattggtcagggacttggaaagagcaagactggaaaactggtggtaaggaggtattggggcaggtatatggatggacctctgggactaagcccaaaatatgaaaatatccatgtccatataaatgctgagtagagggcatctactgcagaggaggctgtcaataattaggtggactagagaatccatccttggatgtcagtcagactcttcccccacttatcctggtgtttcctcgatgatcttataaactcagtgtcagagcatccacaatataggcttcccttacaaagctcactgctagatgtctgactggccagcagcagaggccagctctgagtctttgatatggcaccactcccagaggggatcagacacatgaaacagacatgaatggaacttgaagtctggagtcagcctggtccagctgcacccagcctaaatcagctgaatcacaaccaacccacacacttgtggccaagaaataaaatgtttgctctattaagccactga

SEQ ID NO: 113404 - DNA, 358 bp, Homo sapiens
gaatctatgagaaaggctttcatgccttagttacattttctgtctcctccaattagactcctccaatgctactgaagggctttagtacagtgctctgcacacaataggtgcttcacagatatttgcagaatgatttattgaggaggaatccatagatgatctcacagaaattcaaggaaaaatctactatgtgaaaaacaaagtgccgattccatgcttcaattccatgattctggcagccagcataacaaaacagccacaacaataacaagaaaaaaaagccacgatgatgtttagaagttaactttaaactcttctgttgttcatagagtcatatgtatattttctctcctgggtg

SEQ ID NO: 113405 - DNA, 423 bp, Homo sapiens
gagtacaattcaaggtgagatttgggtgaagacacagagacaaaccatatcattctgccctttgcccctccgaatctcacatcctcatatttcaaaatcaatcctgccttcccaagcatcccccaaagtcttaactcatttcagcattaacccagaagtccacagtccaaagtcacatctgaaacaaggtaagtcgcttgcacctatgagcccataaaatcaaaagcaagctagttatttcctagatacaatgggggtacaggtattgaaaaaatacagccattccaaatgggagaaattgtccataacaaaggggttacaaggcccatgcaagtctgaaatcctgtggggcagtcaaatttgaaagttcgaaaatgatctcgtttgactccatgtctcacatccaggtcaagctgatgaaag

SEQ ID NO: 113406 - DNA, 430 bp, Homo sapiens
cggagatggggggtgggaagaggccaggagggacctgacgtctgggggcgataggggagagacacaaagcctaactgtcctatccctttgtcaaatgagcagcagatatgtgccaggtactgttttaggctctgggttacagtggtgaccaaagcagatgaaaccgctgcctccaggggatctgggagaaaagttacagcatgcagtctaatgaggggatatcaccccttggggtggcaaaatagcctactctttatatgcatacagcacaggtctaagtactgtaagtaaacagatacacagtgtttctgtggtgtttcaggggaggggacaaattaggaaaccaaaatgtctcagaaggctccacggtggggtgataatggataaaaggttgtgacagccgggcacggtggctcacgcctgtaatccc

SEQ ID NO: 113407 - DNA, 844 bp, Homo sapiens
agcactccaccatgtactcatgagtgaatgtgaatgaaaacaagagaaataatgccttcatattattacgaaaataatgctgatattccaggtctcctgaaaaagtttgaggttcccccgggggtgctgagaccacactctgagaaccattggtggaggaaggtgtagtggaggccagaacactgggaattacaaactaaggttttgtgaacaaagaaacagcttaatctttataattttgtttttagaaactgatctccaacgatgttagagatcagctaattttgtaaacatttacaaaagtttaataaaatcattctgatttatcttcagaactccgaattcctacatataattgctactcaacatctctatgtggatgtctagtagacatttcaactcttgttcagaactcatctcctgatcttctacccttaagtttctcctgttgtggcatcacccatttagttaatggcaatttcatcattatagttgctcagacacaacacctaaaaatcattgttgacccctccctgggatcaactctgtctgggatgtagctctggtctgagccaccagcatctctcacctgggttactcttacctgttctctctgctcctaccctccctgaccaaatccccattgtccattttttgttaatagccaggatgatccttttaacacctaagaccgtgcacttttctgctcaaaactatgtaatgactcctcctttcaatcagcgtcaaagctgacatcttaaaatgcccttaagaccttacctgctctgtctcaacctgtccctctatgagcccgtggctccctgtcccgcccccacactgctcc

SEQ ID NO: 113408 - DNA, 265 bp, Homo sapiens
ggttcacttatctgtgatgagggaagaaatttaagaccaaagggttaaagccaaggttttcttctttgtttgctttaccttaataagcagagtctttaatgctggctgtaagaacaagacaacagtattttcttttcttttctctctcttttttttttttttttgtgagactgagtcttgctccattgcccaggctggagtgcagtggcgcaatcttggcccactgcaacctcctcctcctgggctcaagcagttctcctacctc

SEQ ID NO: 113409 - DNA, 446 bp, Homo sapiens
aagatggcaggcctacctgaagcctgagcccagcccgccacagcagggcccagggtgcggcacttgtgggcctctggcctagatccaggatagacattctcagagcacctgcagccacccaatagggcctcacctctcactcatgccaggggtcccttgagaactctccccacgacacccaccctgggttcagttagagctttggagttggcatgcctgggcctacagtgccctgggcagcagggacacgctccccttcctagcatcatagggactgcacagcccccagctttgctgtgtcccaagtgtactcagcatctttcccgcagctgtgctccctcgggttatccctgactcctctggtcctctccctcatgtaaagacaccaaggccacggattctacttaaatctctctgcccatcccttctcaccatccccaccctca

SEQ ID NO: 113410 - DNA, 203 bp, Homo sapiens
ctcttccacctcctccaagcagcagcctgtgcttgtcgttctgccttgtccacagctgtttcctcagcacctggcactggcctcagtagatggttggtggacaggcaattgaggggttggctgagcctaacctgtgagtttgcgccccttctgatgtccaccctcagctgtgtttgggggatgcatcctagggctcaaagatt

SEQ ID NO: 113411 - DNA, 269 bp, Homo sapiens
caagcgtgcatagtggagggagaacatcgataccgtattgaactggttcaccaaggaagaatttgactttgtgactctgtactacagagagccagataacatgggacatcgattcaggccagaggcagagaacaggaagttgatgattcagcaaatcaacaggaccatcgggtatctggtgggagccactgagaagcacagcctgcagagcacctcagcgtcatcatcacatgagaccatgggatgaccaccgtgaagaagagacccaa

SEQ ID NO: 113412 - DNA, 406 bp, Homo sapiens
agaagccatcagaagccaacagtctaattctctcaccagctcacctgccttggtgcccccacattctgccttccttccacccagtttggtttctctctcatccatgccaacccctcactgtgtgcctagagcccacccccctttgcctgctcacatctctctttggcatttgtctttccctcgctactggataatttccaccaatgtacaaatatgccatttttttctgtagccttccaaaaactccccctccatttgagcccctctttcttcttaagcgactgccccacctttgcttctatttacaacaaaattctatgaaagtattattgacactcatttccagtttctgtcttcccatttttttgtttgtttttggattcattcccatcaaggttttgcccct

SEQ ID NO: 113413 - DNA, 840 bp, Homo sapiens
gtatatgttttaaagtatattacagaaaatttcaaaatgtataggggattatataatgataactcccgtgtacccatctcctaacttcaacagttaccaactcctagcatcaacagttataaactcatagtcaatgctgtttcaactatacctcttttaccttttccctcactttcccatggattattttgaagataatctgacataatatcctttcactatagatatttcagtatacatctctaaaatagaaggactcttaaaatacacatttagtaccattatcatacctaatgacttctaaaaaataattttttttttgagacagagtcttgctttgtgtccaggctggagtgcagaggcacaatctcggctcactgcaccctccacattccaggttcaagtgattcttctgcctcagcctcccaagtagctaggattataggtgcgcaccaccatggccagctaattattgtatttttagtagggatgaggttttgccgtgttggccaagctggtcttgaactcctggccttaaataatccgcctgccttggcctcccaaagtgctgggattacaggcatgagccaccacacccagccaaataaacagtgttttaatatcattaacagagaatcagttgttctaattgttttctaattgttgggtatatatatctatttataacttaaattagttttattaaatattgcaaacatgtacaaaactgcacacagaaatgtacaactaaatattcatgtaacctgcacccaggtcaaaaattagaacatttctaatactccaaagattcccgtcatccctcttccagactttcactcc

SEQ ID NO: 113414 - DNA, 408 bp, Homo sapiens
cctgccttgtcttaggaaacgtttttctggcagtggctcacacctataatcccaatactctgggaggctgaggcaggaggactgcttgagcccaggagtttgggaccagcctgggcaagagggtgaaaccctgtctctaaaaattagccaggcatggtggctcacacctgtagtctcagctcttagggaggttgaggtgggaggactgctggagcccaggaggtggaggctgcagtgagccgagatcacaccactgcactccagcctgggcagcatggcaaaactctgtctctaccaagaaaaaaacaaaaaattaacagaaggaaaaacaaaagggctttcttatcaaaaatacactttaaggaacaaatttatcatattaagttggtgcaaaagtaatcgtggctt

SEQ ID NO: 113415 - DNA, 263 bp, Homo sapiens
taaagttcatttactggagaagcaaataaaataagacagcagcagctgatcaccagtccttgcccaaggatgtggagacagaggaaatccacatctttggctcctcttccccaacaagcatgtagatatcccagcctcaaccaccctgactccaactccccaccaagcatgtagatatcccagcctcatccaccctgactccaactccccaccaagcatgtagatatcccagcctcaaccaccctgactccaactccccacca

SEQ ID NO: 113416 - DNA, 739 bp, Homo sapiens
ttgcctaccattttcaatgctcaaggattatatctgtgtatatgtctctgcttcagtatgttttatctacaaccataaagaaaaatattggattcattatctatcaagctacctgctaggaaagagtttcttgctcaaattaggcttatgtggggaacttggaagtaatggaaagggacagtttaattcttttccaggttcaaggatgtgaattattgtgtcttgtaaagctggaaggggaaaatgaggaatgataatgatttttcatgtcattagtttttatatttataaaattatagcttccattcatccctctttgaaatttaaggtttggtactaaaaataatacttccaggatactcttacatgttcattgatacccacctcccttacctcagctgtcttaaaaaagcagagggtaggtagctgccaagcttttaagtagctccaaatggactaagcacctgcctagatcaggaatggtagaaggattgatctgtaaaataatcacatgtagaacttttctttggtaaatgtaagtcattatatatcaatcagtttaacttcttatctgtgaagcatagtaacagctatgttagaatagtgttgtgtttgacatggtttcgaccagttgtttccctgttttaaaatcacatcttacttggaaatcttactataaactggtagatgatgaggtattatgaatttgaaaattcaatcctagttaatattaagattg

SEQ ID NO: 113417 - DNA, 554 bp, Homo sapiens
tacttgctagcttatcaagctcctgaaaaatttccgtttcttggctgattataaaatatgtctaaggtttattccaattttaggaatactcaattcttgaaataaggaacattcttcaggaaagaggtgttttactttttaaatcacaaagtaaacaaatacagagaatacatattttgaagtgtaggattttgtgattgcctctgtttgtaacctgatgcaattgtaaataagaatgcaggctaggccaggtgcttacacctgtaatcccggcactttggaaagcagaggcaggtggattacctgaggtcaggagttcaagacgagcctggccaacatggtgaaaccccacctctactaaaaatacaaaaattagccgggtgtggtagcatgaacatgtagtcccagctacttgggaggctgaggtgggaaaatggcttgaaccggggaggcggaggttgtagtgagctgagatcgcgccactgtgctccagcttgggtgacacagtgagaccctgtctcaaaaaattaaaaaaataagataaaaaagggaat

SEQ ID NO: 113418 - DNA, 555 bp, Homo sapiens
gggccaatctatttaacatttccctcaccacccctccactctgtagcccctttgccccttgtatttctctccatagtacttattttaatatctaacacactataatatcaaatgttaactccatgaggataggcattttgatctgtttggttccctgcggcatctccagcacctagaacaatgcctggtacatagtgggtgcttaatatgtacatgtcacgtgagataggaaaaaaacgagtgtattaaagaatccaggagccgggcgaggtgtgtcatgcctgtaatcctagcactttgggaggctgaggcgggtgcatcgcctgaggttaggagttcgagcccagcctggccaacatagtgaaaccccgtctctactaaaaatacaaaaaatcagctgggtgtggtggcaggcgcctgtaatcctagctactagtgaggctgaggcaggagaatcgcttgaactggggaggcagacgtcgcagtgagctgagattgcgccattgcactccagcctgggcaacaagagggaaacaccttctcaaaaaaaaaaaa

SEQ ID NO: 113419 - DNA, 415 bp, Homo sapiens
actgatggcatgggattgagctttcgtctgtgcagaattttacagacagactcatgttctgccaggcagacattcagcccttgatcttctcacagtcgccattgtgaaggagagcaagccctttctccacactctctgtggactactttctaacttttctattgtcatgggagaaaaatttaaaaaactgattaaaagggggcaagtgcatggcttctatgaaaactctaccgctctaaactgtgggactgcttgaaactgtttgttttggctggcctcggtggcaagactgacatatttatgtagcaagctcacatgtaatatttaacttggaattttacacataggaatgatgaactaaacagaatataagggtttgttgttgttgttgtttccctgcttgttctgaaatgtg

SEQ ID NO: 113420 - DNA, 579 bp, Homo sapiens
tactgtgaatgaaaagcatcctacaccatgttacagacatttgttaagcccttactgtatagcagaacctatagggctaggcatttgagacacaattgcctaaattctgagaggagatgcactttgggtcactcactgctccatcctcagcctccagcacagcaatgagacagagaggtactcaacatttgcagaatgaatgaatgagaaatggtctctgtctttgaaaggcttagagtacactatgaagacctggcatataactagtatagtagctatcatagctgatttgaaagaagtccatatcatcagggcatgaaggaaggagtggtcaattcaacttggactatgttcaatgagtgggagtgcaaagaaagtaagaaaagccttcaaagaggaggtaagcttggcctgaacctttggtgcacaaattcattaataagtctaactctccttcagccataaggtatttggagtgagagacatgttaacacatgagttatgtgttgtaaattggggagtagtaaggaatagattgtgtttatatcatctttgctacacgtaattctagtgaactga

SEQ ID NO: 113421 - DNA, 457 bp, Homo sapiens
aagggtgttgttgcggggaaggaacaaagagttctgttttagatattttaagtttgaaattatgattagatatccaggttgaggtatttattagacacttgataaacatgttaaaattttaggggaaaagccctcataggagacatatacttgagagtggttagcatgtatctggaatttaagctgtaagccttgataagaccacttaggagttaaccatagattaaaaagaggtccaaaaatttggactgtgggatgtactaacatttatactcaggcagataggtaactagcagaagagactgagaagaaatgtaaatttggtgttccagaagccaagtaaagaaagacttccagacagtgataatttttttcatttaagtgctggatttaatgatgtggaggtcactggcaactgcaacaatggcggtttcagtggagtggaggttgagaaggc

SEQ ID NO: 113422 - DNA, 1568 bp, Homo sapiens
cttcctagtagagtataaactcagcaggaacagagactcctgtttagtgcactgctggaacaatgctcactactcagtatatcctaggcgatcagtcaatatttgttgaatgaattaactgaaggaaatacctacttctagcaaaagaatttacttgaacagtaaatttggtggtctgaatttaccttgaaaacattttaagaacttgactgcactgtgctgttaagtaataatgataactactttttgagggatgtatactagaaactatgtcaaacgtgcagttgaataaaagatgtattgacttgtgagttaggggtctgtggctgccatcctatagcagttaatgccagttaatcctaaatatctgagactagaagaatcatgtgtaggagaaaaaagaagggcagttatctgtcttgaagtagaattttttttcattccttacacttctcagtgagtggtaactgtagtttttgctatcatttttcattttcgtttttgcagttgaacatacttttttcactcagagagttggagggacttgcccaagactgcccaatggcaatgagatttcaacctcaaatcaatgttctttttaatgcaagatgataaagagtaggatttagcctaatttaggatagaataaagccaaataatttaggataggttctttggtgttcatgggtgtaatctaatgcccatgatgcaagtggcagagtagagaattagtgcacagcaataattaaagtgacatattgccaaaggaagcggttatagcccattatataataccttttaaaggacagacgcatactcaggtttattttacctgctgagcttctgccttagaagttttcagaattgtgattacattgaataggaaaaaagtctgaactatcagaagcagtgccgcaactttgacaaacaactgattatataataatctgcctctagcatgagactatattaattattatttagctctggtgacttcataagcagccagtgacaacagaaagttaagataataaaatgaaggaatgttacaatttgttatcatccgggagcctgaggcaggagaatggcttgaacccgagaggtggaggctgcagtgagctgagatcgcgccactgcactccagcctgggcaacagagactccacctcaaaaaaataaataaataaaaagaatttgttgttatccacttcagagctcattaatgccacatttgtcacatctccgttgagaaatccacaatggttttgtatctgctatgccatcaagcccctgttttactttcaagcctacacacaatagacgttattccaattttaaatcctcttttccattacttgctaaactctatccaactaagttcctcactctcctatcaatagtttatgtacagagttgcccacatgtttcattaatatcgttcctggccgggcacagtggctctcgcctgtaatcccaacactctgggaggctgaggcaggtggatcacaaggttaggagttcaaggccagcctggccaagatggcgaaaccccgtttctactaaaaatac

SEQ ID NO: 113423 - DNA, 176 bp, Homo sapiens
ctcaaaaaaccacctattccagcttagtctttgaaaagttcagccagaaccatcctaccagatatcttccaaaagctgacaaagaattttaaagtcaggagatgacccttacattccaaacagtgactacaaaaaggtctgttcctttctgcaaatatcaaaatcgttaagtcagt

SEQ ID NO: 113424 - DNA, 883 bp, Homo sapiens
tataagaggttaaaaaatataacaagattgttacgcaggttaacttgtatctaagaaccagtacattatttgataaccaaattaccttattaactacccttactcgggaatctaacaacatgcgtaaaatgttgtattttgttagcacacaaaacgacttgtagggaacccaatagtaaattacaatttatcatttttaccaaaataaatacttataataaaacatcaaccaccagcttaatgagaactagatcactagtatacagtgttttgatttgtagggcattacagacctcagtcagctgctacagataaaatagaggaaagatgaaatccatctaccaatatagtaatttaaagaagcaaaaggaaagttggtcaatcttcaatgaccaaagaaaatagtctagcagataataaaatacatgctactatcattagacaagtttgatgcaaaaatggacaagtagagcagtggaacagaatagagggttcagaaatatacccaattaagtatgagaatttagtacaggtgtatgataacagtaacattcaattcagtgggaaaaaaaaatggtttacttggccaggtgtgtgagtctgtaatcccagtactttgggaggccaaggttggaggattacttgagcctaggagtttaagataagcttggacaacatagtgagaccctgtctctacaaaaaaaaaagtgtttttttaatatattatccaggtgcagtgacatccacctgtggtctcagctatgtgggaggcttagctgggaggattacttgagcctgggagatcgatactgcagtgagccatgatcatgccactgcacaccagcctaggcaacagagtgaggcactgcctcaaaaaaaaaaa

SEQ ID NO: 113425 - DNA, 522 bp, Homo sapiens
gcctgtgtccaggcttggggaaccacatctcggggagaaagcaacagcagtcagggagaagtcagtccctagatggcatcaggtgacctgagagctatggagcacagcaagggtggcaaatgtacttggggaggacacctgcaaatgccagggtcatattgactttctcccagtattcctgccacaaacaaacaaacaattaagtaaagggaagtctaataataagaattagcctctcaggccgggcgcggtggctcacacctataatcctagcactttgggaggcccaggcgggttgattgcctgagctcaggagtttgagacccgcctgggcaacatggcaaaagcccgtctctactaaaaatacaaaaaattagtcgagtgtggtggtgtgtgcctgtaatcccagccactcaggaggctgaagcaggagaatcgcttgaacctgggaggcagaggttgtagtgagccaagattgcgccattgcactccagcctgtgtgacagagcgagactttgactc

SEQ ID NO: 113426 - DNA, 464 bp, Homo sapiens
agaaagaaagaaagagaaggaaggatgggaggtgggaggggggaggtagaaagaaagaaattaataaattataaaacatggagttcctttttaattgctaaatatactagaattgacaccttactctgcccatagtatcaagcaatacatattttggtaatcatggtatcggaaaagaaatgtggcatagaatatcgtcatcaatttcctttgttaaattattggttaattcactgaaaagaatcacctcagtcactaatgatgctaaaaagtaaatattcaagtcatcagtaaatattccctaaatttctatacaatgaagcacagcatgagtatcacaattttctactctaggtagttatgtagaattatgagagatatatacagtttttaaaaaatataacagtcttaaatctactgttcatacataatagcttatagttaatcatcttaagagttttatt

SEQ ID NO: 113427 - DNA, 471 bp, Homo sapiens
gtttcatttcgggaacagctattaagttccgatggggataaatcgctcggcgggcatttctagtagcctaaaccaattgtctcctgcatcctgctagtggcaaaatgccattgcacaggatgggaaaagtgttatctctatattgttacctaaagtttacactgtatgattctagaaatgaatacaaaaataaaggaaattgagagatgtgtgaagtgcaaagtagtattagttcattagttcattagttcattaattcctttattcagcaaacaaatattctatgctagagcctggtcacggtgtcttgggaagtaaagagatgaagcagatttagaagatctccctgtcctcaaggtgtctacaatgtgatactggggagtgggctgcctagaaacagtggttgtacatcatgaaaccatatccacaaagccagagtatcaaattttaatatttactctataaaatata

SEQ ID NO: 113428 - DNA, 400 bp, Homo sapiens
gtagcagaatatgataggagtgaaaaaaatcaagaagaatctaggtagaagattgaaagggtagagaaaaatctcaagaatagcaaagtgagaacaagactttaatccggttttcatttagaagcaggaataaatttcaatttttaataagtaaatcttaaggctattttagggcacaatcaagatggtataaatgcaaataagcaataataatcctaatgattaaaatattaatggaaagtaaagaattactggaatagatattaatagctgattactcagggatgactatacagtttagagattaatattattacttttatttatttctcttctcatcttctaaccactctggattatatcaccaattataaacggcttgatatacacacagtaggtc

SEQ ID NO: 113429 - DNA, 391 bp, Homo sapiens
ttaaaagagattagttcttgatttttcatcaggaagacatatttaccaaatgctttaaaaggcaaaaaagctcaggcgtggtggctcacgcctataatcccagccctttgggaggccaaggcaggcagatcacctgaggtcaggagtttgagaccagcctggccaacatggtgaaaccccgtctctactaaaaatacaaaaattagccgggcatagtggcacacgcctcagctacttgggaggctgaggcaacagaaagaaatgaagtgactcagcttctggctcctctgctacatcaaatatcttgtttaatggggcagatatgcattaaatagtttgtacaagcagctttcgttgaagtttagaagataagaaacatgtcatcatattt

SEQ ID NO: 113430 - DNA, 407 bp, Homo sapiens
tgggctctgttaattttcagtgaaatgtactgtcaaagactgctttgtctttgcctagagaaaagaattaggagaggcttttccctgtataatgtttgagatctttctaattttgacacaagtaaatgcattattacataatgaaactcaatgtctaggtgagaggttggcaaactacagcctgcaggccaaatctggctcaatgcctggttttctttttaattgggatataattgacataccaattcagtggtttttaatatgtttaatatattcacaaggttgtacaaccaacctcactacgtaattccagaacatttcatcatcccctaaagaaaccctgtaacccttggcagtcattccttattcccccactcctagaacttggcaaccattaatctagtttc

SEQ ID NO: 113431 - DNA, 264 bp, Homo sapiens
acgatgcacctcaatccttaaaaccttccaattttaattgtttcattatacataaaatggagtcctaaggttttattttttactattgagaatatatatctggcttaagacacaaaaatgtatgtgatgcataaaagtagcctgttgtatgtttaactcatcttgttatatctgatgggaagttatacaagtcatattgatatcatattgaattttaaataatttatcattttgactattggaacagtttgttactttgaagca

SEQ ID NO: 113432 - DNA, 559 bp, Homo sapiens
cgccttgaagactcttcccaggttgccggggttttcttgggaataatttgaagttgacatctctgtttccttccaggaaaggttgcatcagtttatgtgatcatgttcaagtccctcgaggttggactcagaaccaagctgaatgctcaggaaacaagtaggctggttctgcagtctgagcctggaccctgtctgtttggaggctttccttctctctttgtgaatattctctttagaagagagctctctttctgcacctgtggggatcatcaccaccatgtcagaactgagtaagttctgtggtttgtttttatagctaacagagtttcccattgttgtccagcaaagggatggagcactggatgggtgaggattggcatccagaagaaagggtggcatgaagggtccacgtatctctgcccaacttctgggctgcctctctgtctcatgagctcatctgcacttggtggtctctgcagccagggtcagaaagtagagagacaggagcagccttgtgtgtttcctgagtgcctattggagtctaagttctagaatagtg

SEQ ID NO: 113433 - DNA, 359 bp, Homo sapiens
tgagatcaagtgacttcactgcagtggctcaagagtggctgactccctccttccaaatcagcccatcatagaacacctattgctaaatagcaaaagccagaggcttagactggatccctcataattggagacttcaaagtgttcagaacttcaagcctggcctttgaagtaaaatcttttttttttttttaagtacaattgcaatttttttatttttctccagaggctagtttttcttcagtccttaagaactctgctccttatatgggcttcggtggcagtcatggggcagcaccgcaggtctacagtggggtggaggtgttcggtccttgcgggcttcatgaccttgatttctggcg

SEQ ID NO: 113434 - DNA, 591 bp, Homo sapiens
tttttcataaatacacagttttgtttgctattttcaggggaaacttaggcattcaactataagctgataaaataccatacctaaaaaagtataaaagtataaatatccccttagaataaattttagtgaattgtcttaatatctttaaatttaaaaaaaaaaacacaacacaagcctatctattgtatcaaggtcaaaaatcaaacaatgctaaggggccagcagctccccagagagtacaccctgagggcccacagtggctgccttcctccagagctctgctggggaggacaggtcatcccatggctaagtctgccctctagaaaggcttttataaattgtctaaggccaaacatttaacagcatacaagagaccttacaaagaggaggtggtaagtcctaatgctggagaacttggttaatcaggttattggcaaagaagaagatgaggcctaggcaagaagtctccagaagcactggaaaccagacagtgtcagagcctctgacctgcacatgggcagctggtggtcagtctgcacagtgccccttgggaagctggagttccagaaacaaagagcttggagcatgccc

SEQ ID NO: 113435 - DNA, 702 bp, Homo sapiens
gggagacatctctttcttctgatctcccatgatacttagctcataccttttaaataatatttcttatacatttttacttttaatacattatattgggttttatgatgacttgaactatgaaaaggggtcctggactagaggaagaatatattactggttaaacctagatttaaaagtattttgttcaggctgggtgtggtggctcacgcctgtaatcccagcactttgggaggctgaggcgggaggatcatgaggtcaggagttccagacaagcttgaccaacgtggtgaaaccctgtctctactaaaaatacaaaaattagctgggtgtggtggcgtgtgcctgtaatcccagctactcagaaggctgaggcaggagaatcgcttgaacccaggaggcagaggctgtggtgagccaagatcgcgccactgcactccagcctgggagacagagcaagactctgtctcaaaaaataaataaataaataaataaagaaaagagtaatttgttcaaaagcaaagcctggaggtgaccagatttcaacgaggctggtcagtggaaactggggaaaggaatctttcgatgagaaggagcaaatttttagtcaaagttggtttaaaataataactaatttctctagatctacagtattatggttgtgaaggtaaagtgtactatgtacttacaagtttttaccccatg

SEQ ID NO: 113436 - DNA, 424 bp, Homo sapiens
ggtcaggagatcgagaccatcctggctaacaaggtgaaaccccgtctctactaaaaatacaaaaaattagccgggcgcggtggcgggcgcctgtagtcccagctactcgggaggctgaggcaggagaatggcgtgaacccgggaagcggagcttgcagtgagccgagattgcgccactgcagtccgcagtccggcctgggcggcagagcgagactccgtctcaaaaaaaaaaagatgtttcgtaagtatttgttgaatgaataaatgaatgaaacgggccaagtgtggtggctcacacctatgctgtaatcccagcactttgggaggttgaggcagaggatcgtgtgaggccaggagcccaagaccagcctggtcaacataggaagacccccccacacacaccttttttccaaaaaaaaaaaaa

SEQ ID NO: 113437 - DNA, 408 bp, Homo sapiens
atactgatctgctgacccaccgaccacactctgatctactgaatcagaaagtttgctcaaggtaaagtagttatttttatccctattttgcaaatgaagttaaatggttgcaaagctactgtgttggaattagcagaagctatgctgaccaagctgaagaaccagagatagggtgtatcagttagaaatacttttgtttgcaaacaacagtatacctagcagtgacttaggcaatgaagacttcaggccaggtgtggtggatcatgcctgttatcccagcactttgggaggctgaggtgggtggatcacttgatatcaggagtaagaggccagcttggccaacatggcaaacctcatctctactaaaaatacaaaaattagctgggtgtggtggcttgcacctatagt

SEQ ID NO: 113438 - DNA, 419 bp, Homo sapiens
tgtcggacctgctcgccctctctgcccagcactgacaacattagagccagtgactagaaccactcctcccccacccccacatactgtcaacagagctggaaatcaaaaggggactttggtcagaagacttttccataatgtttagccctaaaatggactagaaagaaccacagagataacttacacaagatcagcaccctggccgggcgcagtggctcatgcctgtaatcccagtactttgggaggccaaggcgggtggatcactggaggtcaggagtttgagaccagcctggccaacatggtgaaacttcgtctctactaaatataaaaattagccaggcgtagaggcaagggcctgtaatcccagctactcgggaggctgaggcaggaaaatcgcttgaacccagagaggggcggag

SEQ ID NO: 113439 - DNA, 688 bp, Homo sapiens
gaggctggggtgggagatcacttgagcctgggcagttggggctgcagtgagccatgatctcgccactgtactccagcctgggcaacagagcaagaccccatctcaaaaatcagtgaatagaaagacagatgttaagagttcttgagcatctgcaatggtagtttttctttttaatgagtgtttccttaccctctccccaataaaaatcaacaaccagcatgatcagtgttaagtaggagggtaagggctttgcaagctcttcatggcaagcggccctgccttttgctttccaagttcctcagcaaatgcaggagcaggcagaggtgggtacatgggcaggcctcctgagggctctgtacccactcttcaccacttgccgttagtgctgtggggacctggcgcccaccgagtcctggtcagtgcagtgaagcactgccttccctctgcgctaggagccaccatcgcactgctttcttcagtacgattggcttctacctgaaaacctccccttccctcttaagtcatatttttcttaacacagtcacatttttaagtcatatttttcttaatactgcagatttataatcagtacatcactttgtcaattttgaaaacgaaaatacaataatcatataaaataatttgttttttaaaaacattattaattttttttagcctaatcacaagg

SEQ ID NO: 113440 - DNA, 117 bp, Homo sapiens
tattcattaaaaagtagttactataagcctgctatgtgttaagtgctattctaggttccaggacacaggggtgaattagacagttattaacctcatagggtttacattctaggggag

SEQ ID NO: 113441 - DNA, 279 bp, Homo sapiens
cctgggatcaagcgattctcctgcctcagcctcccgaatagctgggattacaggcatgtgccacaactcccagctaattttgtatttttagtagagacagggtttctccgtgttggtcgggctggtctcgaactcctgatctgaggtgatccacctgcctcagcctcccaaggtgctgagattacaggtgtgagccactgcctggccagaatatgttattttttaagcatccttttctctagtgattagcatgctgccaaatctttgcttgttccgctg

SEQ ID NO: 113442 - DNA, 156 bp, Homo sapiens
ccgtagtggaatcagctctgcacaggaagcagagggagcctccataaaagcaggtgagggccaggcacagtggctcacacctgtaatcccaacactttgggaggccaaggcaggcggatcacctgaggtcaggagttcaagaccagcctggccaac

SEQ ID NO: 113443 - DNA, 295 bp, Homo sapiens
gatggtctcgaagcgcccccagggaaatgtgcctccaacaaatcgaagtggataaaaagggcaggacactctaatgagcaccgggcactctctagacatctttttcagattccccctcgctatgaggcaggtctgtctccatcttgcagatgagaatctcagtgaggaggttcaggatcacacagccagtacaggactctggtgccgcgccgtctctaaagcccaccgttcaaccactcgcctgtgctctcagagaggtcggtggaacctgcgggatttctggaaggggagcctg

SEQ ID NO: 113444 - DNA, 995 bp, Homo sapiens
aagagcggagcctacggctgcacttgaaggacaccaaagcatctcagggtcagaaaggggaaaaagcaattgcagggaatttagggggtagtaaaaggaacccatctcttgccgcataaatgccccccacccccacccaggactgattctggaagcaacctagtgttcgaaagggaaaggctcctacttttccattacagccgcggaaatccgcaggcaaatctccgaggagaattttagggaagcttcattgacagctgtctggagagcagtagttcccgcctgtgcaaatattccagagagttaaatcatttagaaagcactagttctttcaagaacaggtagtgtgattgtctgcagtcctgggccaagctggggaaaacaaaacagcagagagaggtgtaacattaaatagcgtcctgaccacactgcgcaagaaacagcaaatgaaacgtccaaactttggaaagatctgaagaacacttgccgcccgcatttccccttgacttctccctttttcttcccaatctcgaggcgttcatgcctggctttaagacgccaagataactctcttgttttggcattgtcgcaatgtccaaatcggtcaaaggagtgggataaggtgaaaggaccaggtcagaaactttagaaggactcggtaaattaatttgtttggaagccagtgaggtggactatgttgaggtagcagttccgcaccacgactttggagccaaagaaaaacccaggccgaaaaagcgagccttgatgtctttgttctgccttggcctgcaggggttgggaacaaaggagaggagctaagaggatgcaccaaagtagccgcgccctccctgcctggcgctgtccgcggtgctgaccgtggcccttttctctctccgtaatcaaactggaaaagcaataggaccgtcccgtccctactcaaaagaagagtaggatattaggtaatttgaaaaataacatttaaaaagagaaaaagg

SEQ ID NO: 113445 - DNA, 489 bp, Homo sapiens
agaattataatatcacctttctgctactcctaatgatatagtgtatctaaatagtagtcatcaatcactgctgacttcacgaaaaaggagacaattagacattttatatgccctaatagaggctcacagcaccatttatgaagttgacttgccaaatgaatccaaggtgaatgtgattgagcctctagatccaactaataatttgcagaaaacacatgggacagaaaagcatgatacgtgaaaccacaaggatccaattagcaaattcttacgggggaaattctacaggaaaacaatgtgtttaaaaaacaaaagagtaagaggaaaattgaatctatacattaaaggaaatttaaatgacatatcaaccaattttagtgtatggaacttattttgatgctgatttgaagatattttataaatgtatcaaaattataagataatcagacatctgtatacagacatttaatattaaggaactatcattag

SEQ ID NO: 113446 - DNA, 748 bp, Homo sapiens
cccatggttttcagcccctaactgcatattagaacaaaaatatcaatatcttagcactactccagatcaatgaactcagaactctcgagtgtggggccagggtagtggcacgttctaaaagcccccagtgtgactttattgtgcagccaggcttgagaaccactgccctagaatccacaagccagctctcatcttttcttgccttatgtctcacgatgggggatcagtgatttatgctggtacagtcctactcagcactgggcttggcttagagaagggaccgtgggaatattccttgattaattcacagaagagctacataaatgtagatatggctcccagctgggaaaatgagcagaagtgagagaatgagagaatggtggtggtggtgtggtggggagcggagataatgctacaaagtgtgagccttcagtccctccctgcctcattcctcttatgcattcattcagtgtgttctttcagattcctgtgatagcatcatacatctttgtgccttttctacttagttcagaggtatcctagatctcttatgtatacctctttcattttctcctccaggaaaagagaactaatagtgccagctcagatgacttacacagtctttccaaaatagcagaacatacccactttctaccaggcttgctcttttagtcttgtcatttctgtaaatggcaccatcatccccttgattgcttcaacttaaagcctgggaattgtgctagtattg

SEQ ID NO: 113447 - DNA, 314 bp, Homo sapiens
gcgtgtgtcaggttctccctcctttttaaggctgaatcatattccattatatggatgggtcacattttatgtcttcatttgttgatgaacagttgtgttgtttctaccttttgactactctgaataaagctgctataaacatgggtgtacaagtatctgttcaagtcccttctttcagttctgttgggtctatacctaggagcggaattgctaaatctacatgtaacttgttcaggagccaccatactgttctcccctgtggctgcaccgtttttgttcccaccagcaatgcatgaaggttccgatttttccac

SEQ ID NO: 113448 - DNA, 258 bp, Homo sapiens
ccagccgccatgctctccctgaattgtcagctccatctcaacccagtttctgctgggccctgcctgggtcctgcttcctgtaccatggctgggaactctcgggaggcagtgagctggggctgccagagggcttggctccactttgaattttggggaccaccgtcctttgctgcctgacctccagggtccctggggccattgtctcccatctcctgtcttgtctgcgtttttggcctttccagggaggagggtgatggg

SEQ ID NO: 113449 - DNA, 351 bp, Homo sapiens
cggtagccttcccctgctggcacgtgcccacctgcagccttctcctgccagtgtgcatttgcccacagcttccccgtgccactctgcaggcatgcatgtgcgtgggagcctattgctgccccaccagagttcttttgctggcagctgccatcggagtgttgttgccagtggaccgggaacatctcagctccttcagagcagtaggtacttaacctcaaggagccagaaaataaagccacaggcctggtcccagcaccacaaggattagagcatgtagcccaggagtgctctgttgagccttggcctcctgaaagcatccacaatgaagccagttgactaaaccaaacaaat

SEQ ID NO: 113450 - DNA, 427 bp, Homo sapiens
tcattgttcttgcacctcaaagccttctctggagaaggacacagatttctggagaaataaataaacgggatcccacatgccagtagggtgactgtgaccacattcccacctccagcttcctgtcaccagtcccctaccccaccagccccacaccctgagagggggcagaaggtccttctctccctccaagtatgtctcctcttccaaacggggtctccttgtgggtcttgagcaatcttgccacagccacagggggcctccaggtccccatgggggatgagaaaaaaaaccctccaagtcccatgcccaggctcggttgctttcagcaacttccctccccactgctcaggggcaccacaaaacactaagcaccccaggcactgcacctgggagtccctccctctccagggattgttttcccacctgt

SEQ ID NO: 113451 - DNA, 761 bp, Homo sapiens
gatattttacttttcccagccttcatttgtatatcaggtaaagcaagatgcctgtaagtgaaagagtaacaggcataatgaacagttatttgaagagtcttagtaaagccttttaattttacttgtaggaaattgacatgaatcattctaatgactgggtaacaaatcactttgcaagtagggtgtttccacttctatgctttaaaaaaaactgaaggagaacataatcaagcagttggttgatatagaaaataatttttaatgtagaatcactgattttttggcacctatgagaaaggaattcaagtaatagagggatattgttataacaaacctccttttattcccatctacttatttatatgaacaaagtttctatgttaagataagttagagagtgctgtggaaacaaaccctgtaatactagtggttaaaaacaaaactcagaagttaatttattgatcatgcgaagcctgctatggtcaggacacttgcctccaagcagtaactcacagatccaggctgtgtcctacctccagaacatggggcttccagtgctgctatggcactagagaactgttaagttcccaggtttaggaagaaacacgtggcacttccactcgcgtgtcattggctggaactagtcacatgacctaacctaactgaaaggaaatccaggaagtcttctgctttgtgtgctcaggaaagagaggataagggactacagacagcaccagcaattgctaccagagtttctcaac

SEQ ID NO: 113452 - DNA, 235 bp, Homo sapiens
cgagtttgagaatgcagtgagccacaatcatgccactgtgttccagcctgggctacagaacgagactcttatctcaagaagaaaaaaattacaaaatattaaactattcatgtcatagccactctgccttatttgagcagcatatgatttctccagagtacttatggtcttgcattaaggcagagtggctatgacatgaatagttcaatatttggtactttttatagagacagag

SEQ ID NO: 113453 - DNA, 378 bp, Homo sapiens
ataggcaatacctgtgcatgatacaagaaatacaaaggtcttaaaaagagtgaacaatgttaagttagcctaccttttggccatcccttccttggaaagaaccagtgttttcttataactttccagagattagtcatctagatacaagtatgtatatatgggagaatttctcatatttgggtgatatggtctttttctcttttcttttcttttcttccggtctgtctttctttctgtcctcgtctcgtctcttctcttctcttttcttcatttcttttgatggagtcttgctttgtcatccaggctggagtgtagtggcgcaatctcggctcactgcaagctctgcctcccaggttcacgccattctcttgcctcagc

SEQ ID NO: 113454 - DNA, 299 bp, Homo sapiens
tgcagtctcccaactcctaggctcaagtaatcctcctgcctcggcctcccaaagcactaagattacaaatgtgagccaccaacccagcgcagttacagcttttgataaatcaagtaaatgggaagttaagagataaaaggtagttaaatagttaaaatatgtgtgtaatatatatattacttttctaccttatttttgcattctcttcaaattatcctgaagcatttctaaatgattttatactcaaatgtagagaaaactttaacatatttctagaaagcactcgtgaccacattaca

SEQ ID NO: 113455 - DNA, 838 bp, Homo sapiens
tgcagtggcatacacctgtaacctcagcactttgggaggccaaggcaggaagatcatttgagcccaggagttcaagaccagcctgggcaacaaggtgagttgttctacaactctataaagttgttgaacaactttgtagtctctacaaagtagtgtgtctctacaaagaaaaatacagagccaggtgtgggaatgcacacctgtagtcccagctactcaagaggctgaggtggggtgggggtcacttgagcctgggaggcagaggtaacagtaagatgagaacatgccactgcactctagcatgtacaacaagcaagactctgtctcaaaacaaaaaaaaattaggagaaaatctaggccctctctctctctctccttttctctctctctctctctatatatatatacacacacactatacataatgttttatatatgaatataaaatataagttttatatgtgaatatattagactatataacatatactaatacattttatatatttaaaagtatttatttctgctgtttaaagggaaaatctagttgatcttcagtttggctatgagtttttatacaacaccaaaaagcaagatctatgaaaaaaaaattgggtaagctggtctttattaaaacctacaacttctggccgggcacggtggctcatgcctgtaatctcacccgaggcgggtggatcatctggagtcaggagttcaagatcatcctggccaacatggtgaaaccccatctctactaaaaatgcaaaaaaaaattagccgggcatggtggcgcgcacctgtaatcccagctactcaggaagctgaggcaggagaatcg

SEQ ID NO: 113456 - DNA, 372 bp, Homo sapiens
gacctgagatcttccgggactgtggccaaaccccttcgtcctcagagacctttgcctcctcctgcccctcaggctctcaagactctgctctgaaccttggcacccctggaaccgcttcattttttggagcctcccccacgtggcagggctgatcagtgcatgggtagtgtgacctaagcctgacgacgactagagattcaagaaggcctcctaaaaagaaaatgaaccaactcttccaaagggactggaggtcccaagctacccaggaggggaagtgatcccagctttgatgtattttagggactgcacacttgatgttgcccagtgtctgctgtccaggaggaaggcagatcgatggccgagtgctcgagg

SEQ ID NO: 113457 - DNA, 840 bp, Homo sapiens
cacggtggctcacacctgtaatcccatcactttgggaggccgaggtgggtggatcacctgaggtcgggagttcgagaccagcctgaccaacatgaagaaaccccatctctactaaaaatacaaaaaattagctaggcgtggtggcgcatgcctataataccagctactcgggaggctgaggcaggagaatcgcttgaaccagggaggtggaggttgcggtgagccaagatcacgccaatgtactccagcctgtgtgacaagagcaagactctgtctcaaaacaaaacaaagacaaagaaaaaaagaaaaaaggacccttatgatgaagaaagcaaaaggaaactgcctaaaacagacaacagcaacatatcagaggacataatcagctagggagtcaggctaatgagagaaaatctgtactgtacccaattattattaaaggatgccccagtgtggcagaagacagacgaactattcagaacaaaagggaaggcattataggcaatcacaagtacgagtatgaaaaaaattagacagtccaaaaggttagaacaaaacatcccagggatttctgaagtacattttaagaggttccaaaccctggggtggtgccctagaaccagaaggggcatgatggtatggtaccatcaaaagaaatttcttttattgggaaaagtagatgaaatgacaaaatacagaaaaattcctcagaaatattcaccctagtagcagtatcagtctaaagagttttatcagaaaaaagttatcctatcagtttctcactgaaacagttaatgtgtagattatttgttctgagaacttgtgcccatagaagcaaat

SEQ ID NO: 113458 - DNA, 564 bp, Homo sapiens
cagaatatgggtatatgtagaggaggggatcgctgattatagtttacaatctataatgtgcttcgtactacgcatggactatccccagagcttgccctggagggcaaatagattaagcctatacatttgaaagccatttaccttcaaagaggcctgttaaaaatcagctgctgccaaagtgtggctagattgaaacagtcttgcaaaatgtttttagttcctgctaagtgccaacactggaccaagcactaagggacaagaatatataaaaattattctccggccgggtgcggtggctcacgcctgtaatcccagcactttgggaggccaaggcgggcggatcacaaggtcaggagatcgagaccatcctggctaacacggtgaaaccccgtctttactaaaaatacaaaaaaattagccgggcgtggtggtgggcgcctgtagtcccagctactaggggaggctgaggcaggagaatggcgtgaacctgggaggcggggcttgcagcgagccgagatcacgccactgcactccagcctgggcgacagagcaagactccgtctc

SEQ ID NO: 113459 - DNA, 782 bp, Homo sapiens
gatatcacttaagtatttgatgtttatatttgatatttatcaaattcttaagttataaactacttattcctaagttaagaaatttataatcacagtttatttttttaacttgtacttcttgtacttcttaattcctttttttttttttttttttgagacggaatttcgctcttgttgcccaagctggagtgcagtggtgggatcttggctcactgcatcctccacctcccgggttcaagcgattatcctgcctcagcctcctgagcggctgggattacaggcgtgcatccccacacccaactaattttttgtatttttagtagaaacggggtttcgccgtgttagccaggctggtttcaaactcctgacctcaggtgatctgtccgccttggcctcacaaagtgctggtattacaggtgtgagccaccgctcctgggctgtactacttaattctaaccatacatcaaatactgtgtgataataagatcacattgctaatctagttctgatttaaaaggaagaacttgaccttctagtacatgttatcaaattacagttggtttcccttgtttatagctgtgttctattaatataaggctgccacaagtatgaaaccgttttcacataggggaagtacaggattgggttcctacaaacctctgatcacaacattttcatcaactgaaaatacgtgactttgttacatgtgtatttctgtttagacatgccttaatgtatgttaaattcacatcgaactcactacccagtagcactgtaatttg

SEQ ID NO: 113460 - DNA, 689 bp, Homo sapiens
ctaaataaaattacactgaagtcctagccacagattggcaaggacagttttgtgggggcagccccacatgccatagccctctgcagggagccataacttaacatccccatgtttaaattttaaattatatacccagccccttgttttgtccattaccagttgagaagtgaggtaattcattctcctttctactgcttctgcccatggtgagaacagaacttccatatacatcttctctgcccagctggagggggctgatggaggacacagcttctgtcatccagcgcctcccctgggagtctctttactgattggtcttcatttgatctacattaggtcacatttactgatggatggaataaactgctttaacagaatcatggtctccaagtttcacttcaccttctgtcctcaggtgtggcaggtgccctggccagagcctgctattctctccggcttcctgtttctttgtgtcttttatctactgttctgaaaaagtgaatggagtcggggagatgggaatttaaagtaagaggcccggctgggcatggtggctcatgcgtgtaatcccagcactttggaaggctgaggtgggcagatcacctgaggtcaggagtttgagaccagcttggccaacatggtgaaactccgtctctactaaaaatacaaaaattagccaggtgtagtgg

SEQ ID NO: 113461 - DNA, 737 bp, Homo sapiens
gctttagtaactgttgtggggcttgaatctcgttatcttggtcagttatttggctccagcttttgtctctatgctgatcttaaatgagtacaaaggccactgataagaccgggtcagccagacagagccaggctcatggcagggtaggcagaatgctgcagtgcggtgcaccccactctcgcttgtgtaaatatttttctgggcaggagcgtttctcaaacagaactctgagcccactgcggtgaacctgatagcaggaattacgtgctatttgtcaagtataagactagtttgcagtgactggtctggctagaacccacctggtgttttctgagatcatctgtaaggaaacacacagcacagcagaggcagtgtgcgcccgtggtggtgagtcttagacctgtcatctgtgttagcattaccccgaaggcagagagtttgctgattagaaactatggctgctttaattcatgggtaccctccgtgacttttcagggtctcctggttgaatgaatttgcagaaggattaaaatgtgtgttcttatttgtgctttgtattctcccataagtagtgtgttggaggctattagaatagctgagagggtaaaacataaacacataggtaggagcctgacataaacacataggtaggagcctgccataagcacgtaggtaagaactaaaagggcgtgttttcatttcagttgtccagccttcttccatactctcagatgaca

SEQ ID NO: 113462 - DNA, 142 bp, Homo sapiens
agggagatttttctgatctttgtatgcatttatttatgattatctgaagcgtgatgtaaaataacttatgtatatacatagcacagtgagttctggatggagagaagactaattatttatagaaaaagtctttttaatgtaa

SEQ ID NO: 113463 - DNA, 281 bp, Homo sapiens
atggtctcgatctcctgacctcgtgatccaccctcctcagcctactaaagtgctgggattacaggcgtgagccaccgcacccggccagtatgtcatcttttgagaagtgtgtgttcatgtcctttggccatgatcgtggctcactgcagcctcaacttcctgttgcccactttgtaatgggattttttttttgcaaagtgggtgttctttgagttccttgtatattcttctgctcagtttttcattgggatgctgtcttttgtcgctgagttgtgtattag

SEQ ID NO: 113464 - DNA, 159 bp, Homo sapiens
gcctggggtggtggggcagggagaccctagctcagggactctgacagatttgctgatgttctcacggccagagctcattgcaagtagctgagggaacagtccctagaccacaggtcatggccaaatcaccaggaggctcactggggtggggaggggcta

SEQ ID NO: 113465 - DNA, 673 bp, Homo sapiens
ggcatcctattcctcccctttcctcccgaatgtgtgggtgagagggatcaggagaggaaaagacggggaacgacggagcaaaaggaaaaactgaggagaaaagaatgagggagacccataaatacacggcaaaatggatgatactttagggacttgcaaagagagcaagagtgaaagagaacggatggaaaaagtagcagggggagaaaagcacacagagaaatttagaaaaaaaggggaccttcagagagatgaagggcagcaaaatagagtggggcggcaaaggaggaggcactgcagacagacagacagtggggagaaggtgaaagagttggagccgcggctgacagagctacgtggtgctgggactgaaagagagggagagagggcagtgggtgacaagcagagtagagggagaaccacagcagggagtaagcctaggaaattgggggtgctagagagtgggaacaaaggagatgtaacagggaagagggaatttaacaaggagagcagagagggagcttagatgggggaaaagaggcagaaatacgtggagattggggacaatcggaaagattggggagaaagagctacgagaggtgaagtaagttgcagagcattgggcagaacagacataaaagagggaataaagaaaggggtgcaaaacagaaaa

SEQ ID NO: 113466 - DNA, 689 bp, Homo sapiens
ttctgcggtgtttctagaggatcccttcatgtgagagcattcatgcctgggtggtgagagggatcaggagaggaaaagacggggaacgacggagcaaaaggaaaaactgaggagaaaagaatgagggagacccataaatacacggcaaaatggatgatactttagggacttgcaaagagagcaagagtgaaagagaacggatggaaaaagtagcagggggagaaaagcacacagagaaatttagaaaaaaaggggaccttcagagagatgaagggcagcaaaatagagtggggcggcaaaggaggaggcactgcagacagacagacagtggggagaaggtgaaagagttggagccgcggctgacagagctacgtggtgctgggactgaaagagagggagagagggcagtgggtgacaagcagagtagagggagaaccacagcagggagtaagcctaggaaattgggggtgctagagagtgggaacaaaggagatgtaacagggaagagggaatttaacaaggagagcagagagggagcttagatgggggaaaagaggcagaaatacgtggagattggggacaatcggaaagattggggagaaagagctacgagaggtgaagtaagttgcagagcattgggcagaacagacataaaagagggaataaagaaaggggtgcaaaacagaaaa

SEQ ID NO: 113467 - DNA, 1159 bp, Homo sapiens
atgctatataagcccaagttctaaatcctcttttgagtattcatctcagtactcccctgtgtttgtacaatgcacatgctttgtttctgtcttgtcaatctgtcttttgttagtctacttgatagggccacagatggagaacctaagatgaatagaaaaaaaagatttttctccccaacagaaggattatcgccagttgcacttgttctatatacccgtagtctcggtatgctgacccagacttgggtaataggacccagtgggtaaccgaggaaccccacctttgtgcaggatcagtgaagatgtaatctggatattcataagctcttctctacctcttggcatcccacagtcctgtgttaatgtaagtgtggtcttccccagaaaggggaggcctccctaacattgttaaagcctagcatatgctgcttagaggaaattctatatccctaagcacttagattgctgaataagaaagaatgataataaaataaacaattaaataaaagttttaaaaaatgaataaaataaacctgtggaaactataaggaaggccagaagaaatataaaattggagattaattggggtgcaggaaagttatggaaagaatataagtcctgctagataaatcattagctattttaataaagaatacagaagaaaataggaacaaaagaatatatactggaataattttgagagtaatttgaagaattagatgcaaataaatttgaaaacctttaaaaagaaaccaatggcctaactgacccaagaagggaaagaaaatctaaacagactgataaatacaaaatgaaattcagacacttacagagcagccaggcatggtggctcacacctgtaatcctgtcactttgggaggctgagatgggaggatcacttgaggctaggagtttgagactagcctgggcaaggctcccatctctaaaagaaaagaaattagctgggcatggtggcatgtgccttagtttcagctactcaggaggctgagacgaggattgcttgagcctaggagggcaaggctgcagtgagccatggtcatgccactgaattccagcctaagtgacagagcaagaccttgttctcaaaaaaaaaaaaaaaaaaagttacagagctccaactaaataatgtggggaacaa

SEQ ID NO: 113468 - DNA, 1126 bp, Homo sapiens
atgctatataagcccaagttctaaatcctcttttgagtattcatctcagtactcccctgtgtttgtacaatgcacatgctttgtttctgtcttgtcaatctgtcttttgttagtctacttgatagggccacagatggagaacctaagatgaatagaaaaaaaagatttttctccccaacagaaggattatcgccagttgcacttgttctatatacccgtagtctcggtatgctgacccagacttgggtaataggacccagtgggtaaccgaggaaccccacctttgtgcaggatcagtgaagatgtaatctggatattcataagctcttctctacctcttggcatcccacagtcctgtgttaatgtaagtgtggtcttccccagaaaggggaggcctccctaacattgttaaagcctagcatatgctgcttagaggaaattctatatccctaagcacttagattgctgaataagaaagaatgataataaaataaacaattaaataaaagttttaaaaaatgaataaaataaacctgtggaaactataaggaaggccagaagaaatataaaattggagattaattggggtgcaggaaagttatggaaagaatataagtcctgctagataaatcattagctattttaataaagaatacagaagaaaataggaacaaaagaatatatactggaataattttgagagtaatttgaagaattagatgcaaataaatttgaaaacctttaaaaagaaaccaatggcctaactgacccaagaagggaaagaaaatctaaacagactgataaatacaaaatgaaattcagacacttacagagcagccaggcatggtggctcacacctgtaatcctgtcactatgcccggctaatgggcgtttcccaatgttgacccagggctggtctcaaactcctgggctcaagcaatcccacccactttcggcttccaaagtgactgcatttctttttaactctagatacattccactattcagaagtacacggttatccagttactattgaaaggaatctgttccaggttcggatcactctgcataaagctgggataagcactcgtaacaacggagaaacagaaaacaactcttggcggca

SEQ ID NO: 113469 - DNA, 192 bp, Homo sapiens
aacctttacaaagatggtgccacatggaaggtagatgggacaggaagtctggtagggagggagaccaaggaggagacgacacatacggtggtgccatgagaggagcaggtcccttggccctggatttcctgcaacagcccagccatggcaagagtccccctcctacaagccagggctgggtggctgggcact

SEQ ID NO: 113470 - DNA, 249 bp, Homo sapiens
agagatagggcggggattgccttaacatccacgttgggaatttggtctgatcctaatgaaatggagaaccacttataactaactccagatacaaattgtggaaagatacttggcttacagtttaaagaatggaaaggacatttggagggtgcgtggggagcttagagacccatccagagactgaaagctctcctttctcctttcaagcagcgccaggcatgtgtatatccagcttgcaaggaccccatt

SEQ ID NO: 113471 - DNA, 840 bp, Homo sapiens
gatacttgatttttaaaattctgttggcagtcacctgccaacagataagctcctaagttttcctggtggtccttgcagtcccattttttccttgggtcttgggccaagttgaatgcattctgattgcagatgagctcccctcttcttcctccctaattccagatgggacccttggctctttttgtatttattctgggatcactgatgcgaatttcagcatgcagctccagtcacatcattccactgctcattacccctcagtgacttcgcatcaggtgctagcttagcaacactttagctggctgcttgagagccttcaggctgtggacccatccagccctgcagccttccctcctctccctcgagcatcctgtgtccagagaagcctggcttttgatgtttgcctgaatacatcatgctatcctgcctgtcgtctttttcgagcttctccttctggtagtgtccttcccttcacttgtcaatagcctatttgtaccttgggaccacctttgattacatctcctgcatcagccacttttctcctgttaataagaggtattaacatcattacccttggagccagcagagcactaaaatagggaggatgctagcagcagctgcagaccgcatgccagcaacactcaggattacggagagtatttcaggagtgcagcgagtttcacagaagtgcacaaccccgtacaggcattagtatcccggctttgccagtgaggtaacagacagtggagaggggcttataaaagcccatctgtatcagagccggaagtcaagccttggtctgttgccatctgcttcacgattggctgtctcttgtacctg

SEQ ID NO: 113472 - DNA, 611 bp, Homo sapiens
aagtaaactaaaccaatgataacaaccatataatcaccagttgttctaaatgcaaaataaataaataaataaataaatagggtaataagaatgcagagtaattgggatagtcacttcagggtgcctgcagagaccacaggagagggtgacgtgtgtttgtgatttctgtggtaccacccatcagtggacctgatggaccatggttctgacttctatcctttccccattttatagatggggaagatgagatgcagaagcacagtaactttccatgtgcatgtaggcatctatgtaagtggttaagtgagaattcaaacccaggtggtatgactccagagttagtatttttaaccactgtgctgtactgtcccacaagtaatattagtttaattttagtgaaataaccaagataagtaccaagcagactaaccccaaagtccgctcttaacagctacactaactgcctctcaagaggtcgtagagcttatagactgacacagctggtgtgtttttatcattttttttctgtgaagtaattagtatttattttttctattttttttcgatttcattatttttcaactaattataaaacaccttcaaaaaaaaaa

SEQ ID NO: 113473 - DNA, 571 bp, Homo sapiens
cagtggtttacaattcagacttgaaattcttttagctttaaacctaaatccacatttaagatcaattaagaccattcattctgtccagcattagtacagatggaatcctgctgtacactagtacaataatgtccatgtattttaaatcacgactaacttcctcgcttttcctcagaaaaataacataaactaccatattctttgctcattagacctattttccaaagctacacccacctctgcaactctcttttgaatggcgatatggtttggctgtgtcgccacccaaatctcacctggaattgtaataatccccatgtgttaagggcagagccaggtggagataattgaatcatgggggcactttcccccatgttgttcttgtggtaacgaataagtctcacgagagctgatggttttataaatgagagttcccctgcacaagctctcttgcctgctgccatttaatacgtgcctttgcttttcctttgccttctgccatgattgtgaagcttccccagtcatatggaactgtgagtctattaaacctctttcctttataaattaccca

SEQ ID NO: 113474 - DNA, 474 bp, Homo sapiens
aatgataattgtgcgtatttatggggtacaatgtgatgttttgatatgtatacattattgaaagaggctaacatagccatcaccttaccaatttatcattttgttatgagaatgttagaaattattttagcaattttgaaatatacaatacattattagtattagctgtggtcaccttgtagtgcaatagataactaaaacttattcctcccatctaattaaacttcgtactcttggatcaacatcttttccccatctgtcccacccctgaactcccaagtctctggtaaccatctttctactctctgtttctatgagataaagttgtttagattccacatgtgagatcatacagcatttttccccagagaataagagaatccagctgctttttattaagataaatattaaagacatttgcaaaaatgtaaatcaatattacttttctcattaaatttgttttttaaaagttat

SEQ ID NO: 113475 - DNA, 676 bp, Homo sapiens
ggatataattcactgggtggggtgctggtggcctcacgcctgatattcccatggtactttaaggcgagtgctcgcatagcgaggatcacatcggtctttaaccatgtgatggcaattgcgttgccagagtagccagacactccgtgccattagcagtccatcctgaggctactgcgtgatgagactcctggactctcattacatggatttattaacatgaagtccaaagctactcgtacctgtgggcatggtagctcatacctgtaataccagcgctttgcgaggctgaggtcagaggatcacttgtagtcaggagttcaagaccagcctgggcaacatagaaagaccccatctctacaaaaagtaaaaataaaataaatatgtttcctgattaaaatttgcaattatgcattcggaaaaatataatgagcaaagtacaaatcacaaaaaaatgccatcacttagaaataacattttggcaattctagttttttaatgcatatttcattcatataggtaagatcatataatacatacaatttcatatccaatttttatcttaaataatataaatgtaattatatcacaaatcagttcatattactaaaatttcaaaaatatttgaatggctgcatgttgaacaccatcttaaatcaggggttgcagactcagatag

SEQ ID NO: 113476 - DNA, 338 bp, Homo sapiens
taacttcattaattgctaaatttaatattcataaaatttcaagatggaaataattttttggtcagattcctgagtatgctgagaaatcacagccaaaagtatattaaatgcattactagtagccaaataaaatttaaaggcaatgttaaaaaatccatttgactactttttgcaacctaaaatacttatatttaacatgagacataggtgcattttaatatgtttgctgtgaagtgagatgaaatttcaaaattaaaagtatcgaggtcctacaaaagtcttaaaatggctctgtttgagtatgctctaaataaggcacgtggttgcacagagttgga

SEQ ID NO: 113477 - DNA, 772 bp, Homo sapiens
gcaggaggatcacttaaggccgggagttggagaccaaccctggcaacatagtgagatcctgtcactacaaaaaaattagaataaaaaataaggccagcatggtggcacacacctgtagtcccagttgaagtgagataatcatttgagcctgagaggtggaggctgcagtgagccgtggtcacgccattgcactccagcctgggcaatgagtgcaatgagtgcaaatgagagcgagaacctgtctcaaaagaaaaaaaatatatatggtcacagagtaatgtgctgcttttatgtcctctatgattttgaaatatttaccctgggatagtgatttcttcttatagctccaatcatgtttttgaatatgaaagaatcattgtattttaaaaagatagccagtagattttatttttaaatctgtttctaaatatccaaagactccagtgattcattaaaatacttttgtttccctaggaaaaaaagtttccacatatgcacggtaatcatttggcattttgtaggcttaagccttggggagttagtggtatttggctcctgacatggaagtctttctcttgtcagacaaatccttcccctgcacattcctgctgaaaaatttgttgctgttgtgcctaatggcaagcagtgtggtggttggatatgggtctgtactgcccaagcgaactctccacattgatactttaaacctctttgtgagtatactttaactttatataatattaacccatttattgtttcatcttactccaga

SEQ ID NO: 113478 - DNA, 852 bp, Homo sapiens
ctggagaaaaatcagaatgctgtagaatatgggatgatttggttagggctaaaaggatgacctgtctttaacaaggtaggcaagactataggaggagcaggttttgagaggaaattaagaatttgcaatatacttgttaatttaaaaatgccttctaggcatcccgtggagaggttaagtatgagtctggagttccatggagaaaataagctgacatataaatttgggattcacctgtgcacagccattgactggatgagatcacagagagaatggcctgagggatagaagggatcaagcccaagtcattgctcatcccaaattaaagatttgtaaaatgagaacgaaccttaaaagaggactaagaaagaatggtcagtgagactgggcacagtcgctcatgcctataatcctagcactttggaaggccctcaaggtggcaggatcgcttgagcccaggtgtttgagactggcctgggcagcatagcaagacctccctctctacaaagaacaaaaaaattagccaggtgaggcagcacacacctgtcatccaaggctgaggtgggaggattgcttgagcccggcaggtcaaggctgcagtaagctgtcattataccattgcactccagcctgggtgacagagtgaccctgtctcaaaaacaaacaaacaaacaaacaaacaaacaaaaaacaaaaaggtcagagagcactgaggagaatcaagaaacagttgtgaaagccaaatgaagaaagcagtttaaatgtgactgactgactgatggcctgtgttaaatcctggtgaaagatcaggtcgggtgagtttggagaaatgaccactgggtttggcaacct

SEQ ID NO: 113479 - DNA, 219 bp, Homo sapiens
tagtagtgggtcaggtgtacatgcagtcctggacccaggagagagacagaaggcttaagggggaaatttggggaaggcatttggagagagagaaagaaatgagaaacaccaaggagagagatacagaagagaaagatgtaaaaagaccgagggtgagagactgaaggcaagagctggggcaagctggaagaggcccacgaaaagatgctcccagggagc

SEQ ID NO: 113480 - DNA, 325 bp, Homo sapiens
ggacactgagtactatgtctgaaacacatgggaatccctaggataccttccagtaattatccagtggtaaaagttagcagattagaacaacccaatacaagtcaggccaaatacaagtcagtccactagaggctaggcccttgaggaataaagattttggattacttcattaagtaaagaactaattctaaccagctgagatgctagccaaacaaataaaatatggatttcccagtggagggaagttataaatatcagctatagcctcgtgaccagttgcagaaaagatggctaggctgtgcatattttcttgcttgtatatata

SEQ ID NO: 113481 - DNA, 649 bp, Homo sapiens
cttcgggccttgtatattaaattggtttcttaaatttataaagcagttcatagcttctgtcaaacttacgtatcttaaaacccaatataactcccttgttgtgactgaagaatcaatgatttgattacccaaaacatgagtggggaatgtgatacctaccctgttttaacctgccccaagtttacgtgtacagtgggtcagaagggtgacttctgacccttctgctcagagtgactctctcttagctgagatagctggacactctccattttagcttcttcacttgcagtccccttatccccctcccttaagggaataactagtgcaagctgactccaagcacatccaggaatgcacttactgataagatattgaggcaagctgtaccagcagctcctggggacgtgctcggcggatggtacccaagcccctgcatttatctctttgtgatagtttaagcccctgcacctggaactgtatttttctgtaactatctctgtaaccattaatttttttaactttttgcctgttctgcttctgtaaaaattgcttcaagtaggctccccctcccctatttagaccatggtttaaaaagaaatctatcccgttcttcgaggccaagagaattttgagctctagccatctctcg

SEQ ID NO: 113482 - DNA, 204 bp, Homo sapiens
taatttatagaaatgaggtctcactgtattgcccagactggtcttgaactgctgagctcaagtagtccccccatcttggtctccctagtagctgggattataggtgtatgacacgatgcccagctctatttgagtaatctgtttttttttgttgttgttgttttttttaaagacagagtctttctgtgttgcccaggctggagt

SEQ ID NO: 113483 - DNA, 683 bp, Homo sapiens
gagagtgtttttctctttgaattgctaaaaatgttatttcctctctcctggatttttcaaggtgtgcaataagttgtgtagttgctgctctgctgcacagagctttaatataaactgcgtattttcactctgtatgtgtgagtaatctgtgccttctatggctctgatcgtgggtaagcaaaaaacacagtgactgctgaaatatagggatggaaatttctttgtcagtaaagatcctatgaaatcatatactgagcatacgtaaaatatggaattgtctctgcagtattgatcgagcacaaatccactttcgtaaagcaaaaataaaggtcaaacagaaaaggcacatcactggtttttaaaattttttgaataataagtacttgaaattccttaaaaatgacactatatatgatttaacttagatagctagaatagtcaaatacatagaaacagaaagtagaatgcttattgccaggggctccagccctggtgagggaggaatggggagttaagtgtaataggtgctgggttttagagatgttgacaaagttctgaagatagatggtggtgatggttgcacagtagtgtgtgggtatacttgattccaataaactgtacacttaaaatggttaaagtggtaaattttatgtaatgtatatttaattgcaataaaaaggata

SEQ ID NO: 113484 - DNA, 574 bp, Homo sapiens
tctgccttgtctggcatacagcaggtaatcaacaaatgtcaattacctttcctgctcatctcccccttctccatttcctcttcctcccctatcccacacacaaaaacagctcaatttgtagtgacaatctagattccaaacaataaaaactagacacttctcagatggagttgggtatcctctgcccaaaatgctgaagcaaaagggcacttacagtgagcattcctatttaggtttctcttaaccaggaaagttgactctaactccttattttaaacttaaaactgactttcaactccagatccagggttgtccctcaaagctacagctgtaatccagagtcaaaaatcacctgacccctattgccaaggtttctgcttctgattttggctgggtaaataggctatgtgtgttgggagagagagaagagaaagcaagaactaacttgtactgaacatctcctgtgcgccagatgctttaaatatgctcatctttcaaaccacaatgcaacaggtatcactctcttcacattacagacaactgagttagcagacagtattttttgaatgacaaa

SEQ ID NO: 113485 - DNA, 349 bp, Homo sapiens
agttggatggggagatcagagtgggtctcaagagtgccactcctcggcattgtgtggatgggcggtagtgagaataattactaagggcgtcataccctctcgtatctgcatcacccataaggggtgggcagtggtgctgccgtgtcttgtcaggaggccagctctgtgtcacccaccaggctgggctcagccacaagtcggcaacgtagtgcctccagggcagatgccacggaccgtagagaagcaacgcaaggtcagagagaaaagattgcggccggccggtgtcaaggcgggggacctgtgagctgggcctggagctgaggcagaacttgatggactatgactcaag

SEQ ID NO: 113486 - DNA, 594 bp, Homo sapiens
cttctgccagccaagaatctactgggttactttcaaaaaagtgcacaattggttattggctcttccttcctaggtgaggaaacctaggcatttcaaagaagtaatttttgcagtggactccgagtgcactagagcccacggatgttgactggtttaggccagtggctacacatctgtaaagaatatccagtgctggggaccttgacttatgagctctaagtaggcttcttttctttggtgacaggatagagagctgtgtacttgaaggtctagcaagtagagctttagtgaatcttggggtaggtgctgtctctctgggttagtatattagaatgggagtggggaaccttttttatatagaggacctctggcctacagagagaaatcaatcagtagctacttaaaaatagcagaagtggggtttgggaaaagcaaaaaacaaaatgttctgtatgatccctgtgttacattaaaaacataattttaatgtttttaatctacaaatgatagagtgcaaataatgagaaatacatttaaaaggcatgttgtacttaagtttcatcactaagtaaattgagaaggtgggaaaaaata

SEQ ID NO: 113487 - DNA, 411 bp, Homo sapiens
gttgcattccagcctgggcaacagagtgagacaatgtctcaaaaaataaaaaagagagagtctgaaattcattctttcaacatgcttgtgttgggtgctgcctggcacagcaattggtgcccactaactcacagcgtcggggaagataggcacggaacaagtcatctggtgtggtccctgcagtgggggagcccagtgagggcctgtccagcccagctgagaggagactgagagaaggctaggtggcataagtaaagatatggatagcgctttcctcttcagagtgtttattaccagggttagataaagcagatctcatgtattttctgctactaagtagaagttcttgttttgtttgatttctggtgggctttgatattttccaaaaagataataactcattgtagagta

SEQ ID NO: 113488 - DNA, 113 bp, Homo sapiens
agggatttatacaggaagatactgtagtggaagggcagaaggtaagaaatctgcatgctggcatcagattaggtggattcaaatcatagcacactgtggcttgacagctgtgt

SEQ ID NO: 113489 - DNA, 629 bp, Homo sapiens
atggctggaatgccacccacctacaggtgggatagttggacagtgcatcctgggagcagatcaaggagacgaagagactcggccatggtccacagctcccacctgctgtgtctggtgctgggaggcaggttcttgttgcagcagaggagccacccctgggagcagggcatctggggaccaatccgaagatgctgttagcacatggctagcaggtgcccctcagcccccacctcccacaagttcagggtccctttctgccaagtggggactgctggttcttcaggacaacccagcttccccaaccctctgttcagacactaagcagtcctctgactccccatcactagggatcaggagagccccttacaacacacacattctgtcgagggtgctagaccagtctctattagtttctgtggctgctataacacactaccacaaactgggcagtttaaaacaacagaaatttactctcacagtcctggaagccagaagtctgaaatcaaggtgtcagcagtactgtgctctctgacggctctgggtgggggtctttccttgcctcttccggcttctggcggctccgggtgttccttggagtgtggctgcatcactccaatatcagcctccat

SEQ ID NO: 113490 - DNA, 398 bp, Homo sapiens
ttctgcctgttactccttgttctttatgcattctaccctagtatcattctatgctctaaccatgccaagtgggcatagtctctgaatgtactctgttctttcaccctctctgcatctctgcacacactgccccttgcctggagtgccataccttattcatctatctaactcctccttctttgaggctagcaaatcatgtagcacttcctcccacaagccttccttcattcacattcctccccttctactctcccagagcaccctatgcttatcttgttcattgcccttattatccttaattttaacacattctaagctcctaaaggtcaacacttataccttttgctctgttccttatgcaatatttagcacaatgcctagaacatcagaggtactca

SEQ ID NO: 113491 - DNA, 344 bp, Homo sapiens
atagcaaactcatggagtacgtgaaacgcatatcatggcacacaaaatgaactatgctattgcacaaaggctgaagacccaccataaccaatttcacccattagttgaagaaaagactggatacagggatgatctaggcaactgtgccaccattatgagaaaacccaagatacattacaactgcatattagattgataatgtatttatactagtttgtataggattatatcatgtgacaatttatattttagtaactcctgaatatataaatagcaaaacatctacttaatttgtgacacaaataaaaaattagaaatgttgttcatgggacctgacattagtc

SEQ ID NO: 113492 - DNA, 592 bp, Homo sapiens
atggggctgaggggacaagtgggacctaaacaggtccagcaggtaagggcagaggcatgaaaggaaagtaacctctctccttctctgagaggcttcctgcggtggaagatggaaacaaaaaccagaactttcttctgttctgtggatgcccacgggaaactcctctctgggctgccagggatgtcagggatgatgggaaggctgggagacttatcttcccccgaccccatctttgctgctactgggaaaagctgctctcctctttgccaaagttccctggcaatctgggctcatggtgaaatgtttccaaccagaacagggagggtcatgccaaggtgtgccaaggacacaggcaccctgcatgctttcttcttctgaaactcagcaccatgcaggagaaaaagcagaacttttgagtcagatagaactgggttcaaacttgggcttccccactcatttgccaagtgaacttgggcaagtcccatatgtactctaagcccagactggttcatctgtgtgatgggaataagaatagtgacctctctgtgttgacaagaggattaaagaggataacagaggccaagtgtctcgc

SEQ ID NO: 113493 - DNA, 312 bp, Homo sapiens
gaaagatgtactgttatttctaggatcagatatcagggatgtcctgcatcagtgatgagagtgaagcttcacagttttgatggctgtttaacggagatatgatacttgaagcagacctccactgatgggtatgtcggtggtttgcaattttttgctatttaacaattgcagaaatcaatatcctgatgatggattattttgcaaatgtgtaagatatgtgtagaataaatttctagaatgattcaaaggcatatgcatctttaattttgattgaaattgccttatttatctccacagaggtttgtatcaatt

SEQ ID NO: 113494 - DNA, 300 bp, Homo sapiens
ggtcgactctgcctcttatctatatacagacaagatttctttgttccacagtctaccaagtagactgtggaacaaagaaatcttgtctgtatatagataagaggcagatatgcaaacaaaagcagagggagagggagcatgggcacctcctaggtccgggctggctttccatttgtcccctaattccagtctctctctgaggcccagctgctcccattcttaggtctggcaacctctacatccttataataaacccctctttctgctaaggctagctcgagttcttctcagacacctaca

SEQ ID NO: 113495 - DNA, 578 bp, Homo sapiens
tgaatgccaaggctgcagcctgaagcatttatttagtgccggagagggatctagttattttagagttcccttgaatgcaatattttaattttgttgttcttcttgaaaaattagatccctctgagcttccagtattgatggttgagatgaatgactttggctctggctgaccatggtctttggaaggataatctcagagttgtgatgggagtggacttggctgttgaccccaaatcttactttttggatggtaattccctcctgcctgccagacctgctgccgttccactgccacattaattcaccctcagaatcagggcagatgtttctaagctgttgaaaatttcttgttctctaaagagagaaaaacaccaaggacctgatgctgtgtgtcatcccgtccttcagggaaaataatgagcaccctacaaccatgcaaagctacatttatggactcgaggtattttgtgttcattatgggtgaaatgatttaaagtcaagtttggatcagcctccaatcgcacacattaaagaagggtagcacgacatggatagcaccaaaaaaaaaaaaaaaaaaa

SEQ ID NO: 113496 - DNA, 445 bp, Homo sapiens
atgatggtgtgagcctggggtgagcacagaacacacagcaggtggttcgtctgggttcctaggggaggacggcaggtctggaggggacccaaaacaaagcccagaagccgcccaaccatgtgaaatcatgaaatgtggtaactacttaaaaatgtgggccgggcgcagtggctcacacctgtaatcccagcactttggaaggccagggcgggcagatcacgatgttaggagttcgagaccagcctggccaatatggtgaaacaccatctctactaaaaatacaaaaattagccaggtgtagtggcaggtgcctgtaatcccagctactcgggtaggctgaggcagcagaattgcttgaacctgggaggcagaggttgcagtgagctgagattgcgccattgcaccccagcctgggtgacagagcgagattttgtctcaaaaaaaa

SEQ ID NO: 113497 - DNA, 240 bp, Homo sapiens
tggtgtttgtgcatcctggggtaaggactcacccgtccatggctcttctcctcccaaaagtattccgtattcctggaggctgcctgggaaaaaaagtgctttccgtctaggctggatttggggaactgtctagtggagaggtgatagccaccttgattcctgttttcttggcatacccacccaacgcagatgtgctgggtgaggcagaaatctcgtccttcctttttagatgaatttaac

SEQ ID NO: 113498 - DNA, 378 bp, Homo sapiens
ctgattccatgcccttaagtatctctgatggtgttaggggccgatgggcaggtagcccgcaggggtaaatgatcaaggtgttgaaggcgctccagagagcaggtgttaaacattttcggccgggcgaggtggctcacgcctgtaatccgagcacttagggaggccaaggcaggcggatcacaaggtcaagagatcaagaccatcctggccaacatggtgaaaccgtctctactaaaaatacaaaaattagctgggcatggtggcaggcacctgtagtcccagctacttggggagctgagacaagaatcgcttgaacccgggagttggaggttgcagtgagctgcactccagcctggcgacagagagagattccatctt

SEQ ID NO: 113499 - DNA, 549 bp, Homo sapiens
agagttacaggcatggtgtagttagaaagctttgcaaaactgaattgaagcaaggctttgtgagataagcaattaaggtaaacctgaggaagaaggtcagttgtgagctgaaacacaaaggaggagaagaggagtggggagcacattttaggtgaggaattcagaactagtaacaactgatgtctactcactggcaatgagaagaccatcctgatgcatgtacgtcactgaagataatcttggagagtaaaaagtcaccagacttgaaagggccttgaatgccaggaaggcgttggtaattggcagtgtttaagttgatggactgtaccaaagacaggcatccctattcttgaacaagtaagaggcagtgccatgcgtggattgccaggagtcgaaccaagacttggagttaagaggatattcatcttttgcatccaacaggcagaatatgatctgtgtccaaaagtgaacttgagtcaggactgaatcaattacagcatacaacagcacaaaaatttagtctgctggctgactggaagcaaaaaaagt

SEQ ID NO: 113500 - DNA, 558 bp, Homo sapiens
agaggaaagagataataaacacattaaggcaggactgtgtctaatgtgttcaagacaggcagagacaggcatagtggcacagtcccagctactcagggtgctgaagtagaagaccagcatggacaacatactaagaccctgtattaaataaaaatgattcaaccagcaggtcagaaggctgaaatattgcgactgaaactgataaaaggagatgacatcagagaggaaatttgggaagcagattgtgtaggtccttgaggttgttgtagtaatcttggcttaatttttcatgaaagatgaaacaattagagaattgagtggagaaatgacataaactgacttacatcttaaagggctcattttggcttttgtgttgaggttagacactagtggagcaagaatggaaacagaaagtccagttagaagaacattgccgtcttaatattgctatgggctaggaagatagcaatggagataataagaaatggttaattctacatctgctttaagtgcaaagccaaaagtgtttctttctggttgcattttccctcttactct

SEQ ID NO: 113501 - DNA, 629 bp, Homo sapiens
tcacagctacaggcaaaaatagagcagcctggggaaaactcagactgtacctgcacagataagcaggcaaggtccagcacagaagccttttgttctttgtgtgattagcaggctcccaggaaaatgttttctccccttttcagatatgaacacggggggatccatgggagattgcactggaaacagagggggtttacctaaaagaaacccacaattactcaaacaagaaaaaactatgctttgtgcttacctagagacatctcacagctgtataggtaggtggagttgtgcagacaggttttcaaataagagaagttactcaaacagctacagagatgagaggagtttcttataaaagcttttgcattcagctgtaaaatggcaccccacttgggctctcctctccactgtggagagctttcttctttcacttactaaacttttgctccaacctcaccctttgcattcatgctccttaattttctcagtcatgacacaataagttcaaataacaccttagacaatgagacaatggaccctgacctatttcaataatactgaagcattgggcagtttgaaagaggaaagttctcaacagtaagaaattgtagtgtgagttatcttaatga

SEQ ID NO: 113502 - DNA, 663 bp, Homo sapiens
gttgatttagggcaggggaaatattggctgggtgagagtgagataaggagctggtacggcatgtgggctgtgggtcacgggatttggagatgaagttggcaggcagtttggccctgtgaatgatggatgccctgtggacaaggacagcattcctgttcagaaccaagatctcccgaccttgctttcttttttggtttttgggtgacttaaacagcagaaacttattttctcacccttatggaggctggaagcccaagatcaaggtggcggcagggctgggttctcctgaggactctctccttggcttgcaggtggccaccctcctgctgcctcttcacacggccatccctctgtgccacacctttctatagtgaaatgtctcatagcctcttcaggggctctgtcctaacctcaggtctgtctttgtatctgcagtgtgttcaagcctcgagaccctcggtggtagctggtgactgccgtaggtggggagtagttactaggtctgaggctaccagatgtcagacctgtgtaccctgactttttttttaagacacaatctcgctctgtcgtccaggctggagtgcagtgttgtgatctcagctcactgcaacttctgcctcccaggttcaagtgattctcatgcttcagcctcctaaacagctg

SEQ ID NO: 113503 - DNA, 289 bp, Homo sapiens
taaaatatttttttcttttttggagcaaggtagagatggggtcttgctatgttgcccaggctggtctcgaactccctgcctcaagtgatcctcctgccttggcctcccaaagtgctgggattacaggtgtgagccaccacacttgaccacctctaaacttctgaatgccaggcagggccctcaatccccagacctctcactcaaatcggattctaacaaatctgctagatttttctctctgctcatctctcatgctgaagtacttccctgatttatggtgggaactgga

SEQ ID NO: 113504 - DNA, 280 bp, Homo sapiens
gaaatcccatctcaaacaaaaaaaaagccagggagttgagaaggaactagctaaagatactgagaaggaagggccagtgaagtaagaggaaaacaaggagaatgaggtgtcctggaagccaagtaaagaaaagtgtttttaggaggaggaagtgatcaattgtatcatgatcctgacaggtcaagtaatatgaatactgaacattaacttttgcactttgcaatgtggtagccattgagtgaccttgacaggagcagtcagtggcataagaagagcaaaa

SEQ ID NO: 113505 - DNA, 111 bp, Homo sapiens
acataaaaactctcacctaaagcaagcattcagttcatgtgcatgaagccttctaaaacctatccaagagtgttttggtagtttctagaacctttatgaaatattctagat

SEQ ID NO: 113506 - DNA, 437 bp, Homo sapiens
tcttgtgttcctcagggacaatctatgtcactgtcacgttagtgaagataatggagagaaatatgccctgccagctggtggcactcagaaagtgccatggagcagcacagcctgcgtctcagaatggacaggaaaaaagctttatcttcttcctgtcaaaggagggaaataccttgtggaaggtcagggtgccgtgcacctggcaagtgcctgcctgaccccagcctgtggcagaacctgaagggccactgcgatctttatcaggtgactcagtgcttagcactggggaagggcggagcatggagcaggcacagaaggtcccgtggagaggccctgagcagcccagacaggagcgctccattctgctgctcaaggcattacctccagcagtcaggcgcgtacagctcgcgtctctcggatgatttctctctctctct

SEQ ID NO: 113507 - DNA, 816 bp, Homo sapiens
tattgctacactatcttcttgcttgcatagtatgtgacaggaaatctaagtcatctttattattgtttctctttatgtgaagtgtcatttttctcaggtttcttctaagattttccttttatcactagttttaagcagtttgattatggtgtatccccacgttctcatgttttctttcttgtgcttggagtctattgaattttttggatttatgagtttatagttttttttcagattcggaaatatttcagctatgatttcttcaaatattttgtaactccctgcttgccttctttcctttagcaactcccattacacattacacacatatttggctgcttgaagttgttccatggttcaatgatgctttgtttattttttcttggtcttttttttttttaatcttctgtgcttcgttttggatagtttctattgctatgtctccaagttcatttatctttccttctgtgatgtctaatcagatgtttatcccatccagtgtgtttttcatttcatacattttagttttcatctgttgaagttcatttttaaaaacatcttatgtatcttaatttgttaaatttttctctaaacttttgaacatatgggatgtgttcaaatatcataactgtgttatcataactgtgttactcttatttattaatgctataatctatgtcattttaaaagtatttttgataaattattttcttctcctcaatgtcagtttgatttttctgactctttgtatgcctggtcatttttttttttagatgcacaacattgtgatttttatcttgagagatgctgtatatt

SEQ ID NO: 113508 - DNA, 500 bp, Homo sapiens
gacatctcaagcagtgttgtcaagcagggtgtagggtgtgtcagtctttaattcagatgctttttgaacagtagacaggagtttcagtcattagtatgtaaatagagattaaaggcacatgaaagaatgagatttcttaggggagacacttagggaaaggaagagagctgagaattatgccccagggctctgcaacttctcatgtctgaagaagaggatccagaaaaggagacaaaggaggagtgcccagtgacgtaggaaggaagccagggcactagtgttcaagagctttggttaaaacactgacagggaaggatgataaattggataaggatgaagattaaaaagtgaatattaagtatggcaaagagaaagttattgccaactttgctaaaagtggttttggtggaaaaatagtaaagagagctttattaaatgaggtgaggtgagaaaatgcagacagagagtaaaggcggctttttcatgaggtcttgtagtaa

SEQ ID NO: 113509 - DNA, 342 bp, Homo sapiens
ctcctcctgcctctctgtggagctgggacagtggtcttttcctgcccttggtctgaaatggaaacaccagctctactggggcctcaagcctgctaccttcagactggaactgaagcctgggatctcctgggtctccagcgtaacagctgcagatcatgggacttctcagcctctataatcacatgagctaattttttgtaacagatatctctccatctatctctatctctatctatttatcatctatctatgcatccatcctattggttttatttctctggagaactctgcctaattcaatcagcaaggaagtggaagaagacaggacaacaagaaagtcca

SEQ ID NO: 113510 - DNA, 278 bp, Homo sapiens
caaagagccatgtcacatagtaagtggccagaataggttgctgacagcatgtctagaggaaatgtattagatgaaacatattaaattcaaaaactttttttgaggcggggggcagaaatgaggtacaggggagagaaacacctacttggaaagaaccacacaactgaattggaaaacttggaatggggcttgtgggagggggactctacctgagatctggctccagtacttacagcaaagggaacttgggtgggttacagactctctgtgccttggtt

SEQ ID NO: 113511 - DNA, 827 bp, Homo sapiens
atcacttataacacacttttagtatcaggcactgtgctaagtaacttaaatatacttgttattgtatcttttacacaataatttggactgttataatccttattttgcaagtagggcaactgaggcatagtcattgatttatttccttttgtgcacaaaggagaaaaagataattctaagggctttttagctatggtctttatcttctgaaattcaaattcagatgtcaaaaggttaatttgaattctttccccatgatcaaatggcatgaaagacctgtgattatatttacaggatgcatattaaactttcaaggtccaggtgtctcaaaaagtgcttttaaaaaatagacttccagtataattttatcaccactaaatacagaacatgattaggttatagtaaaagttttcctgtctctgcagctttctctctaaaatttattcatcttagctgcccagagttccttttgttacttgaactgctaattgaagacagtttccaaagcctaagatgagatttcatttgttagaactgaattagaaagagcaggacctaatcacttgattgcaaacataggaaactagattttgcaaagggaatatgggatgtacaatattctgcttctacacaggtgttcctaatgtatatctgatctcaattttaaaattcctattctttaaagccaggtcaaaagccaggtctgagaatcttcttgtgatttaacctcttctcatcctggtgaccgctgtttccttattgtagtattcagtctgcactttgccattttgcacttgacagactgctttatgtaagggtaaaaacca

SEQ ID NO: 113512 - DNA, 748 bp, Homo sapiens
ggccggcgctcccgcctccgccctgaccatactggggggaccctgagctattttcgcgcctctccgggacctcagcgccctgcgtggccccgctggcggtttggccgcgaggcgcgggagtctgaccccagcgggaggctgcgggtgggtggggcgggctgcgccgccagggatccgtcggggtcgagggccgggagctccagccgcgccgctgcgtgccggccgggccgcccgcgaggaggggctccgtcggggcctggggaagcgcagaagcgggtggactggagaggttcggccggggagagaagagcccaccgcggaccactcgcccgcacccgctcggctgcctgctcagcgttccgggccggggaaggggcgcgcccctgctctcccagccctgggatgggacgcgccgccagtccaggcgcagcctggaccgccagttcaccgccgcctgtgagggacagtcggttgcccaaggtcgccggggccggagcccgggacaagatcccggagagcgggcagccaatctcagaggtcgctgggaaccgcacgggccgtagcctcaggactccgggcctcgcccaggctgtgcggaccttggggcggcttcagcacctcggagagctccccgcgccctggcccagcagcctcgcctgcctgattccgctccagcgcttgtctccctccgagagcgcccttccgggggaccgccggggtcggacgctccccactgcgcccaggaccg

SEQ ID NO: 113513 - DNA, 855 bp, Homo sapiens
gagaggaggagctactgatttccagctgcaaggttgaaatgaaaaccagcaaaagtgcaagccaagggttcagtttcccaatagctgcagctgtctagcacccggagctatttttaaactccttttcagaacttccagtgcttgcgatggatctattttcttaactgccaagagataatgcttaaaagggatagcttgaaaatattccacggcgctcatacaaatgactgaaatagatagtgtacaagacggcctttgtctggagcagcagaggaaagcaagatgaagtctttcagaccccaggaccatggtgctgctggatctgctgctgacaaccgtggctttgtgtcttgaatgtgcactgtgaccagaaaaggcaagaaaaccaaacagtaattgtaaagaacatcagagacctggcatttaaattggtcattgattccaggaaacaggagaccccaaaatagctcccaaagaatcccccttgacttgaagagtgctgccttatctgcaacgtggatggagctggaggccattatcctaaggaaactaacacaacaacagaaaaccaaatactggataagtgagggctaaacattgagtatgcatggacacaaagaaggaagttatttgaagatgtgctccagcaaaataagaggtaacccgggatccatgaaaaagtgttttcaacccaagagtgtgacaaagagaatttccaggatgacagccctggttcaggtctggagatcaactgccgtatacgtacttgagaacaagtatgaaagtgtccctgagggaggtatccagggaacaaataaaggggagagcatggcaaagtatttctgatatgataac

SEQ ID NO: 113514 - DNA, 314 bp, Homo sapiens
agtgcagatggagctcactgggccaaatttagtcaaggcaccagctgggtgggttctttctgggggctccagggagaccccgtttcccgccttctccggcgtctgaagccgcctgccccttggtgcagccctgagtcaccccagcctctgcctccgtctcacgtcaccgcctctgatacagccgcccccccatccctcttgtgaggaccccgcaatgacgtgggcccacccagatcatccaggaacatctccccatccccacgtccttcacttcatcgtctgcaaagtcccgtatgccacggaaggtgacacag

SEQ ID NO: 113515 - DNA, 180 bp, Homo sapiens
aaactctaatcattgtggcttaagctagttatgttttattttttttgcaaaaaatacaaatctttattgaagaactaaataaaacataccaaaacataagcataccaaatgtgtgtcaaataaatgtatacatccaataaaactctaatcattgtggcttaagctagttataacaaatac

SEQ ID NO: 113516 - DNA, 302 bp, Homo sapiens
aaaagcattggtttgggaccttagttgaggaggcacagaagaaactaaaatagcttcatctatgttaggacttaagctaaatttccatgtatttagacaaatactgtaacaaatgcatttaactctcaatactataaagcagcagaaggattgagaatccatgaataaatggatatttaccttttggttatagtttaagatacaggctattattagctgatcagtaacaagctaaggttagaattcaaaggtgccaatgacaacattcacaaggggtttctgcacatccctgcaatctaatt

SEQ ID NO: 113517 - DNA, 1067 bp, Homo sapiens
taaacccttggcttcaaggactcagggtctccctatctcttatgaagtattgggaaacactgattactggagtcaataggttatcattttgctatttattttcttctctcaagctctgaaaaaaatgtcctctgtataaattaaacaacaacaaaaaatgttgtaaattctatgtcattacagtcaacagaattataataatgcatccaaaatgtgcggccacaaaatatcaggtatatgtttgaaaaagaaaaaaatgacattctagccttgttaaaaggataatggtcccatatttttattaacaggttagcaaaacaaaatccaatggattacaatatttacatgttatttgaaaaataaagtagtgataaaagcatgtcacaattattttctttttttttttcctttttctttctttttttgtttgttttttggtaaccattacaaacacccaatccaggtatggaactgtttaatacatttgaaatgaggccaattaaaaacaaatatagacacaaaatgaatctttgtctggatagttcacactttccccattttctggtttccacatgatggcccccatcccttaaaaaaattaaattaaaacaaacatcctacaaataaaaattcttaacagtaagaaaataaaagaagaacatgcttttcaagtaagcacttattccacaaatgcaacatctttccatggattttatttgaagctgtgtgggacactgtcatctcagcaattccccttccctttcttccctcccaccctcccacaacccttccaagtaaaaaaaaaaaaaaaaaaacatgaaaaccaaaggattcacacgtgcacacatgcacacacacactcatacacgcacacacacatccaagcacacacacacacgggcttctaaaacctaggcttcaagaaaagttcttttctattttttggaacgaaaccctttgttcacaatcagaacatattataaatgtaggcttagatttagtctaagctgctccctcctgaaaaagctgatatgggggacagagcagctggcagctagatttaaaaa

SEQ ID NO: 113518 - DNA, 368 bp, Homo sapiens
gctcagctggctttcgtgttgagttgccacacagcctttcctgttcattgtcacagacccagcagcacctagcacatagtgatacaaatgctcagcaaatagacactaaatcagcaaatgtgtgacttgaaatagtttttcattatgactgatttcctgtccactttatgtctggcttttttgtttttaagctatataaggtgtaatgatttcattctgtctgattctgatttgtgaaccacatcaaatcatttcatcaaggagtcagggtatagtataacctgaaaggaatatgcctctgttttatacactgtgacaacacagtttggatgttcctgtgagagagagagagagagagagagagaaag

SEQ ID NO: 113519 - DNA, 4500 bp, Homo sapiens
  misc_feature (3597)..(3598): n is a, c, g, or t
  misc_feature (3606)..(3606): n is a, c, g, or t
  misc_feature (3612)..(3612): n is a, c, g, or t
  misc_feature (3643)..(3643): n is a, c, g, or t
ggattttcagcaccacagtctgaacatggacctcgaactttagataatctcattaatcctccactcaaccttcaagaaactcaagtcactatagaagaaatcactcctcttgtccccccacaatcaggagataaagggcaagaagatctcacaagctattttcttgaagcacttctaaaatacatagtcattcaggtaaaaagtttagaatggaagaacaaagaaaaccaagaaaggggattttcatttttgttttcacattttaagaaatattacttgccttatatttttccaaacatctgtaaggaaaacagtttatatcatcctatacttgacatcccgcagatgagaccaaagccacattatgtcgtgataaagaaagatgctgaaaccaatgaagcaatctattgtacaaaggagcctttcattaaggctcgtgttattgtcattcgttggctggtttctttctggctggagccaaaaccacatacaggacctcatattcctgggatggaaggtgaagtcttgccaaagaatattcagagagcagctgctagtttagtatccagagaagaaagcaaaaatgataatgctgataaaacagacagaactacagaacccgaacagtctcattccaatacaagcactctcacggagcgagaacctagctcatctagtctctgtagtattgatgaagaacatctcacagacattgaaatagttcgcagagttttttcttctaaaaggagtaatgtaaactttgtgacagagatatttcgtcaggcatttttattaccaatttgtgaagcagcagctatgagaaaagtggtaaaagtatatcaagaatggatccaacaagaggaaaaacctttgttcatgcaagagcctgaagaaattgtgatcacttcttcagacctcccttgcattgaaaatgtcacagaccatgatatttcaatggaagaaggagaaaaaagagaagaggaaaatgggaccaatactgctgatcatgttcgaaattccagttgggcaaaaaacggctcctaccaaggtgctcttcataacgcctctgaagaagccacagaacaaaacatacgagctggtacccaggcagttttgcaggtgtttattataaactcatcaaatatatttcttcttgaacctgcaaatgaaataaaaaatcttctggatgaacacacagatatgtgtaaacgcattcttaacatttatcggtacatggttgtacaagtatcaatggacaaaaagacttgggaacagatgctgcttgtgttgctcagagtcacggaatctgtactgaagatgccatcacaagcttttctacagttccaagggaaaaaaaatatgaccttggcaggtcgacttgcaggaccacttttccagacccttatagttgcctggatcaaagcaaacctaaatgtgtacatctcccgagaactttgggatgacttactgtcagtattgtcatcgctgacctattgggaagagttggccactgagtggtcactgactatggagacattaactaaagttttagctaggaatttatatagtttggatctcagtgatttaccattggataagctgagtgaacagaaacaaaaaaagcacaaagggaaaggagttggacatgaatttcagaaagtttcagttgacaagtcattttctagaggatggagtcgtgatcagcctggccaagccccaatgagacagaggagtgcaacaaccactggttctccaggaaccgaaaaggcgaggagtatagtacggcaaaaaactgtcgccatgagaagccgatccattggtgaatgtgctctgccatcggcctatatacgcagtgctaaaagtgctcctgttctgatccatacttccaaacccttcttgcctgatattgttctcactcccctttctgatgagctttcagatattgatgatgctcaaatacttccccgctcaactagagtcagacatttttcacaaagtgaagaaactggaaatgaagtttttggtgctttgaatgaggagcagccattgcctcgaagtagcagcacttctgacatcttggaaccattcactgttgaacgagccaaagtcaataaagaggacatgagccaaaaactgcctcctcttaatagtgatattggcggcagcagtgctaatgttcctgatctgatggatgagtttatagcagaacgacttcgaagtggtaatgcctcgactatgacaagaagaggaagtagtccaggcagcctggaaattcccaaagacctccctgatattctaaacaagcagaaccagatgcgccctattgatgacccaggtgtgccctcagaatggacttctcctgccagtgcagggagcagtgatcttatcagctcagatagtcattcggattctttcagcgctttccaatatgatggccgaaaatttgacaattttggctttggaaccgacactggggttacgtcctctgctgatgtggattcaggttctggccatcatcagagtgctgaagagcaggaagtggctagtctaactactcttcatatagattctgaaacaagcagtcttaatcagcaagctttctctgctgaagttgcaactattactggttcagaaagtgcttccccagtccactcacctctgggctccaggtcacagactccttccccttctacattgaatatagatcacatggaacagaaggatctgcagctcgacgagaagctccaccactctgttcttcagacaccagatgatctaggcaatatttcaaaattagatatttaccttttttcttttagggcgtcagtgtcaggagatcataaataaggcatcttacatttgattatatatgattattgtaaatattttggacttttctaagtcctttggaaatttgttaatgtaacttttttcttgttcttaaagatatttgttgtctgagttttattcattttattatagttgattagagtcctcaaattagttattgcattattttcaagtattgtattatcatttattgatattggtagtgtttcctaaaacaggaaatacataatttggcatccttattcttagttttatacctaaagaacctagtaactcacaggagaacgtagtaacattatcacttgttaatcaagctttcagtgaaacagtttatcaaaccattttttttattttgattcagcaaatttgtcaactaaatttaatttaaaagtagaggtccaaatgaatattttcaagtaaatgttaaaaagtgacttgggaaacctaagtaactgccaagttttttttaaagttatttttgctagattttgtataatgtaacaaacatcagacaaatatgcacatttatggcatatgcaaatatgccataaattggtcaaagacacagttaatgagatatttacaatgaatgaaaagctagttttcattgataaggtagcacatttattctctgacgaaaggaagaaatttaaaactatataacttctaaacttcttttaagaaacccgtttattttaaaactaactgtagaggtgaggtttcaccatgttgcccaggctggtcttnngcttctgngctcangtgacccgcctgcctcggcctcccaagattncgggtgtgagccaccacacccggcccaagggacccattcgttaacttgcaattgccttgtaattatatagccctaattttctggtttgtggattatttctgaccttttctttttctcctttgatctgcagttgtttatttgtttacagttatttccccaacatttggaaaaaaacttcagttatagaagtgtttcaaggctagtaaaatgaatgcacataaaccctttatataaattcatcaattaatattttgccactttgtctatatttacacacagcacatatatgcacaaaatagcctgcccttcccacatgtctccctaaccttttatttttgctgaggcatgtaagaggaaattgcaaatatcagatccttcagacctaaacatgtcagtggatatgtcctaataagtgtatgttttctgcgtaaccacaatataatggccatattcatgatatttaacatagatacattgctgttattttagtctatagtcgtaagtcctcaattgtcccaataatgccctttatagctaccccacaccgtcagcaatccaataaagaatttaatcaggctgggcaccgtggctcacgcctgtcatcccagcactttgggaggcaaaggcaggtggatcacctgaggtcaggagttcgagaccagtctggtcaacatggtgaaaccctgtctctactaaaaatacaaaaattagctgatcatggtggcacacgcctgtcatcccagctactcggtaggctgaggcaggaaaattacttaaacctgggatgtggaggttgcagtgaactgaggtcgtgctgccactgtactccaacctgggtaacagagtgagactgtctc

SEQ ID NO: 113520 - DNA, 2752 bp, Homo sapiens
  misc_feature (1892)..(1892): n is a, c, g, or t
  misc_feature (1897)..(1897): n is a, c, g, or t
ggattttcagcaccacagtctgaacatggacctcgaactttagataatctcattaatcctccactcaaccttcaagaaactcaagtcactatagaagaaatcactcctcttgtccccccacaatcaggagataaagggcaagaagatctcacaagctattttcttgaagcacttctaaaatacatagtcattcaggtaaaaagtttagaatggaagaacaaagaaaaccaagaaaggggattttcatttttgttttcacattttaagaaatattacttgccttatatttttccaaacatctgtaaggaaaacagtttatatcatcctatacttgacatcccgcagatgagaccaaagccacattatgtcgtgataaagaaagatgctgaaaccaatgaagcaatctattgtacaaaggagcctttcattaaggctcgtgttattgtcattcgttggctggtttctttctggctggagccaaaaccacatacaggacctcatattcctgggatggaaggtgaagtcttgccaaagaatattcagagagcagctgctagtttagtatccagagaagaaagcaaaaatgataatgctgataaaacagacagaactacagaacccgaacagtctcattccaatacaagcactctcacggagcgagaacctagctcatctagtctctgtagtattgatgaagaacatctcacagacattgaaatagttcgcagagttttttcttctaaaaggagtaatgtaaactttgtgacagagatatttcgtcaggcatttttattaccaatttgtgaagcagcagctatgagaaaagtggtaaaagtatatcaagaatggatccaacaagaggaaaaacctttgttcatgcaagagcctgaagaaattgtgatcacttcttcagacctcccttgcattgaaaatgtcacagaccatgatatttcaatggaagaaggagaaaaaagagaagaggaaaatgggaccaatactgctgatcatgttcgaaattccagttgggcaaaaaacggctcctaccaaggtgctcttcataacgcctctgaagaagccacagaacaaaacatacgagctggtacccaggcagttttgcaggtgtttattataaactcatcaaatatatttcttcttgaacctgcaaatgaaataaaaaatcttctggatgaacacacagatatgtgtaaacgcattcttaacatttatcggtacatggttgtacaagtatcaatggacaaaaagacttgggaacagatgctgcttgtgttgctcagagtcacggaatctgtactgaagatgccatcacaagcttttctacagttccaagggaaaaaaaatatgaccttggcaggtcgacttgcaggaccacttttccagacccttatagttgcctggatcaaagcaaacctaaatgtgtacatctcccgagaactttgggatgacttactgtcagtattgtcatcgctgacctattgggaagagttggccactgagtggtcactgactatggagacattaactaaagttttagctaggaatttatatagtttggatctcagtgatttaccattggataagctgagtgaacagaaacaaaaaaagcacaaagggaaaggagttggacatgaatttcagaaagtttcagttgacaagtcattttctagaggatggagtcgtgatcagcctggccaagccccaatgagacagaggagtgcaacaaccactggttctccaggaaccgaaaaggcgaggagtatagtacggcaaaaaactgtcggctaatgaagaaaagccatatgatcacatcaatagatgcagaaaaaacatttggcaaaatccaacacccatttaggataaaaactctcagcaangtagnaataaggagaacttcctcaacttgataaatctattaaaaaataaaaacacaggacaacttacctctagcatcatacttaatggtgagaaactaggtttttttctgctgagatccacaacaaggcaaggatatctcactattcctgtaagacaggaaaaggaaataaaaggtctacagattgagaagaaataaataaagctatctttgtagatgacatgattatttatgtggaaaatttcaaagtgacaacctcctgaaactaataagcaattatagcaaggttataggatgccagattaatatataaaagtcagtcgctccttccataccagcaatgaacaactggaatgtgaaactgaaagcacagtaccatttacattagcatcaaaaatctccaaaacaattaggtataaatctagcaaaatatttacaagatctatatgaggaaaactatgaaactttgatgaaagaaatcaaagaataaataagttgagaggtctagttcatgtacatggatagaaaaactcactattggcaagatgtcatttttttccctacttaatctgtagattcaacacaatctcagttgattttgttcttaacaagttattttgtggatattgacagaatctaaaatttatatagaaaggcagagcatgagcaacatggcaaaacctgtctctacaaaaaatacaaaaactagttggatgtggtgtcatgtgcctgtagtcccagctacttgggagcctgagatgggaggattgcttaagttcaggaggtcaaggctgcagtgagccatgattgtgcccctgcactctctagcctgggtaacacagcaagatcttgtatcagaaa

SEQ ID NO: 113521 - DNA, 2080 bp, Homo sapiens
  misc_feature (368)..(368): n is a, c, g, or t
gatgtcatataatttctgaaattgagattggtatgattctcaatatgtagttactcaacatattataaagatggatttgattgatttgatatagttattctccatattataaagatggatttgattggattccatctgggtagaactatattgtgtagatgagtgttcttcagatagctccttaaggtcactacttaatttgtggttgcggagacgggagcattctccacattatcacttccagttcctcagcttttgaataggtttttatttgatgagaggatattgtggccgataaatgattttaaatgattgatgtagatacataaaatgtaattttaatttttaatatttaaggaactctaaanatttgaaattgtctttcaaagatgtttaatatttgaatttttataagaagtatgtatttgaaagttaactattaaccaaatgcaaacatatgcaagaaggaaacattaatcagtctttttattttaagggaacagatgctgcttgtgttgctcagagtcacggaatctgtactgaagatgccatcacaagcttttctacagttccaagggaaaaaaaatatgaccttggcaggtcgacttgcaggaccacttttccagacccttatagttgcctggatcaaagcaaacctaaatgtgtacatctcccgagaactttgggatgacttactgtcagtattgtcatcgctgacctattgggaagagttggccactgagtggtcactgactatggagacattaactaaagttttagctaggaatttatatagtttggatctcagtgatttaccattggataagctgagtgaacagaaacaaaaaaagcacaaagggaaaggagttggacatgaatttcagaaagtttcagttgacaagtcattttctagaggatggagtcgtgatcagcctggccaagccccaatgagacagaggagtgcaacaaccactggttctccaggaaccgaaaaggcgaggagtatagtacggcaaaaaactgtcgatattgatgatgctcaaatacttccccgctcaactagagtcagacatttttcacaaagtgaagaaactggaaatgaagtttttggtgctttgaatgaggagcagccattgcctcgaagtagcagcacttctgacatcttggaaccattcactgttgaacgagccaaagtcaataaagaggacatgagccaaaaactgcctcctcttaatagtgatattggcggcagcagtgctaatgttcctgatctgatggatgagtttatagcagaacgacttcgaagtggtaatgcctcgactatgacaagaagaggaagtagtccaggcagcctggaaattcccaaagacctccctgatattctaaacaagcagaaccagatgcgccctattgatgacccaggtgtgccctcagaatggacttctcctgccagtgcagggagcagtgatcttatcagctcagatagtcattcggattctttcagcgctttccaatatgatggccgaaaatttgacaattttggctttggaaccgacactggggttacgtcctctgctgatgtggattcaggttctggccatcatcagagtgctgaagagcaggaagtggctagtctaactactcttcatatagattctgaaacaagcagtcttaatcagcaagctttctctgctgaagttgcaactattactggtaaagttattcatgggaatgtgtttcttaaatgtattttttaagccttcaaagaatttgattaaaattttgagagattttaagtattacttattactatttaagtatattttttcattcatctttatgtaacaatgaaggggagaaaagacattagtttcttgacctgaggtccactgggttaagcttcagaggactctgtgaacttgtagtattttatgcaatattttgtatatatatgcactagaacattttctgcaggattaaaaaaaaattttaatgggaacataatagatgtatatgtatatggagtacatgagatagttggagtgatttttaaaataaataaaaaagttaaaagtaaaaa

SEQ ID NO: 113522 - DNA, 1511 bp, Homo sapiens
  misc_feature (368)..(368): n is a, c, g, or t
gatgtcatataatttctgaaattgagattggtatgattctcaatatgtagttactcaacatattataaagatggatttgattgatttgatatagttattctccatattataaagatggatttgattggattccatctgggtagaactatattgtgtagatgagtgttcttcagatagctccttaaggtcactacttaatttgtggttgcggagacgggagcattctccacattatcacttccagttcctcagcttttgaataggtttttatttgatgagaggatattgtggccgataaatgattttaaatgattgatgtagatacataaaatgtaattttaatttttaatatttaaggaactctaaanatttgaaattgtctttcaaagatgtttaatatttgaatttttataagaagtatgtatttgaaagttaactattaaccaaatgcaaacatatgcaagaaggaaacattaatcagtctttttattttaagggaacagatgctgcttgtgttgctcagagtcacggaatctgtactgaagatgccatcacaagcttttctacagttccaagggaaaaaaaatatgaccttggcaggtcgacttgcaggaccacttttccagacccttatagttgcctggatcaaagcaaacctaaatgtgtacatctcccgagaactttgggatgacttactgtcagtattgtcatcgctgacctattgggaagagttggccactgagtggtcactgactatggagacattaactaaagttttagctaggaatttatatagtttggatctcagtgatttaccattggataagctgagtgaacagaaacaaaaaaagcacaaagggaaaggagttggacatgaatttcagaaagtttcagttgacaagtcattttctagaggatggagtcgtgatcagcctggccaagccccaatgagacagaggagtgcaacaaccactggttctccaggaaccgaaaaggcgaggagtatagtacggcaaaaaactgtcgatattgatgatgctcaaatacttccccgctcaactagagtcagacatttttcacaaagtgaagaaactggaaatgaagtttttggtgctttgaatgaggagcagccattgcctcgaagtagcagcacttctgacatcttggaaccattcactgttgaacgagccaaaggtgcagttcctgtcattgacagttcatcccgtcatgcaccaagcttgcagagttccacagaggcttcttcaataactagatccactgaaagccacatcactgatactcatagtagagagtcttctctggaagttggtgatagcatatatgaccatctttgtcatttaataggtccagtagaacttgcagattcagcttttgaacaaatccagtacattgaccttgaaggagatgatgatcttctttccaccctgaaagaatattttaaggaaaaccaggaaaatcatagtaaaaatgagacagggaaagacccagct

SEQ ID NO: 113523 - DNA, 2504 bp, Homo sapiens
ggattttcagcaccacagtctgaacatggacctcgaactttagataatctcattaatcctccactcaaccttcaagaaactcaagtcactatagaagaaatcactcctcttgtccccccacaatcaggagataaagggcaagaagatctcacaagctattttcttgaagcacttctaaaatacatagtcattcagagagcagctgctagtttagtatccagagaagaaagcaaaaatgataatgctgataaaacagacagaactacagaacccgaacagtctcattccaatacaagcactctcacggagcgagaacctagctcatctagtctctgtagtattgatgaagaacatctcacagacattgaaatagttcgcagagttttttcttctaaaaggagtaatgtaaactttgtgacagagatatttcgtcaggcatttttattaccaatttgtgaagcagcagctatgagaaaagtggtaaaagtatatcaagaatggatccaacaagaggaaaaacctttgttcatgcaagagcctgaagaaattgtgatcacttcttcagacctcccttgcattgaaaatgtcacagaccatgatatttcaatggaagaaggagaaaaaagagaagaggaaaatgggaccaatactgctgatcatgttcgaaattccagttgggcaaaaaacggctcctaccaaggtgctcttcataacgcctctgaagaagccacagaacaaaacatacgagctggtacccaggcagttttgcaggtgtttattataaactcatcaaatatatttcttcttgaacctgcaaatgaaataaaaaatcttctggatgaacacacagatatgtgtaaacgcattcttaacatttatcggtacatggttgtacaagtatcaatggacaaaaagacttgggaacagatgctgcttgtgttgctcagagtcacggaatctgtactgaagatgccatcacaagcttttctacagttccaagggaaaaaaaatatgaccttggcaggtcgacttgcaggaccacttttccagacccttatagttgcctggatcaaagcaaacctaaatgtgtacatctcccgagaactttgggatgacttactgtcagtattgtcatcgctgacctattgggaagagttggccactgagtggtcactgactatggagacattaactaaagttttagctaggaatttatatagtttggatctcagtgatttaccattggataagctgagtgaacagaaacaaaaaaagcacaaagggaaaggagttggacatgaatttcagaaagtttcagttgacaagtcattttctagaggatggagtcgtgatcagcctggccaagccccaatgagacagaggagtgcaacaaccactggttctccaggaaccgaaaaggcgaggagtatagtacggcaaaaaactgtcgatattgatgatgctcaaatacttccccgctcaactagagtcagacatttttcacaaagtgaagaaactggaaatgaagtttttggtgctttgaatgaggagcagccattgcctcgaagtagcagcacttctgacatcttggaaccattcactgttgaacgagccaaagtcaataaagaggacatgagccaaaaactgcctcctcttaatagtgatattggcggcagcagtgctaatgttcctgatctgatggatgagtttatagcagaacgacttcgaagtggtaatgcctcgactatgacaagaagaggaagtagtccaggcagcctggaaattcccaaagacctccctgatattctaaacaagcagaaccagatgcgccctattgatgacccaggtgtgccctcagaatggacttctcctgccagtgcagggagcagtgatcttatcagctcagatagtcattcggattctttcagcgctttccaatatgatggccgaaaatttgacaattttggctttggaaccgacactggggttacgtcctctgctgatgtggattcaggttctggccatcatcagagtgctgaagagcaggaagtggctagtctaactactcttcatatagattctgaaacaagcagtcttaatcagcaagctttctctgctgaagttgcaactattactggtaaagttattcatgggaatgtgtttcttaaatgtattttttaagccttcaaagaatttgattaaaattttgagagattttaagtattacttattactatttaagtatattttttcattcatctttatgtaacaatgaaggggagaaaagacattagtttcttgacctgaggtccactgggttaagcttcagaggactctgtgaacttgtagtattttatgcaatattttgtatatatatgcactagaacattttctgcaggattaaaaaaaaattttaatgggaacataatagatgtatatgtatatggagtacatgagatagttggagtgatttttaaaataaataaaaaagttaaaagtaaaaa

SEQ ID NO: 113524 - DNA, 1300 bp, Homo sapiens
ggattttcagcaccacagtctgaacatggacctcgaactttagataatctcattaatcctccactcaaccttcaagaaactcaagtcactatagaagaaatcactcctcttgtccccccacaatcaggagataaagggcaagaagatctcacaagctattttcttgaagcacttctaaaatacatagtcattcaggtaaaaagtttagaatggaagaacaaagaaaaccaagaaaggggattttcatttttgttttcacattttaagaaatattacttgccttatatttttccaaacatctgtaaggaaaacagtttatatcatcctatacttgacatcccgcagatgagaccaaagccacattatgtcgtgataaagaaagatgctgaaaccaatgaagcaatctattgtacaaaggagcctttcattaaggctcgtgttattgtcattcgttggctggtttctttctggctggagccaaaaccacatacaggacctcatattcctgggatggaaggtgaagtcttgccaaagaatattcagagagcagctgctagtttagtatccagagaagaaagcaaaaatgataatgctgataaaacagacagaactacagaacccgaacagtctcattccaatacaagcactctcacggagcgagaacctagctcatctagtctctgtagtattgatgaagaacatctcacagacattgaaatagttcgcagagttttttcttctaaaaggagtaatgtaaactttgtgacagagatatttcgtcaggcatttttattaccaatttgtgaagcagcagctatgagaaaagtggtaaaagtatatcaagaatggatccaacaagaggaaaaacctttgttcatgcaagagcctgaagaaattgtgatcacttcttcagacctcccttgcattgaaaatgtcacagaccatgatatttcaatggaagaaggagaaaaaagagaagaggaaaatgggaccaatactgctgatcatgttcgaaattccagttgggcaaaaaacggctcctaccaaggtgctcttcataacgcctctgaagaagccacagaacaaaacatacgagctggtacccaggcagttttgcaggtgtttattataaactcatcaaatatatttcttcttgaacctgcaaatgaaataaaaaatcttctggatgaacacacagatatgtgtaaacgcattcttaacatttatcggtacatggttgtacaagtatcaatggacaaaaagacttggtaaaaaaatttttatcctttatgtctatgtg

SEQ ID NO: 113525 - DNA, 970 bp, Homo sapiens
ggattttcagcaccacagtctgaacatggacctcgaactttagataatctcattaatcctccactcaaccttcaagaaactcaagtcactatagaagaaatcactcctcttgtccccccacaatcaggagataaagggcaagaagatctcacaagctattttcttgaagcacttctaaaatacatagtcattcaggtaaaaagtttagaatggaagaacaaagaaaaccaagaaaggggattttcatttttgttttcacattttaagaaatattacttgccttatatttttccaaacatctgtaaggaaaacagtttatatcatcctatacttgacatcccgcagatgagaccaaagccacattatgtcgtgataaagaaagatgctgaaaccaatgaagcaatctattgtacaaaggagcctttcattaaggctcgtgttattgtcattcgttggctggtttctttctggctggagccaaaaccacatacaggacctcatattcctgggatggaaggtgaagtcttgccaaagaatattcagagagcagctgctagtttagtatccagagaagaaagcaaaaatgataatgctgataaaacagacagaactacagaacccgaacagtctcattccaatacaagcactctcacggagcgagaacctagctcatctagtctctgtagtattgatgaagaacatctcacagacattgaaatagttcgcagagttttttcttctaaaaggagtaatgtaaactttgtgacagagatatttcgtcaggtaacatacctctcagtatttttaatttataaggaaggcttttatctttaatattaaacatactgatttttagctgggaacagtggtgtgtacctttagttgtagttgttcaggaggctgaggtgggagaatcgcttgagcccaggagtttgaggccactttggacaacatggagagactgcatctc

SEQ ID NO: 113526 - DNA, 622 bp, Homo sapiens
ggattttcagcaccacagtctgaacatggacctcgaactttagataatctcattaatcctccactcaaccttcaagaaactcaagtcactatagaagaaatcactcctcttgtccccccacaatcaggagataaagggcaagaagatctcacaagctattttcttgaagcacttctaaaatacatagtcattcagagagcagctgctagtttagtatccagagaagaaagcaaaaatgataatgctgataaaacagacagaactacagaacccgaacagtctcattccaatacaagcactctcacggagcgagaacctagctcatctagtctctgtagtattgatgaagaacatctcacagacattgaaatagttcgcagagttttttcttctaaaaggagtaatgtaaactttgtgacagagatatttcgtcaggtaacatacctctcagtatttttaatttataaggaaggcttttatctttaatattaaacatactgatttttagctgggaacagtggtgtgtacctttagttgtagttgttcaggaggctgaggtgggagaatcgcttgagcccaggagtttgaggccactttggacaacatggagagactgcatctc

SEQ ID NO: 113527 - DNA, 445 bp, Homo sapiens
ggaaggtttatattatatttcgtattccagtggcaatgcttaatttcttcaaatttactcaaagatatattctgcatacatttctagaatttatgattatttatatacttatctgaaaaaggcaacaaccattgcaatattttaccttccttttttcttttctcttaaacctctcaagttttcatgttgagatcatctaggatttagtccatattgctactatttttttacaataataattatttagatttagttacagttttttacggtttcactgttcgccattgtttcttttactccacataatcccttcagattcagtttttattttgctagagtacatcctctaataattcactcaaagatgaataatggttggtgaaatatttgttcttgcatgtctgaaaaatattttccttttgcaacaaccctcagccttccaact

SEQ ID NO: 113528 - DNA, 359 bp, Homo sapiens
tgtgagtataaattaaagtaacaggagatgattacatgacccaaaagtgtggatttactgggttaggagcacatctgttggatcttggttctcactatattaacctgttgcccctagagttttccttgtggtaaatacgtaaaagtctctcactctgccactgtacatggaatagatttggaaaggatactttcagcactttgtttccatcactagagttaattattcctgcttacacagttaacactcctgccattaaagtaaaattgtgatctcagagaccctgcttgccagcgttatttatcttaaaaacatggatgcagaggtaatgttgacaccagctcagagccacgtagtcc

SEQ ID NO: 113529 - DNA, 210 bp, Homo sapiens
tcacccctacaccgcctggccaaacatgaggaagtgagatggcctgttcagagcttcagaacttgacgtaagacggacagtgtatagtatggggactggtgagagtgtgaaaaggcacggccactgtgaagaaccgagtttaccccagcacatgacccactcctagatacaggccccaaggacttgaagacacgcatccacacaaagagt

SEQ ID NO: 113530 - DNA, 351 bp, Homo sapiens
gattactccagcctctgacttgttcatggtggcagtagatctctagcgtggtttgtgttccatctcaccatacctactctccttaaaaaaaaacaaaaaactagctttcttgggcctcagtggctcattgaataagtgagagacgacttgtgcttccctggctttagactctggcatttgctaactgtgccaagcactgtggagaccagtagtggacataaggttagggtagatacagccagaaaggagataaataggcagacagataaaattcttataggatttggtgagttctatgaaggaaataaggcaagaggctgctctgtcagggtaggtgagggtgtgctgtga

SEQ ID NO: 113531 - DNA, 278 bp, Homo sapiens
ctgacacatatcagatgctaaataaatgctgttgaacgaataattcaaaatatgctgctctgtattagcaccaagagtgagttttttaaaaatattctaatccaaatgcacaagaatattcacaaaaaagccctttaaagataagcggcagtatttcaaatataaggagattctagttttccaaaacatcttacactgcatcttaaaatcagaataattggcttttatcaaacctgtgtcattttaataagggctctcatgaacttaatatgattctt

SEQ ID NO: 113532 - DNA, 636 bp, Homo sapiens
ggatgtgcctaggttatatgcaaataccacaccattttatataagagccttgagcatacttggactttgatatttttggagttcctggaatcaattccctgtggatataaaagaacaactgtgtaggattctttggtcattattaaggggaaatataaatatatctgttcttttgtaatgataggtcaaagaggcctataatatggtattttttcttatattcattctaaaatcttttcttaagtattgctgcttatattatcatagattatgtagtatgtataaagatgagtaaattccatcattaaggaccttaccgactagtaggagaaaaggcagaacatattcaacaaaatatatattcaaagtcaagtctggtaactgctttttaaaagaaatatatatataaaataaagtattatcatccctttgaaattaagtatttgtggagctggttatagttagaatgtaaaaagaattaagcaagttctagagaatactcttactttattttctatttttttaataaacagctttagttgtcaaaatttaaattatcagcttaagtgaaataatacataaacactagtatgaaagatactatctttcaactaagttaaatactttttagattga

SEQ ID NO: 113533 - DNA, 787 bp, Homo sapiens
tcttgttctgaggactaaatgaatgaacatacatgaaatacttataacactgcctgtcatataaggagagctatataagggtttgcttgttactattaataaatcagagaaaaataaatcattggcacagggtggtggagtgttgtcctgtaaggactattgggtggaaacaagagtaggaaaagatttacgagtaatgaagagaaaaacctgaaaaatagagggaatattaaggatgcaagacttttaaaaattaattgttattgacaaaaattatactatttatggcttacaaatgttttgatagatgtatacatggtggaaatgctaaatcaagctaattaacatatttattacctcatatacttacttttttgtcataagaacatttaaaattgactctgttagctattgcaagtatgcaagatgttttcattaactgtagccaccatgttgtacagtagacctcctgaacttattccttctgtctaattgaacatcggcctaattccccccctaatttctccaacatctacctaattcttccccttcatccagccctcggtaaccaccattctactccctgcttctatgagttcgacttgttaaggttccacatatgaatgacatcatgcagtatttgcctttcggtgctttgcttatttcactcagcataatgtcctccagtttcatccatgttgttgcaaatggaaggactgctgtctattttaaggctgaatagtattccatggtgaatacaggaatatatattcctatattcctcaca

SEQ ID NO: 113534 - DNA, 457 bp, Homo sapiens
tctgcctacttgttttatcaatgtgagaggggtgttgaaatttccaactacaagtatggattggtctatttcttatgtaaattctataattttgcatcatattattttaaacttcatttttagatgcagaaacatttaggattgttacgtactcttggtgaactgacccctttatcattatgaagtgaccttctttagctctagtaatatcattgccctaaaatctattttgttattaatatagcaaccccagctttcttcttaatttgtgttagcatgttagcatcgtatatgtttttctatccttttatttttaatgtatttgtgtctttatatttacaaggttttttttttagaaatcatagttggatcttggtttttaaaaatctaatctgaccacctctgcttttagttagtgtatttagtccatttacatttattgtgattattaagatgg

SEQ ID NO: 113535 - DNA, 190 bp, Homo sapiens
agtgagctgtggtcgacccccactgcactctgcctgggcaatagagcgagaaaaaaattttttttaaattaggttttcataattatctttttcatcattatgaaagcaatccttccacaccaagggaaacattgagaaaataccaagttttagaaaggcgaaatgaaaataaatctcctaacttcccatc

SEQ ID NO: 113536 - DNA, 395 bp, Homo sapiens
ctcccacccttgccctgtagttgaggctgggacgtaccaccctggtcaactcttcaaacagaggcattcatttccccagcttccagaagtgtcacctgccaatggcactcagtcaagtcccttcaggaacttccctcttagggaaggggctgggtttaggataagagctgcctggctgagctcacaccccctttctgggagcagcccacatgctatgactggtcgatgcaggggtatcaagtccaaggcccctcgcctccattcgagacatctctgaaaggccatcccactgggcctctgctgcaactgcctcatgtatgaatgcgtctctgccctatctatttgcggctggatgtggagtctgagggcctggcaccgactctgggtctgtgaat

SEQ ID NO: 113537 - DNA, 179 bp, Homo sapiens
ggactacctagaactgggcctaacatgcagcaggcgctcaataaatatttttcaaatgagtgaatggtgactaagacacgcatttggaaccagacagacccaggcgtgaatactgttatgccaaccatgaccatgcagcctctctgtgactaatttcctcactggggcactatgaaggt

SEQ ID NO: 113538 - DNA, 206 bp, Homo sapiens
tgggatgccaagacaaagctttctgggaagtatgtgctttaagacatgggtaagattttgagggggtacagaatgggatagtattccttgctgaaggaagagaacagtaaaacctcttcattggctggggaacagaatcgtctccagaatgtcagtgggaatacaatactaacaagggagagctcctatcagccggactagttaat

SEQ ID NO: 113539 - DNA, 401 bp, Homo sapiens
ctttgtatctgagaatatcttattgtaccatactcatccttcttcttgtgctgacatgagatgacaccatgcctacgtgacgagatgcagtggggtgaatgacataggcattgtgacttagtattgggctactactgaccttgaccatatgtcagaagggggatcatcaagccatgatgttgccgattgacctagggtaactgaaactgcggataaacggggactactgtactttcttaggcaacaaaagcaaaactgggatgttctgaacatctcatctgttttctttgatgctgctttatcagtatcatgtcacggacatttttccatccagggttaaatcactttaaaatcactacttttggtatctgcatggcactctatataaataatacagcaat

SEQ ID NO: 113540 - DNA, 378 bp, Homo sapiens
acggggtttcgccgtgttggtcaggctggtctcgaactcctgacctgagttgatccacccacttcgacctctgaaagtgctaggattacaggtgtgagccaccgtgcctggccatatacatgtttatctatcacatacatatatacaaggggtaatagaagtagaacttgtcttgaaatcctaatataaggtttctgtttttccccaataactgataatgcttgagaaatatattctgagcacacaggtgacagtaagggctagtagaaaagtgctggatcctgaagtcaggaaacctgagttccaatccaggctctgccactgactgacatgtctttgagcaagtcatttgaattttctgggcctcatttcccccat

SEQ ID NO: 113541 - DNA, 590 bp, Homo sapiens
ggaatgaagggtcttataattaataatttgtagatttaagatatgatcaatcaagaaaaatattattctgtcattccccatcaaaataactttttggccaggcacagttgctaggattacaggtgtgagccacctcacctggcccattcaactactttatattaaacacctccatgggttatgcactgtgctaggccctagggatacaagggtgtacacaatgaatatgattcttttcctcttggctctcactatatgatggagggagacagacagaaaattataatagtcagttataattgtacatgatatctactctgataggatagataaagggccagagaaggcttctctgagaatagtagaatctatgtgaagacttgaaggatgaaaaggagttgcttaagttatgggtgagggagtcatagatgtataagctggacgtgagagcatggaatgttcaggaactcagacatcaacatagctagtgtagagtgtgaagcaggaaagtaaccagaaatgaagatagagaagtatttagtgttaagatggtagagatgtacttttttgtaccctatataaatgtataa

SEQ ID NO: 113542 - DNA, 211 bp, Homo sapiens
atttgttcagatcaagaacaaaaaccactcaatgtaaaatacggacaaaagatttcaacagataccacataaaaagacaaatccaaatgactaataaagccaatcttattgttgtcaaggaaatgcaaatgaaaatcactatgactcactgtccaccagaactggcaaaaatacaaaagtgtgaaaacaacaggatggttactttggtgag

SEQ ID NO: 113543 - DNA, 294 bp, Homo sapiens
aggaggaaaccagagaaaccagagtatttccatccttcctcttcgccttgggcaggaactccattagcagcttgtcttctcccttgttctaactctcctatgcaggctcactgtggttccagctcccataaaggaatctctcagtccctggctctggccacaccactgtggtagatgtgaggtactcaggtcctctttaaggaaggacttgctgcccaacggcaggtgctgcagccagcatccagctgtcagcccctacagggtcagccttacttgcagagaaccaccttgctc

SEQ ID NO: 113544 - DNA, 372 bp, Homo sapiens
actgcattccagcctgggcgacagagtgaggctccatctcaaaataaaaaaataaaataaataaaataaaatagtgagttgtaaaagcagtgaacggtcgctttctggccaggaattgtaggccagggccttttaacaaatgatctggtaggaaatttatcaacagcagtgaaaatgggaagatactctgcaagagctctgtcttcatagggcactgtcatctctgcctatggaaaagaatgcatgtctcatagcaatgcaggctatgctcttttgaagccagaaaataaagtagaggtccttggcttgttggctaaaaagctaccagttttccaagacaagccagttcaggtacagaagacaactattcca

SEQ ID NO: 113545 - DNA, 621 bp, Homo sapiens
tagtagttaaattattttaaagttattttttaacagctaattcaaaagattcaatacagatgactgtgccaaacaagccagtaaatagaatcagtctacatcctgacttttggaatgcaatgaatcacaccacaccaaagcatgaatttggatcagtgcttttatttactcttttatttcatttgtcttgtgtcttaggtttgctctggacttacagttctatacaaataatgtattttaaaccctagagttttttacataattttgtcataaagagttaaagcctattaatgattcttcatttcatagttcctgaaaaaatatactcagttatatatctccatcataattatttttcagttctttttccttgttaggtggtgggggttagcttttgggtggagacattaacaatttatacactcttatgatttacactcttcttctgtagttctttgggaaggaagttaagaatgacggaaaggttctaggagagcctcagaccaattctgtgaaaagtgttattggttttctgaaggaatgtatgtttctaagaaactgtatgaccagaaatgaattgtctttgattcagtttcatcaccagtttaataagctagtttt

SEQ ID NO: 113546 - DNA, 601 bp, Homo sapiens
gaatgtgctctaaattatttgtgaaaaattattagcaaactttgatattacttataacttacctcatgacttggaactcttaagatgaattcaaacaccaggctatcaagactaaggatacacaggttgagaatccctgaaccgcaaattggaaatgctttaaaatccaaatttctggagcgctgacaggaggccacaagtggaaaatttcgcacctgacctcctgtaatgggtcaaggtcaaaacgcagtcaaaagtttgtttcatatatgaaattgtgaaaaatattgtataaagttacctacaggctatgtgtgtaaggtgtatatgaaacaaaggaattttgtgtttagacttgatatatccccaaggtacatcattatgtatatgcagatttaaaaaaaaaaaccaaaacagaaaaaaacctctaaaatccaaaaaacttcccatcccaaacattttggataacggatacctagcctgtattttgtatccccgggatttgcaacagttctgtttagataatggtgccaagtgttaaattactttatgtttaaaactttttattgctttaatttattagataattttttagagatct

SEQ ID NO: 113547 - DNA, 401 bp, Homo sapiens
ttctcattaggcctcacttcccaacattgctgcactagagattaaatttctaacacatgcttttttgtttgtcttgtttcgttttgtttgtgagacagaatcttgctccgcctcccgggttcaagcgattctcatgcctaggcctctcaagtagctgggactacagttgtgtgccaccatgcccagctaattttttcatatttttgttacagatggggttttgccatgttggccagactggtctcgaactcctggcctcaagtgatctgcccaccttggcctcccaaagtgctgggattacaggcctgagccactgcgctgggtcccaagtctggattttttttttttttttggccttccaaattggcggttttaaagctattgggtttaacctatttttc

SEQ ID NO: 113548 - DNA, 801 bp, Homo sapiens
acagttaagaaatgctcttaggccaggtgtgatggctcatgcctataattccagcactttaggaggctaaggcaggaggatcacttgagccgaggagttcaagaccagcctgggcagcatggcaaaatcctaactctgcaaaaactacaaaaatcagcttggtatagtggtgcatgcctgtagtcctagctactcaggaggctgaggcaggaggattttttgaggctgggaggtcaggactgtagtgaactgtgatcatgccatccagtccaggtgacagagcaagacctcatctcttaaaaaagacaaaaacaaaacaaaacataaaaacacctctcaggagcttgtttagttcctagaatgaattgaccactcccttgtacttcctctattccatattcagattttattgtaaaattgctttgttttacttgtgggtttttttgtttgtttttgagatgggctctcactctgtcaccctgcttgaagtgcagtggtaatcttggctcactgcatcctccacctccagggctcaaatgatcctccccctcagcctcccaagttgctgggactacagatgtgctccaccacgcctggctaatttttctgtatgtttggtagagacggtgttgctatgttgcccaggctagtcttgacctgagctcaagagatattctcacctcggcctcccaaagtttaggggttacaggcatgagccactgcgtctggctgttgcacttgtttatatttttgttacctgtgtcctattcaggtttgcattgtgcatcacacactatagtg

SEQ ID NO: 113549 - DNA, 256 bp, Homo sapiens
gactgtttttaggttgtgctgtcaggccgtgggggtgctgtcagggatctgaatgtgaaggcacgaggggtgagtgcaccatcccacctgatggtgacaagtgactgattttgaggtggcgatggctggagggcacctgctgccttcctgccccaggccacctgtcaggcaaggagcgggtggctgagtacccctcctgggagagaaggattgactggcagagagggcagatgctgaggtggggcaggcgaggtgt

SEQ ID NO: 113550 - DNA, 430 bp, Homo sapiens
tgagatggagtcttgcactgtcgtccgggctggagtgtagtagcatgatcttggctcactgcaacctttgcctcctgggttcaagtgattctcctgcctcagccccccaagtagctgggattacaggcacccaccaccagacccagctaattttttgtatttttagtagagatggggtttcactatgttggccaggctggtctcaaactcctgacctcatgatctgcccacctcggcctccggaagtactgggattacaggtgtgagccaccatgcctggcccactcccactttttaaaatgcagctcagaaatccccttgcacctggctgcctcccagagacccttcatgctttgcgggcagaacagtcaaagcttctgcctcccgccacttgttccccatggggcctggcacctagagagtgctttgc

SEQ ID NO: 113551 - DNA, 442 bp, Homo sapiens
catttgctggcccattaggaaccagatggcacagcaggaggtgagctgtggttgagtgagcattaccacctgagctccaccacctgtcagagcagtccaacattagattctcataggagcgtgaacgctactgtgaactgtgcatgcaagggatctagattgcatgctccttataagaatctaatgcctgatgatctgaggtgaacagtttcatccggaaaccttcccttccacccctccctatctgtggaaaaattgtcttccatgaaactggtccagtgtcagaaaggttggggactgcagttttaagagtattcttattagctttgtagtaatttaataataataaaagctactatttattgagggcttcccacatgccaggtactgttttaggtgctttgtagaataactcatttgcaagacaggtattttctttctt

SEQ ID NO: 113552 - DNA, 417 bp, Homo sapiens
cagggctgacgacgaagacaggaacccagccagcctctcccgggacgatgctggagacgggcacattcactgctggagctgcccaggcactggaattagtagatgtggctggcctagcacaaaccgctaggtccagatgcggccgtgtgcaacaggagagtaccagctcttcattagctcgtccttgctcagagctcttctagttcatatcatttgagagatcaagaaagaacatgacagtcccccaggtctccccttctgcacgcaggatagttttagtcatcccaaacccctcctgtattacagccgactacctcctctcctcttctaatctaactctactttcattaagttgctttctgcaacaggaaggtgtgtatcccggacccctccacactcttcttcatgatgtcagag

SEQ ID NO: 113553 - DNA, 492 bp, Homo sapiens
tggctgggagtgtaggagccccgtgagagcccaaggaaagaggtggctggggactctgggctctgcggctcaggctctgagtggttttcatatgaaaggtgtgctcacagagggtggtttaccatctctaggaattagcttgccctggaggtgcaatctctccagagtcagcaaggccccgagatgccaagcaccagaaaatacagaaaacagggcgggcacggtggctcacacctgtaatcccagcactttggaaggccaaagtggacggatcacttgagttcaggagtttgagatcagcctggccaacatggcgaaaccgcgtctctcctaagaatacaaaaattagccgagtgtggctagcctgtaattccagctactctggaggctgaggcaggagaatcgcttgaacccgggattgggatgttgcagtgagccgagatcgcaccactgcactccaacctgggtgacagagcgagacatctcaaagta

SEQ ID NO: 113554 - DNA, 337 bp, Homo sapiens
aaccccagctccaggggctcagcaggcaaagggaatcactgagtgggggcaccacccgtggactccaatatctcaacctctccctccacaggttggaggtgggaggaacaacccccaccaaacccagagccgaaaactgagggagttttacagacaggacggagctcctgcacctcggagcctcagttgggaatgacctggggtcttgtcctgaagctgagtctggtgaacgtgccccatttgtaacatgaggggtacttctctggagggactgtatgttgacagtggcagagtggagccctgaagtccacctgagtgaatataccagggcttgaga

SEQ ID NO: 113555 - DNA, 698 bp, Homo sapiens
gagtttgttaaacctatcaaagcagagactgtcagggcctttgaagttgtgttaaaaagaaaattctagacataaatggatgagaagacatgttttctttgtggcttcaggtgaaattttgattaagtatctgaattttatattgaaaagcactgaatagtttgtagatattaccttcctagcatacagctgctactgttcttgttggtgaacgaatgcttctcagctgcaatgtagtgttagacaattttttttcaacatagtattatgaaactgttcaaatgtatagacaaattgaaacaatttagtaaattaattttaagacaaaagtttgagatttttcttgattgtgacgtgtgttgtggcaacctggatcttgaactgcttagtcctgttgatttgggaaaactgtacaaatcaagtaactggttttaaatttcttctgaagaatccatattaagattgatgatctaaatctgaaacctttcatgttagagctttccttccctttttttgactacactgtactacctataattaaaatgtgaccaaatttaaggctcattcagaaaaaaatttcttcctttacacaatattactaatttaagtacggaagttactacatttagaagaccactatcagtttgtgactttaattgataagcaggcttggagtaaatcttagtcatataatatgg

SEQ ID NO: 113556 - DNA, 372 bp, Homo sapiens
atataagctcactctatggcagcaggtattttgctgtcttgttcattcccgtatttccaggacttacagcagtgcctgggaaatagcaaaaatgactgcagcgaaaatgttcaaagagctctgaggttctaggcgccttccagtgatgagctcagagtcctcctgagaggctgtgaggagggtcttatgactgtaaccctcttactgatgcagctaagacccagacttaggcacccccttgggaagtctggcctatgggtggacactggcccatgggcaggtggtataggcagtgatagtggcctggacagaccggctggatttggctaggcagatatctgttccggagagcccagcacaataaggggtacg

SEQ ID NO: 113557 - DNA, 338 bp, Homo sapiens
ttcggccctacaggtcagaatggtggcagcggagcatcgtcattcttcaggattgccctactggccctacctcacagctgaaactttaaaaaacaggatgggccgccagccacctcctccaactcaacaacattctataactgataactccctgagcctcaagacacctcccgaatgtctccttcgtccccttccaccctcagtggatgataatatcaaggagtgtcctcttgctcctcttccacccctcagtggatgataatctcaaggagtgtctccttgcccctcttccaccctctcctcttccaccctcagtggatgataatctcaagactcct

SEQ ID NO: 113558 - DNA, 834 bp, Homo sapiens
cagtgaaggccttgagaaaaagactgaccttccccaaggagagggaatggggaattctgctagcagactgccttcagtctcatactgtgacttttttcttcagcctgcctgcctatccttcagattttggacttgccagcctcaacaatcatgtaagccagttccttaaaataaatctcaatcactctctctgtctctctctctctttctctctgtacacatcctgttggtttccctggagaatgctaatataggaagttcacttcaactgttcctgcagctgttcacgctatactttttctgagtactcttcccctgatagaaagttgtctgggactttcatgagtgaaaagtatttttaaatatcacttttccccttgcctactttatttttttcaaggcctaatttacatacaatgaaatgtaaagatcttacacagttcagttagttttggtaaaagcagatatatacccatgtaaccctcatctctatgaagatataaaacatttccatcaccccacaaagctcaattgatgtgtcttgtactgagtggaatattggagtctcttatttgtgtgtttatatgtatatatcttctatacgcctcctgtagttttctttataaagtggttgctatgttatctgatgcatagatattcacaattttatgtcttcattgtgaattgtgactttcagtattaaaaagtgccccttttatatttaatgcctttgccttgaattctgtgttttgagaaataagataggacttttaaacaatttccacttgcctgaaatacctttgttcatacctttatttaccctttctgtatctc

SEQ ID NO: 113559 - DNA, 346 bp, Homo sapiens
ccaagtagctgggattacaggcgcccaccaccacgcccagcttatttttgtatttttagtagagacagggtttcgccatgttggtcaggctgatctcaaactcctgacctcaggtgatccacccgcttcggcctcccaaaatgctgggattacaggcgtgagtcaccacgcctgaccatttgttaaatttcaaagtggtatttctcaaagtgtaaccatgaaccatgcatatcagaatcacctgggtgtttgttacaagagtgattcaagaacctgttccttaccatctgaatgggaagttttgtgtgagaccctatgcatatttgagcactggagccctgaagcc

SEQ ID NO: 113560 - DNA, 336 bp, Homo sapiens
gcaagatggggcagaagagttcttctcgcgttccttagtccgtggtcgaaggaagagcctccctgacgtgctactgtcaatctcgtgaggatatctggtgggacgggcagggcacctggcctcaggcttagagacgtgagaccccctaggtatggaatatgcagacatcagaactggaagaagagggccaggcacagtggctcatgcctgtaatcccagcactttgggaggccgaggcgggcagatcacctgaggtcaggagttcgagaccagcctgaccaacatggtgaaaccccgtctctactaaacacaaaaaatcagccaggcatggtggag

SEQ ID NO: 113561 - DNA, 144 bp, Homo sapiens
gaagggtcaactccccagattagtcaaagcaacaagaaaggggataatggataaaatataaaactgccaaacagagaatctcagttgcctccactaggaaaggacttcccagaagatccactgcaacctcatccaggctttctc

SEQ ID NO: 113562 - DNA, 494 bp, Homo sapiens
gctataccaaagggtggtctatgggaaatctgcagtggaaagattttattctcaggaccctttctgcaggggacagctgtcaaaatctgaggaatatatagggggagatgttttttaagttcaaatctacaagacttaagtccaggggaagtttcatgtccccttccagccaaggagaacatgctcatgtttacttgcagctgcctgttgctcctctctagctttaagagaatgagctcttgcatttactctttgcccctggcattcccaatgtgtctttttaaattgtggtaaaatatgtttaacaaatttgtcatctcaaccatttctaggtgtacaattaattcagcggcattaattacattctggatgacgtacaaccatcaccgcttcctgtttccaagatttttcctcactccaaatagaaactttgtgaccattatgcaaaaactccctgttcccttcttccctcagcccctgctaccctctcatct

SEQ ID NO: 113563 - DNA, 219 bp, Homo sapiens
gcacacctctgtttggaacctgggcagagcaggaggtaaggcaaaggcaggcaggcaccaagaaccagaccccttgagaaggcgctgtgggtgggtctttgttctgctgttctgcctttcctgacaggtggggttggggcacacagacattggaatatttgtactgctctcgtgccatttgagaggctgctgccccaggcaggccagcccctactcctc

SEQ ID NO: 113564 - DNA, 234 bp, Homo sapiens
ctggtcaccttctgtatgccaggcatggcactggcacttcaaatcacagctttctcaattctcactgcaaccctacaagggcttctaattgccacttcacagatgaggaagctgagactcagaaaaacaagtgagaacgtatcccggcactgcccagctgcagttcagggacagacagcatgggcaccacccaggagcttatctcaaatgctcatgtcctgaccccagcccaga

SEQ ID NO: 113565 - DNA, 536 bp, Homo sapiens
gcaagagggcacgggctttaggcgctggctcagtggccctgcagttttctggccaagagctccatggcagcgggccctgggcctgggcctttgacctggggcctctgttaggagtggtcctgatcctgcttctggcagaggcacacacagggctcctccaagtacaggcagccaggctcaggatgggagggagcagccagtcccaacaattacacagttcgggagctgaaaagttatgtttgccactctcaggagccagctgtggaagggaggccagtggagggctttgccctggcctctgagccacacacaagccgtgctgggaggacaagggccgggggtggtgaaggaccctcttggagcctttgctttccaggagcaggcactcgtcttccatatcacactcacaaaggctggtggcttcagtggctgtgaccagctggccacagctgactcctctggggtagtgctgtttctaaatattagttcctgctgttaacccttgctgtgcggccccagtggacagccggctgcct

SEQ ID NO: 113566 - DNA, 426 bp, Homo sapiens
gcctaattgctctggtcagcacttctagtactgttaaatagaactggtaaaagcaggtatccttgccctgttcttataagaaaagttttcagtctttcaccattgaatatcatgttcactgtgggtttttcatatatggcttttattacattgaggtaattccctactattccaagtttattcaatgtttttatcatgaaagggtgttaaattatgtcaaatgctttttctggtcaattggaaagattatgcagtttttccccatcattttgttaatgtggcatattacactaattgattttcctatgttaaaccatttttaacattccagggaataaatcccatttgatcatggtgtataatccctttatcatgctgctgaatgtagctcactaatatttggttaaggatttttgcatcaatgtt

SEQ ID NO: 113567 - DNA, 310 bp, Homo sapiens
agattacaggctggccatggtggctcacacctgtaatcctatcactttgggaggccaaggcaggaggatggcttaaggccaagagtttgagaacaacctgggtgacatgtcaagactcctgtctctacaaaaaattaaaatattaaccaagtgtgatggggcacacctatacttgcaggtacgtgggatgctgaggagagaggattgcttgagtctaggagtttgaggtatcagtgagctatgatcgtgccactgcactccagcctgggtgacagagcgagtccctgtctcaaaaacaaaacaatgaaaa

SEQ ID NO: 113568 - DNA, 379 bp, Homo sapiens
gagaccagcctggctaacatggcgaaaccccgtctttactaaaaatagccgggtgtggtggcacgcacctgtagtcccagctactcggggagactgaggcaggagaatcgcttgaacccaggagacgaaggttaaagtgagccgagattgtaccactgcattccaccctggaagacagagcaagactccatctcaaaaaaagaaaaaaaaaagtaatcgattgtaaaaaacaaaacaaaaagcccaatactgtattgtgggacttttgcacatggaacatttatcaagacagaccatattctgagccataaaacaagtctcagccaggcgtggtggctcacgcctgtaatcccagcactttgggaggccaaggcgggtg

SEQ ID NO: 113569 - DNA, 316 bp, Homo sapiens
atatttcttttaagcacataaaatgattcagcatctaagttgacagaattgagtaaatgagacactttagagcaacattatggaaaagaatatttagagaagtatttatacagtatagaccctctgatacacacacacacacgccagctagaaataaactagcaatgtttcaggtcaactgaatggctaatgttacacagaaattaaaaagcatgaaaagaaaatgttttacgtccttggagataacaaggggaagataagactcatttggtgctgctcagagacaactcagggacagaatgcttgctcagcaaag

SEQ ID NO: 113570 - DNA, 367 bp, Homo sapiens
gaaccaccaggctgactgttgaaggcatgacccaacatgtgcataaagtgcctcagcagactggaagaggggtggattccaggcatttaagaaaatcaggtcaaccattagctgaccaataaactaagtaaagacatcagtgaccacacatgacaaaaaatataaactttacataattagttcaaaaaagtcactaaaataaacaaacagccacaacgacaaatcctgaagggagaaggaatctgagtttcagagttgtaaaattatttaaagtgaacagtttttggcaaaaagtatgtgacatacaaagaaacaaaaaagcatggcacacatacaggaaaaatgcattcaatgaaaccgtccttca

SEQ ID NO: 113571 - DNA, 296 bp, Homo sapiens
ggggttccagctgaattttctgtcccgaggttgagttagaaatcagcttttgtttgctttacaatttctcgtggcttcagtcaaacagtggtgtcaaatgtggtatcattgacatctgtggtagccttcgttctctgaagtctatcagcaatatccatgctgataattcagtctaaatgattgcccagccacaagctggacagtgaacactgttttctcagttgggttgggtgctcctcagggagtcccactatgccaagcagatgaagcacagtttgccattcactgagaaggag

SEQ ID NO: 113572 - DNA, 360 bp, Homo sapiens
caaggaaggaaggaatgaaggaaggaaggaaagggaagcaaggaaggaagaaagaaagggaaagaacctatatatttaaatggctgaggaaagattctaacccaggtctgcattaaagatgaaaattttccacatgttcaatgaattttactaattctttttcctcaatgagtacctaaagctgaaagaaaatgatatggatgtcacacgaaaatccttacctcctctgtcctcagtgccagtatacaatggagctgaagagaggcagtagaggaggtgatggagaaagaggggaggaagaagaatgagcaggaggcagaggagactgcctggaggcatttccccagggtcccccactgc

SEQ ID NO: 113573 - DNA, 794 bp, Homo sapiens
ggaaataaaaactcagaagtataaaaaaagtacataaaatgaaagtaaagtttttcttcctacctcccacctcatcttctcagatcttatcacagatgttttttgttcttttgaatggttgcttccttctgtaaatgatgtgcttatatttcttaatttatgcattttccctgttgactcaaattattactttggaagacaaggaacttaaattcttaaacatttatcaactgtgttaccatatttctactattaccctaataactctaagtgtatatttggagctggatttattgcttcattgactttgaacaataactcttaactgcccagtgtagaacttagagcattggtttctacatttttatccttttctgtcccttacaacctaacttctctcagctacactatcaattctacagtatcaaaatttataatgtttaaattatgttaagtataattgtttttcctattttgcttcatggttgaatctgaaaattaaaaactaagtagcatttacagtattgttatgtaaatattcatttagtttatcatactatttattaagtgatcatctttgaacagactgttctctgaacctcctgcatagctatcacctgcgggtttcttttcaatgcttggttagttctacttacttaaattctaccattccctctttagttttcccttttcattgttggctggtgtccattttccaaaaatatctaatgcagtaactttaaatataaattgctgtatataaattgaaatttctattacaaaggaataagtga

SEQ ID NO: 113574 - DNA, 477 bp, Homo sapiens
atcagatcccttttatctatttatttatttattatttttttgagacagagtctcgctctgtcacccaggctagaagtgaggctccagctcaaaaaaaaaagagagagagatgactgttagtcgctggttgaggttgcatccaggggctatgagtgactcagagccctagaagggtctggtggggccccccacacctgcctccctcacccctagctcctagcgccccagacatcctaggcaggtcctgggaggcaggcgataatcccattctgctgccagtttgtcctgaaggtctgagcaagagggctggctcacaaataccagtgtttgctggagaaatggtcgcacgaaggacagatggacattgagaggtgccttcagagcaggtaagaagggagaaggactctggaggccacacaccaatcagtgccctaaatggggtggctttaggctcctccccactcctaagctgagtag

SEQ ID NO: 113575 - DNA, 401 bp, Homo sapiens
atcagatcccttttatctatttatttatttattatttttttgagacagagtctcgctctgtcacccaggctagaagtgaggctccagctcaaaaaaaaaagagagagagatgactgttagtcgctggttgaggttgcatccaggggctatgagtgactcagagccctagaagggtctggtggggccccccattctgctgccagtttgtcctgaaggtctgagcaagagggctggctcacaaataccagtgtttgctggagaaatggtcgcacgaaggacagatggacattgagaggtgccttcagagcaggtaagaagggagaaggactctggaggccacacaccaatcagtgccctaaatggggtggctttaggctcctccccactcctaagctgagtag

SEQ ID NO: 113576 - DNA, 640 bp, Homo sapiens
atcagatcccttttatctatttatttatttattatttttttgagacagagtctcgctctgtcacccaggctagagtgtagtggctccatcttggctcactgcaacctctgcctcccgggttcaagcaattctcctgcctcagcttcccaagtagctgaggtaggagaatggcttgaacccaggcggcagaggttattgtgagccgagatcgcgccactgcactccagcctgggcgagagtgaggctccagctcaaaaaaaaaagagagagagatgactgttagtcgctggttgaggttgcatccaggggctatgagtgactcagagccctagaagggtctggtggggccccccacacctgcctccctcacccctagctcctagcgccccagacatcctaggcaggtcctgggaggcaggcgataatcccattctgctgccagtttgtcctgaaggtctgagcaagagggctggctcacaaataccagtgtttgctggagaaatggtcgcacgaaggacagatggacattgagaggtgccttcagagcaggtaagaagggagaaggactctggaggccacacaccaatcagtgccctaaatggggtggctttaggctcctccccactcctaagctgagtag

SEQ ID NO: 113577 - DNA, 352 bp, Homo sapiens
agcactttgggagaacgaggtcaggagttcaagaccagtctggccaagatggtgaaaccccgtctctactaaaactacaaaaattagttgggcgcagtggcaggtgcctataatcccagctattctggaggctgaggtaggagaatggcttgaacccaggcggcagaggttattgtgagccgagatcgcgccactgcactccagcctgggcgagagtgaggctccagctcaaaaaaaaaagagagagagatgactgttagtcgctggttgaggttgcatccaggggctatgagtgactcagagccctagaagggtctggtggggccccccacacctgcctccctcaccccta

SEQ ID NO: 113578 - DNA, 295 bp, Homo sapiens
acaggaccacgtgcctgggagattccgacaggctgtccttccgccccccaccgagacggcatgcgggcgcgtgtttccacggatctagtccgtcttatctgcaccaaactgccattccagtcactcactgggatcattaaaccaccacttgcagttttccagggctttctttgttctactaggaagtatatgcccccaaattatgaaattccatttcaaacagaattaacagaatttaaaaaataaaaatgttaaagctccttttaatgaagacaaagtgaatggactagagtgg

SEQ ID NO: 113579 - DNA, 179 bp, Homo sapiens
gtggcggggcatcgtcgtatagtcgactgcaggttgtgcgagctgaggctttctttgttctactaggaagtatatgcccccaaattatgaaattccatttcaaacagaattaacagaatttaaaaaataaaaatgttaaagctccttttaatgaagacaaagtgaatggactagagtgg

SEQ ID NO: 113580 - DNA, 353 bp, Homo sapiens
agccggtccatccatccctctctcacggttcacgcaattctccgtgtcctcagcctcccgagtagctgggattacaggcgcccgccaccatgcccggctaatttttttgtatttttacgtagagatggggtttcaccatcttagccaggcttgtcttgaactcctgaccctgtgatccacccgcctcggcctcccaaagtgctgggattataggaatgagccattgcacccggcctgggcctcttttaaaaaagtgagatttgagcaatgagttgaattagatgtaagttagcaacaggtatctgggggaaaagtacgccaggtagagagaatatcttgagcaagggtcttaa

SEQ ID NO: 113581 - DNA, 421 bp, Homo sapiens
cctagttcaaagactgttatttccagaattagagaggatactggaaattcagattccgcagagaactcggtgactcattcacactaagatgtaaaataaccccatcaagatttatttcctttttgttctctagtgagaggaaaaaagaaaaaagaattctttgccgggccaggcgttgtggcttgcgcctataatctcaacactttcggaggctgaagcaggaggattgcttgagcccgggattttgagaccaacctgggcaacacagggagaccccatctctacaaaaaaatttaaaaactagctgggcgtggtggcacgcacctgtagttcctacacgggaggctgaggtgcaaaggattgcttgagcccaggatttcaaggctgcaatgagcatgttcgcgctccaacctggatgaca

SEQ ID NO: 113582 - DNA, 262 bp, Homo sapiens
taacaatcgttttcattgttcaggatggctcaaaatagaggaaagacaagaagccttttcctatgcatttttcacattgaggccggttagtttgaaaatactgttactatgttgaaacaaaagatcacttgtcaaatctgtggtggcttttcatatttaatgtgttgttgtctctgatcttaaaatgttaaccttgctgtaaggaggcaagactatcttacatgtttgtgtcaataggctggacggcacaaagctgagccca

SEQ ID NO: 113583 - DNA, 493 bp, Homo sapiens
cttcatatcaatctgatggcccctttctatgtgaggcaggatagcattacagacaggaagatgaaccctggaaccacaatgcctgggtttgaatcctggccactactcatttgccatgtgatcttgagaatataaagaggcgtgacaaagccccctctcacttggctttcatgaggaacaagcaagtggattcacataaagtgcttgcaagaatgacaggcatatactttttgaagcatgtttgccacagctgcttataaaatacttttatgggaaactataatttgtttgacaagaacctttgtaaaacttatcacagacaatcttgaaaaaagttacttaaaaacagaattgagactatagtacatatacagttttataaactgctttatacttattacaaaggcattaaggatttttgagggtcatgagattactgccagatgatacttcagaaaaacagtatcaatttatactaggatcaacagtattt

SEQ ID NO: 113584 - DNA, 232 bp, Homo sapiens
atcctttctgcacctaagcctgcctgctgtaggcaggacagcgcgaggcacaggggacatcagagtggagaggtccccactctcatggcactgactcctgcaccacgggccttcccaagccactgaaaagtgaggacagcagtcctttctctgctcagctccctgcctcaaccctcccctgccagcccagctgcacagaagtctcatcagattgaatgtacccaattccaca

SEQ ID NO: 113585 - DNA, 314 bp, Homo sapiens
tccagcagcttctcactcagctgccatgcattgacttccctgttgatccagcctactgcggacccaaatattcctgttgccagataggagggatgagtaatggagactccagtcctcagagaccttgatcaagtaaagcaaaaaccccttcctccactttctttgcaagtggctaaacccttagtcactctgggaagaaaagtaaactgaaaacttgaaaaagtcccaagacagaatctaactccatcccctgccccagataaaaagcaagatagcacaactatagcaaccttttaagtcaaattaaatgagct

SEQ ID NO: 113586 - DNA, 422 bp, Homo sapiens
ccacataaaatttaaacaaacaaaacactttgatatttacatacacatgcaaaaaacaaaacaaaacaaaaaaccctcgaaacaaagcaaaaaacaacataacctccattgaaaactgccacgaaaatcactagggactcagatttttagtaaaacagaaggctcagaaattcagaaaaaaacaaaggcaacacttataaaggcaaagagaagggggaagttgaagaagtaacccactgatttttatcaggggagtccagccttctttagacctaaattatttcctctacatagacatgaaggaaatgaaacagaatgcaaatgtagtttgattcaaagaacttttttgtttaaatataacttcttggaaagcataaaggttcagtttctgttcaaggaaactaggaattttgtaaaaaaaa

SEQ ID NO: 113587 - DNA, 422 bp, Homo sapiens
ttgctgtctctccaccagacagggagaggctgagtcagctctgggtgcttgaggccacccatctcaagacctggcagggagcaggcattggggaagggtggatggtcagagtctctgacgccatcacccagcttgtcaccaagccgggttccaagccgaaacgtagttcagtacctcctggccctgtctctaattcttcctcctctccagctgcttccttgggcctgttggcagagacagtacagatgctaggcgaatgggaagagagcagaggggatcccatccacgtgactttgggcccaaaggtggggtgtgggaaacagggaaaggagcactggattgggagtcaagcttgggtttaagtcgcatctctgttttctcaggctgtgtgacctggggtgagccactccatctctctgggt

SEQ ID NO: 113588 - DNA, 522 bp, Homo sapiens
ctccatggctttaaggaaagaaaacatttccttcagcaaacacgcccagagtccttttccacacattagttcttacaaaagtgagacagaaaaggaccagaggaagcaaagttgagtaacattttacatgtgatttgagtttcatgaaaatctactgggctattgtttggtttgaaaagccactgagagttagctctgagtaagccagcctctcctcagacaaggcaaatcaattacctgccagtaactcattaatgagtatttattaggtgctcattatgtatgacgaactatggtgatacatagacaaaactccaacctagaaagaacactgagttgcttaacttctctaaagcaaccacctcaaaacaagccatctgcccataggttgatttggcaaagccttgtcgagatcttttgcaaattaaaatattttaaaactataggaattcatacttatgtaaaatttagccattgggagaaaccaggtgaaaggtacacaggacctctctgtataccttt

SEQ ID NO: 113589 - DNA, 335 bp, Homo sapiens
gagatgggatcgtgctttgttacccatgctggtcttgaacccccccattgctttatatattgaaagcaaactactgtcaccacaaagcatgccttgaaaaaaaaatatcattcctatatttggtgcacatttggagtttaaaatcctgaaggatactggctaacaaacatgctgaagtttatgatggttcttggtttccgtgggcctaaaaaggagggaggacaccctcaccctgtcccttccaagtgtctctcctgagttgcttacctgtcctctgatttatccctgctttgactgataattggttgctggtatggatggaactgaataaatgg

SEQ ID NO: 113590 - DNA, 331 bp, Homo sapiens
ccagtctgggcaatgaagccagactctatctctacaaaaaacaaaaaaatagccgggcatggtggtgcatgcctgtggttccagtgactcaggaggctgaggcaggaagatcagttgagcccgagagtttgagtcttcagtgagctatgattgtggcactgcactccagcctgggcaacagagcaagaccctgtctctaaaaaacaaaacatcaaaaaaccaaatcttaaaatccttaagtaggtctcctatctctcttgagttaaaaggcccaaattcttatgatcatttagaataatcttcaagttctatttcctacttattcctctgc

SEQ ID NO: 113591 - DNA, 359 bp, Homo sapiens
actggctgccctgccccaccaatctcactcaactaggagaaggccctgcccaggaatcacagactcaagcttctataggacattgcaggaaaactcaaagttcccaaagcccccagaactccattctccaatccccaaaggtgtgttccagccaactagataacggaacaatgaaaacagcacccataggagcccgtgggtgacacacagggttaaagaagcccaaccaaagacttaagacccccaagtgaaaggtaaatggactcacacaattgtcttttatggtctcccttaattacctaaaagaacagtccatgctgccgaacaggcctggagaaaacctttcatctctcccttac

SEQ ID NO: 113592 - DNA, 447 bp, Homo sapiens
tttatttctagttttagttttagtagagatggagtttcatcatgttagccaggctggtttcgaactcctgacctcaagtaatctgcctgcctcagcctcccaaggtgctaggattacaggcatgagccaccatgcccggccataagtccttttaggtatatgatttagaaatactttctcccagcctgtggcttgtattttcattttttagcatcctctttctctctttaatacttttattgagatataattcacatttccttgagcaaaagttttaaagtttgaattctaatttatcattttttctttcgtagattgtgcttttgctatatctaagaaatatttgcctaacccaaggtcacacctctttgcttctagttttatagttttgggttttacttttaggtctgtgatacattttcaggtagtcttttatttttaattttt

SEQ ID NO: 113593 - DNA, 345 bp, Homo sapiens
ccgccacctaccgggtgggaggcagagatcagcttgtgttggcagggaaagcccccattttgcggttgccctccctgccagcagggggcatactcatgggtactgaaaggggcgaagtgcgacacattccccaggtggtctctgggcgggacaaagcagtggctatcctgctgctggctgcatcactgcttgttcagcgggctactccgcggggctcgcgtccagttactatgtgcccagatgtaaaggcagcagtcgcttgaaagtcacccatctgcagtggcagtgtgtctttcctgattccaggtgggtccctgcattttcattttgtgctgggctccacca

SEQ ID NO: 113594 - DNA, 1071 bp, Homo sapiens
caccagatgctcccacccttcaaattaagccatattacagaggaggaaactggcacagagaggttatgttatttccccaaggtcacacagcagagaaagtgggaaaaccaggatttaaacccagatgctccagttccagagcccatgctcttgagaatttagctaagccacctgctgctctgagacaggctcaggtagggtgaacgtgggctgatactgactgtgcttggggaaagcagggggtacgcggggacgagcttgagtgccaggtgccctgtctgggctgcctaggaaggaagagacctcaggatcacgctgttggcatcttgcatttgaggctggcctgagccgagggctcttgaggtcagtgtggatttcctcttacaccttggcctttcgaggattctgtgatgtctgcagattgggcctggctggaggagggaggaggaggccagaagtcctggaatcggggcttgactcctctcggggctactgaagaaccagcagtgatggggaatcactgtgagtgtctggggcaagctgttgagtgagtcagggccagagtccatccagttctgggggtgcccttgaggttacaggcaccacttcaccaagagcctcagaggagagaggcgcaggtatcctggtagacgcgactttggatctgcgccctagaggtgaggcaggtcttaatggctagagagggatagcctaggaagaggcacagctgtggccagggctgggcggcctacagcctgtgatgtgtgattccagggaactcagagcagcctggccagtggtttccaatcacctgggcagtgcgtttatagattcttaggtcccacatctagaaagggtgactctgcagatttggggagggccccaggaagctgtattttaataagcaccttccctaaaggtgattgggattctcaggcaggtttggggatcttcccagtctctgcatttacacaggaagaaataggggtccagggaggtgaaaagtcatggctagcagcatttccctttgcctggagtcaggggctgtatgtgtgtgcggtgggcactgtg

SEQ ID NO: 113595 - DNA, 328 bp, Homo sapiens
aaaacagttttgatcagagatgttcctctgtagctatgctaatattacatgatcataattgctttttgtttatgagattatatgtcctccactagtgcagaaccagatgaaacttaagtttaacctggcatgattatttttaacacctggcttatctattctctttcctggggaaaggattaaatgtgtcgtgattttttttccttattgattataagtcattagagaaagctaagtgctctttatctaacataagccagaattattattttattttattttattatactttaagttccaggatacatgtgcagaatgtgcaggtttg

SEQ ID NO: 113596 - DNA, 317 bp, Homo sapiens
ctcaaatgatttgtgtgtggtaatgtatagaagaaagtttacatatctgaagtgatgtattttaatccaataaaaattagagctggtattaattggccaagccagtaacctttatgaaacaggatagtaatttccacacataattttaaaggggaaactagtaataatatagcactaaggcatgagtctagggtggtttgtattaatatgtaatggtgcagcatgcaatgtaaatttcaaaggctagtatttatttttcccagtgtgcagttatctctatctttctttgatttttcttaattacaaacttaatttcc

SEQ ID NO: 113597 - DNA, 790 bp, Homo sapiens
ctgtcaagtaaaacggttatagtaagtgttgtgtaaacagatttccctacggctttatgttctaaagaaccccagtcttataagtatccccttggaaagcagtccatgattttgaactggtcttctatcattgagctctttaggaatatttttagaaccagtaccatgtgcattgatagcaagtctccatcctctgcagttagctcttctagttataacattgaaataactagtagttatagagcaatgtctgttggcaggcattgtgccatgaacttttatacactatttcatcttaatcctcacagtcctggggcatactacgtataggtagtatcttcatcgttagtttacgatgatgaggagactgaaactgtgtggttaggcacctgatagaaggacacagagctggaattcaagctaggtccacctgagtccagagcttgagctataagctgtcatgctctactgactgccttgatgtttattggctagaagtcattaagtgtgcctgccatcttatgatttggactggtgagcaggttgttaatattggttagttaaaaaggaaaaagaaaggaaaaaaatactattacagagaattcctgcagcttgttttcttacattgtttgagtatcaaccaaagtccttaaaaggaatggcagcatcactagcagatgcacagaggccctacccacgggctttgagggggacatggcttccttttgtactttcaaagtattttcttactggttttacttgtttcattggcatattttgagtgtgttgt

SEQ ID NO: 113598 - DNA, 363 bp, Homo sapiens
tataagatatcaaatagcatatagttaacaccatggttaccctagatctcacaataatttggagggttttttttttaataagaaaactttcttttgttaggtgtggtgaagtcctgttgtacatttttttctgtgatctgtaactgtgccgcaaatagtgaactccaaaatttcagtaccgaggtcaacatgtttttctgtgcaaaatctactaaaaacaaatggagacaggaggcaggcatgaggcaattatgctacctactcagcctaaaaaatgtaattgctactcatgtctcatgtttttttcttaagcatttggttttaaaaagaatctagacagaaaatctcagaattagtcacacc

SEQ ID NO: 113599 - DNA, 352 bp, Homo sapiens
aagctctgtttcagacagacaagattctggcttctggccaatttcattcaggatatattattaagaagtaaatctgttcacctttctgggtggatacgcattcaccctttgtgcctctaagacaccctgttctcagaagggattagatgtctttcaaagcccttcccccacccactgccttgcacactttggacctgttagctctcctgggtttgtgtcagtcttaccacttatgtggggtatcccctgcctgggcagggacctggcttactctcagctcccctttcaccagcctggcacacggtagctctgcaggccttgtattgcttatttggtactgttggacctgcta

SEQ ID NO: 113600 - DNA, 388 bp, Homo sapiens
accttcaaaattctgggggaaaattaccccatgtctaaaatcatacagtaagacaaataatctatcaagtatgaggaaataatctatcaagtatgaggaaagaagaaagacattcttcagacacgcaaggtctcaataaagttgcctcccccctaccctttctcaggaagctattggaaattgtcctccattaaggccagaattcaggaaagggactcacacccgaaggagagaaaaagtgaacaaaggtcatagctgggcaccaagctgaagcccagaccgaagcaggtagaagctcttgcttcaaggctcatcacacctatggcatctgaactactgagaggagagtgaggcagggcggatgaattagtgaaggagataaaaaacc

SEQ ID NO: 113601 - DNA, 353 bp, Homo sapiens
acacttaggtattagactgttctccaggatagaggtatcccatgaagggcacactctaaacatacaaaacaatctccctgaagccctgtcgaggttatactttatatccactctcaggagagaaacctcaaactcaaattagaaataaaaaatagagcagaggccggtcgcagttgctcacgcctgtaatcccagcactttgggaggccgaggcgggaggatctcaaggccaagagatcgagaccatcctggctaacatggtgaaaaaccgtctctactaaaaatacaaaaaattagccaggcatggtggcacacacctgtagtctcagctactcgggaggctgaggcaggag

SEQ ID NO: 113602 - DNA, 414 bp, Homo sapiens
tgctagattggatggtaacaggttgtttagctttgtaagaaattgcaaaactgccttccaaaatggctgtcctattttgcattcccaccaacaatgaaggagagatcccattgctccatatccttaccagcatgtggtggtgtcagtgttctggattttagccattctaataggcaaataatggtatctccttgtttttttgtttcttgttttgttttgagacagtctccctctgtagctcaggctggagtgcaatggcacgatctcggcccactgcacccggcccaaaatgtttttaaaaggcatcacaggaaatgtaacacaaacagcttaatatttggttttatggaggtgatttagggagcaataggaagtaatttattgataataaaaaagccgttaattttataattg

SEQ ID NO: 113603 - DNA, 330 bp, Homo sapiens
gccattctcctgcctcagcctcctgagtagctgggactacaggcgcccgccaccacgcccggctaatttttttttgtatttttagcagagacggggtttcactgtgttagccaggatggtctcgatctcctgacctcgtgatccacccatcttggcctcccaaagtgctgggattacaggcgtgagccactgcacccggcccaaaatgtttttaaaaggcatcacaggaaatgtaacacaaacagcttaatatttggttttatggaggtgatttagggagcaataggaagtaatttattgataataaaaaagccgttaattttataattg

SEQ ID NO: 113604 - DNA, 361 bp, Homo sapiens
aacctcctttctgaaagggccatgccagcaagtcggtcctgtgcttgggttaactactgccttcattccaagctgttagcacagtctgatggcctggaagatttgtcattttttttcttctttgttattcagacacttttggagccctttagatggagaatagacgtaacccagacatagtttccttatcattaaaagataccagttattagaccaggtgcagtggctcacgcgtaatctcagcacttcgggaggagaagggaggcggattacttgaggtcaggagtttgagaccagcctggccaacatggtgaaaccctgtctgtactgaaaaaatacaaaaattagccaggcatggtgg

SEQ ID NO: 113605 - DNA, 159 bp, Homo sapiens
gggtggctgtcagagacagcaaaattacttgaaaatctcccaaagtgaagggcagaaacatatattggcctttatctgaaaaccatttccaagtctccctgtgctggaacccacttcagcctcctgcatcacacactctgcccttctccgtgctgtgag

SEQ ID NO: 113606 - DNA, 224 bp, Homo sapiens
tgctgagatagcaggcgtgggccactgcacccggccgctgatctcactcttaggccatatctgaactctaaggattttccgcacacaccttcacattcccctgcatttccagaggaggagagtcttggtgacacagatttcctggagaacattatgacaccaatggcccattccaggatgaaaagggcaacccttgaatgtttctaaatgtttctaacagagga

SEQ ID NO: 113607 - DNA, 181 bp, Homo sapiens
tggcttatattcatttagcttatatcatatacatatgtaccaaatactgtggttgagctaaagctgtagacatagaagatacagtccccattctcaacttgtttaaaacaagcaaactggaccatgataagctaatataataaatatgacaaaagtaagtaaaacactctatggaactatg

SEQ ID NO: 113608 - DNA, 405 bp, Homo sapiens
tattttttattagttattcaagatgagttaaaatttaatatgactatattagcttttttccaaagcttttttccaaagcatttccggaatgctttttcattaaaatagctatttagtgaaaattctttataatacaatgatattccagagtagactaattttgcagacaaaaataatgttaaatgtattaattgaatcctaaaatggttattttcaatgaatatgggactgatagccaaatgtaaaagcttattaatatctaatgccaggagccatggcatttggtataaatatgtgtaatttatggtacttttagatgaggtttatatattataccttcctgccattagtggatgaagaaaatttctgaaggctaaactagaggatacaagaaatgtctaatag

SEQ ID NO: 113609 - DNA, 329 bp, Homo sapiens
aatatcattccaccattgacaatcatgataataataatgacaactctacactgtttcctgaagcacattttttctgttttgttttagtaaagagaaaaaaccatctttttctatgtgtattgagtcacataatcagataaacactagctgtcctgagactttcactggttgatttcatggctatttctctcactgttctttaatagaaaatgcataaggaatggtacgggtaggaatggttgaactaaagttctaattctggcttttccaataacctaatgagtcatttgctgccttacattattttttggtagcactgatggaatgat

SEQ ID NO: 113610 - DNA, 502 bp, Homo sapiens
ggtctcagaacccagagggaagggacctcgcttttgttgagcatttgtcatgtgccaggctttgtcctgggcattttaaggatggcctgcttactcttcacagcaaccccaagaaggtagtcagaaactggatttgcagagcccagcgtgggagccagtatccccatgtgctaattggagcttaaatttaatgaaatgaagttaaatgggccgggcacggtggctcatgcctgaaatcccagcactttgggaggctgagacaggaggattgcctgagcccaagagttcgagatcagcttgggcaacatggcgaggactcatctctactaagaatcaaaacaaattagccaggggtggttatgcacgcctgtagtcccagctactcaggaagctgagacagtgggatagcttgagcccaggaggtcgaggctgcagtgaaccatgtttgcagcactgcactccagcctgggtggatagagccaaatcctgtcttaaaagaaaa

SEQ ID NO: 113611 - DNA, 322 bp, Homo sapiens
tgtttcaaaatccttcccttagatagacatcaagatgatttaaaatcaaaatatgtttcacaaaatatgccaacacaaagtattgaataatgactctgtaataaacctaataatgaatgagtaaattacaaaaattttatccctagctagtggtgacttctaaaggggcaatttcagtaaaaattttaagttcaaaaaaatagtatctttaaaaatacaacgaagacatgaaactgggaacttctaagttaaaaaaactgttgagacaacatttttcagaccagaatataaaatggtttctttgatttttattccctcacaa

SEQ ID NO: 113612 - DNA, 319 bp, Homo sapiens
agtgctttgggatgttgaggtgggaggatcatttgaggccaggagttcaagcctagctaggcgacttgtacaaacctgtaaaaaattatacaaacttgtaaaaaaaaattgtaagcatattttggtaataaatagtcttacataaaaccagggggaaaagccgtaacttaagataggacaaacaggtttggtatatgttgtaaggggcttacacctttaaattcctatagccaggtgcagtggttcatgcctataatcttaacactttaggaggccaagttgggaggatcgcttgagcccaggagttcaagaacagcct

SEQ ID NO: 113613 - DNA, 567 bp, Homo sapiens
gggcgccatcactgaaaagctttccatgtcctcaagaaaacttctgtctcaaagtctcaatgttattgatgttcctttctataagaagtgctaattatctacagttggcccttgaacaacacgagtttggactgtgcaggtccactgatatgtggatctttttcaataaatatattggaaaatttttttgagatttgtgacagtttgaaaaaaactcaaagatgaactgcatagcccagaaatgttgaaaaattaagaaaatgttaggtatgtcacaagtacataaaatatatgtaaatattagtctattttatcatttactatcataaaatatacacaaatctattataaaaattaagaacatcaacatttatgcacacaaacaccaccgtccatagcaccatatgcagttgggagaaatgtaaacaaacataaagatacagtactaaatcataactgcataaaattaactgtagtaatactgtactactcaaataatttctacaactatactgctaccatactactttaataattttgtaaccacctcctgttgctgttgtgatg

SEQ ID NO: 113614 - DNA, 735 bp, Homo sapiens
tagtgtgcaaacttcagccattatttctcaagtaggtattaatttgttacccattaaaatgaggcaaaatagcttgcctgctctccatggatgcataatgtcaaagtacatgaattctctacacagacatttaaatcaacaaaaatcacataaccctggagctggcaaggcaaggaattgctaactgtgttcatgttactgggacatgctttagctagtaaacacaagtatctagccaccactgatagacttagtattgaattgttcaagatcttcaggaagttatctctcacttaaagtgcaaatcccctttttaagtgacctatactgtaataatcatgatctgtggcctatagtcattaagatgtaggtagagaatgatcttctatgctctatctccatgtaaatatgagccagtttccaacagcaaatagattatccttcagacccatacgcactttagatcatctgtgggtgaccttgacataaaacctaacagttaatttagtttgattgaaattttacccaggcattttactattaaacaccaaatgttttcacaaatagctaagctgatcatagattatggtttcatatcagcagagagagttaattgctgttaataaagagaagaagaagaaagactgcttagaattttaagacattctttcattcctgacacctctctccctcacaatgcctctcccagtcttttcttatggcagtttagacact

SEQ ID NO: 113615 - DNA, 390 bp, Homo sapiens
agtgaagtaggtagaacaagatgatttgtaaattcagcctcacagttaaattgtactgaccttagcttttaatttgtacttttttttctcttcaaagtttatataaattatggaaactcttaaagtaaatctcaactgagttttagaaattgaaggcagaggatttgttctttccagctgactagtccagtgcaggtggtttctagttgtattcaggcacaaagaaatgtacttactgccttttgatgttctgtaacatcctttgtcatgtttccttcctttcttgttgtgtttattcttttatgattagtaatgttatactgtatggattggagtagagacttcccccatgactcaaggaccacacagataaaaaggagggaagacatt

SEQ ID NO: 113616 - DNA, 432 bp, Homo sapiens
aagaattgtattatattaaagcaattactgaagtttaatatgtacggatgtgtagtttaagacatgggttttatgtgattgtgaaagctaagtacggtagtcctctcttatccttggtgtcgctttctgagcttaaagttacccacatttaacctcgatatgaaaatgttaaatggaaaatttcagaaatacacaatttataagttttaaatttctcactttttttttttttttttgagacagagtctcgctctgtcacccaggctggagtacagtggtatgatctcggctcactgcaacctctgccttccgagttcaagtgattctcctgcctcagctgggattacgggtgcctgccaccacatctggctaatttttgtgtttttagtagagacggggtttaaccgtgttggccaggctggtcttgaactc

SEQ ID NO: 113617 - DNA, 783 bp, Homo sapiens
gggtaaacaaatatacaagtggcaagttacggggtcgcagtatcacaggagaagggggaatcgttgcaatatataaacatctgaaaagggacacaattaaaaatacagctcataaggcaaagatctggaggaggtggggagacacagatatctatggaggagaggtctgagaataggggacagcaaatataaatatgttcccctggcattatggaggaacagcaagaaggccagtgtgggtgcacagctctgaacaatagggagagtggtcgttaagagagggtgctgtaggctcatgaagtgtcttgtccacctctactctgaatgagatgaggaaccattagagagttcttaatctgacttgcgttttcaaaggatcactctggctgtggtatagagcaatcattagccaaccttttggtctcagggcatttgtactcaaattattgaaaattccaaagagctctaacccctaagagctcagaaatgtaaatctgattatttattaattttaaaataacaataatgccactgaatgttaacacaagtaacatatgttttgaaattatattttccaaaacaaaagaacaaaaagatgtcagtgtttaagtttttgcaaatgtctttaatgtctggcaatcagtctgttcactgtcatgtatcatgtagcctctagaaagcttcactgtgcagtcacaagacaatgaatttaaaaggccaataatgtttagtattcttgtgaaaatagttttgacctcactgattccccaaaaaggcacactg

SEQ ID NO: 113618 - DNA, 204 bp, Homo sapiens
aggattgctttgtctccagacactgggcctcctgtgacttgctcagcagtattaagatacaaacttctgagctgctcattctagagatgtggattttataaaacggcaacaataacaacaatgaaaacccagatgccatggaggatcccagaactggtcaggctgggacgcttggttcctgccagtgtccaccagctctgcccc

SEQ ID NO: 113619 - DNA, 595 bp, Homo sapiens
gaaaagtttgtacacaaatgctcacagcagcattatccataataactaaaaattggaaacaattgaaatgtccatcaactgataaatgaacagattaaatgtggcatatccatataatggaatattatttggcaataagaagaaatgaagtacttacacattctacaacacaaacacgtcttgaaaacaatggccatcagagatttcaatgcactgtcaatctacaagaagggtatatgatatgcagttgtttcacaaacactgtaacaaatgattttgaagaggacatcttaggatactctgagttactccaacttggacatttcacagcaaacgttgtccatcgctgttaagatgaccttgaacactttacatgactttctgagcctctttttcctcattaaaagagagattgcatcacccactctgcttactcacaaggaatttgtaaggattaaattaaataatgactatgcaaataaaagtactgttattcgagcgagactccgtctcaaaaaaaaaaaaaaaaaagtactgttattcagcagaagagaggcatgtgcattaataagcacgatgatagtttgttatatat

SEQ ID NO: 113620 - DNA, 263 bp, Homo sapiens
tattatttaaacctttaaataatacattcacaatgtgcatgctctctttgtctttattaattactctgggtttttttttcccaatttcttggaaattacctggtgagaaccctgcaggactgcatgcagaggtactcagtaagttaatttaggcaactgcagtaatggctgtctttgcttagcatgatatatgaaatattttgcaaaaaataaaatcacatgtagaatgacatatgcctatagaaattctataatttgatggg

SEQ ID NO: 113621 - DNA, 689 bp, Homo sapiens
cggcgcggagcacctctgggctccccacttgaacggcgggccgcgccggcccatgaggaaagcggggtgcggagctcgccccctgccggaggatgcgctccgccggcgggcaccctgcggggaccacagccggacgccagaagtgacctgaccgtgaatgtgcgctttgcgtgcagtcattgcatcgtcgcaggcctaggagacagatgaagagatggctcttaaggaaattctcggttatactgaaaaatccagaagctctgaagataccagtcaaataaaatcacaccctataactctacaccagacttgtggcatggtttctgtagctgccagcggtaaaaccaagagaaactttacaaaaaccttttgtgcatctgaaaaggaggaagtgtgagagacactggaaattcaatatgtcagacaaagccgtctcctgacactgcaggacagtagaccagtcaaacaatctttttaaagcccccatgtaagaagttgctatatgaggtggcagcttgggtcagacattatgtatggcctttggtattttagtagcactgcatgtaaaatttaactttctaaaatcgctgtattcgtggatagcttttatcattgcactagacaacaagttacaatttaaaaattgtatctgtttctttttatgttttttgatccttttggtgtctgaa

SEQ ID NO: 113622 - DNA, 697 bp, Homo sapiens
tacttttatttatttttcaagttgtaaaaccatattgaatattttttatttgtgaaactaaaaatgaaatatttgtccaatcttatattggtaactgaagtgatagctttggaagcaattgttgccttccttatctgagataatcaggaaggaaccttgttgagaccggtttgctcatcctttagaatgttgattcctaagtttagagctgttaggtacaattagtccatccaactgatgtttattgagttcttgtgtgctacttctaggcagtggtgaataagatagttgtggttcctgccctcagattttctaagaattgatgagggcatgcgttgaataaagatttaaatataatgagtcttgttagggggggaagattgtgctaaggaggtgtatgaagatattttacttgatctagaacaggggaggtttctctgagaaagtgacttttgaatgaagtagtagtttaaatggcaaaaaggtgagtggcctagaagggtaagtgggagagcattttacacaaaaagcagcatgaattaaaagtctttaggcaggaaaaggcatggcatatgagtaactttaagtctagtatgattggaacaaagagagctgggggaaaatgatgtgatgtgaagctggagaagtgcagacaattaagaaacttataagcttcgggaatttgtaatttttcagt

SEQ ID NO: 113623 - DNA, 263 bp, Homo sapiens
tgggacaagaacattgaacctaaaattaatcaaccaacacaaagatgattttctctccaaaggtaaaaccaggttgagcagggggtagatgtgggcagatattgctgaaactcagtttagaaaacaccttacaacaaggagctcgctgtataccacaatataatagttcactgtttctctcagacctcagcagtgttctcattttgcctggcaagagtttgaacaagatagtccaaataatccattactagctaacttctgag

SEQ ID NO: 113624 - DNA, 752 bp, Homo sapiens
atttttgccaaagtcaaataataatcttgagtaaaattctcattgcttataagatataatttataatatatatttatttaaagtatatggataatatattatcctggaatttgctaaataaagtgaaatattttataaaattatgaagttccataatgtgaaaaacaatgattttgattaatgaaaataacttaaatattatttccccctgttattcttattagtatttcattaaattctatttcattagctcttcttttgattatatcaaaatttcattagtactctatatcatattgcatatgtattagtatagatacatacctggttattcattgtgacctcattactcttaatgatagtgtggttatagccggtaaaattactgatactcttggcattgtctattatttacagaaatcaccttgtgtcttaattttatctacttgcttgttggatgcttgtctttatgtatttttccaatactttgctctagtgctctgatgctgggcagccatgcaaatgtcagaactactttttattgatgtcagtttggaaaggggatatctaaaatagcatatattctcaaagttttgtgaagttacaataaacctcttccctattaatatactacaggcttggtctcactttttgggaatttatgtggttgattcctggaaacactggaacaaatctgccacctttagtgaaaaaattcaatatccacaatatccacagtctgaatttcctat

SEQ ID NO: 113625 - DNA, 537 bp, Homo sapiens
gaacttgccccaggcacagaggtaggaagtggcagaggcagaatttgaacccttaagagtctacctccagggcccaggctctcacctcagtcctgggctgcccttcatttaccctgtagtaaatgtagtgcagtttctactaaacacactgctccttatttaccctagaattccttcagtgcaggattatctgaggaccacctgtgtcacaatcacttgataaagatgcagattttaggcaatatctcagaccaactgaattgaaatttcggggaacaatgcccagaaatctgttttgttaacaagctccttcaagaaatttaacagtcaccacagtttggacttccagagtgaagatttctttctaagcatttctagtaggcttagggttccatttgggaaaaaatggaaatgatatatctatacctgtagaattttctatagcatttctgtttctaaataggttagtgtttaattgaatgaaatcccgtctctactaaaaatacaaaaaattagccgggcgcagtggcgggcgcc

SEQ ID NO: 113626 - DNA, 388 bp, Homo sapiens
agtctcccaaagtgctgggattacaggcgtgagtcaccgcgaccagcctaggacacctatttcttcaaacataggaagaaacatcttatctgcatgatccctcctggggagctatcttacggtcttatgtgataaggtgacctctcctttgggtgagtggagtaaaaaagcgggcgaggtatctggaatatgcttctatccctcctaacctcccctacaaacaaagctttcctgaatgccttgtccttagcttcctggactctgaacctagcttggctaaattttctttttaaagcatcagcataaatcatgaataccttgggaagggaacattaaccatcagccggcaaagttaaaattcccctccagcccacttaaatggactgaa

SEQ ID NO: 113627 - DNA, 370 bp, Homo sapiens
catgactgcttaattatgttcaagaaatctccaaaacagtataaaacttagtacagaatttaatccaatttacatatacccagtataaaagggagcatgtgctgtttaggctcatggggaactgatagagaattcttgttggtagatgcttctgtttgtgtttgagtgaaaaaaataacgcactttctcttcatgtatgtacatatttattgcagttacagtacattataccaattataaattatttataggaataaaatagatgaacatacattaaatacattagtataggtgaaaaattcccccaagatcacatacacaccttggaggttactctgtaatctagtaccatttcacaagaatatgttac

SEQ ID NO: 113628 - DNA, 398 bp, Homo sapiens
actgaatagtttagacgacatttattgagcatctacatgtacagagcaccctattagctgctgctgggagatacagaggaaggcgtgatgtctgttctaaaaaggtttctagcttaaggaggaggagggggaggcaacaagactaatgttctgttcattcattctttccctcacttaccacacattttcctgagcatccactgtgtgcccagcatgtaactgtaccagatgctgcaggaataaagatgaatatgacacaacccctagcttcatgtagcccggaaatagagggaaagacacagactatgtcaataaataattaaaatacaacgacaaatgaagtgtcagaaatggcacagagtagggaataatcaacttttcctgaggattttaaaaag

SEQ ID NO: 113629 - DNA, 882 bp, Homo sapiens
caagaatggtgataatttaaaaatcaaaagacaatagatgttggcatggatgtggtgaaaagggaacagttttacattgctggtgggaatgtaaattagtacaaccactattgaaaaaatatggagattccttaaagaactaagtgtagaactaccattggatccagcaatcccattattgggtatctacctaaggaaaagaagtcattatatgaaaaagacagatacacgtgcatatttatagcagcacaataggcaattgcaaagatatgaaaccaacataagtgcccatcaaccaatgagtggataaagaaaatgtggtatatatacaccatggaatacttcagccatataaaggaataaaataatgtcttttgcagcaacatggatggagctggatgccattattctaagtgaagtaattcaggaatggaaacccaaatatcgtatattgtcacttataagtgggagctaagcaatgaggatgcaaaggcataggaatgatacaataggctttggggatttggaggggtggaccttgggagggaggtgagggacaaaagactacctattgggtacattgtatactgctcaggtgacaggtgccctaaaatctcagaaatcgctactaaagagcttatccatccatcacttcacagccttttagctgagatcaagtgtagaatttatccatctaactaaaaaccacctgtaccccaaaaactattgaaatgaaaataaaaagtaaaaaaaaatgcaccattgtgaaccattgtgataaaaaggcattttttaaaagtatgactttatctacctgaaataaattatagcagcatagactttctcaagagaaataataaaatatgagtaattttaaagtat

SEQ ID NO: 113630 - DNA, 720 bp, Homo sapiens
gggtctggctgtattgtgccaaattcctggcctcaagcaatcctcctgcctcagcctcccaaagtgctgggattacagccataagccatagtgccgggccatatcttactcttctaagcttaaggacttttcctcattgttaacacaaagaaaaaggtaaatctttttccccacttcaagtaactctgttattctgagcattaaacttcagtggaggttatagttacccttctaccctagttttgtcccctgaaagcagaagtgctagagccacagcatagaaggctaggacaagaaaatacaggaataatggctcgtttgcttctttttatcagctgtgctttggttgctccagccataggacaaatgcatctccttggaccctgggacttggtctgactgagatcctagcaacttttattttagcctgttttaaatatacaaaggatcgtttgacttttaagaggcaccagccttactctttgggcatctgatttccagggattatgatgctgttaggttggagtttgaatcggctcatagctttggtagtaattgtgattaatattagtaattatgtaattttagtgactcaagatgaattgtactctaattgcattatgacactaggacattttaaatgattaccatgaaaagtcaccaagcatgaataaaggcctgcatttacctgggagtgagtcataaacaccacaaatacat

SEQ ID NO: 113631 - DNA, 802 bp, Homo sapiens
tcttgtccacctgttcagggaagaaggacgggctgggcggggcaggaggagggatggagaagagaggctggtccccagtatctgaagggctgccatatgaaggaagaaggatgcctgctgagggtctcggggcacaggcacaagttttgaaataagacaactgatttcagcacagttgccctgggatgcagcaacttccccagacagggatcctcagtagagatggactaatgactcggcagcgacaccagatcacagcacgttctaaagacctttcagctgctgctgcgactccagcctccccagcacctcctccacggggacctgactgctgtgacttagtccattttttgttgcccatttctttccctgggcaacagcctggcacgctcttggacctggcagccaagtagtttggtggcattgacacccaagaagcataagtgctgagtgagttcacgagaaatggctgcagggcgctctgacgacagaacaatggtatgcgccccatactcatccagcccccaaaagacctttagatggaatagacaaacacagcagaacaagccaaaatcgtctctgaaacaagcacagcctgagcccaccccactgtgactgcatcgcccagggtccttcacctgtgactgcatcgcccagggtcccaggaataaccaacagcagcttcagcagaatacgagcctgcacagctggggaaagcgacctgggttttggcaaaacagcctgagtctctgccatgtccccttctctaacaataacagaaaaaagcccctcatttatttag

SEQ ID NO: 113632 - DNA, 681 bp, Homo sapiens
ggttcaatctctgcctctgtctggtctctgagaagttcctcctgccaattcaaatgtctgtgggggtaatgggatctcttgtctctaggatcccagagggttgtatttggggtgtggtgccttggagttcctttactcaccccttccttaggacctgttgagggccaggagctggtcttggtgctcggtgactccatgcaggcttcccagtttcctccctctttagccacaatgtctgtcacctccctatcgatttttggtgttttctctcaaaatattttttcaaagtataatggtttactctacattttggtttctgttagtgagggaggcctttcccagctgcatctagtcagccatcttctagatctttttcttgattctgacactttgacctaatttaaatgttgacctgaggatattttgactctgcttctaaataccaatattcagatttatacgatcatcaatgaattcaggtcaataaggagttcttacattttttgaagtaaaatctatgagtttgattccttaattttttgtatagcagtgttaaactatggttttattcttttttattctactaaacttcattggactgaatgtcaatttaaaaacaaagatttgatttagtgattatgttttatctacattgtttgaacaaccaaagctatttcatta

SEQ ID NO: 113633 - DNA, 530 bp, Homo sapiens
tcttaagtccccatagctttcttcataatgtggagtttagcctcaccctaaaagaacctctgattagcatttatagggccttgaaagtttttcagtttttttaagaatttgttcaccttatctgatccctggagctgtggattttcagaggcagctggcctcgtttgtgggaagcatcttaatacttttctcctggctcgctcatgtttggtctggttggtttctccctctcacctttgccttttccacataattaggaatatgctttccccaacagcaactactcatcttattcacattaacctgctctctgccccagacacgcacactcggctccagcctaattagcctgttcccactgccatcttttcttctgtttcttcattgtgacaataagatagtcctatttaaaaaaagtttggagtattgatttttaaacattctaattcagtactccagggaagaaacagaaagctattaattcaaatattagtatgctcctactttaactcagtctctctgccttgatg

SEQ ID NO: 113634 - DNA, 312 bp, Homo sapiens
gcatatagaagtacctagcatggtgcctgacatacaacagagattttaaaaatacatcctcctttgtacctatgtgacaggcctgaattttcgagaaaaggattttattcttattctggttctccatttctagtcttaacaaattggcctctgacaaccatttagagaagaacattctgcactggccattcctctgtgggagcagattttgccaggtatgctcatgtatcggtgtgggcactctgattctaaggtagagcaaataacccaaaatatctcttgctgttgctattgaaacttctaaaacctatt

SEQ ID NO: 113635 - DNA, 724 bp, Homo sapiens
acatcagtagattatcttagctttataaagccattccaattgatcactagggcttgaatatgccttaggctcaaagtatataaattggaatttctcttgtggttcagttttccttctgaagggttacaaaattggagctaatagctagagaaagggtcctctagcatattacatataatttggtgggattgtccctcttgatatatttataaatgtctctcagcccctttacatgtactttcgttgatgcttcaattaccttttggtgaagagggcgtgaggaaaaataattccattatcgaatatgcttttattattcctctttaatgcctttttcattttggggttttaggaaattatgctcacttttgtttttaaactaatcattgactttttataataatacaactactttttcaatatagtaaagctttgacagtgtttcccaaaaaactcttgcaggaatatgagagtaaaaatttatagtcagtagttctctctcatgcctttgtttcccccacttctggttacaccagaaggtcctgtgcttatatttggtcatcacattcctggaggctttgccttctgactgttctccttctgtagattctgtggtcaccacaacctgaaatgaggactactttgtgacatgaagcagtaacttgaagaagggccaaggggatgaaaaagacaatgtaggctaacacaatataacaagtagctt

SEQ ID NO: 113636 - DNA, 858 bp, Homo sapiens
gtgtgtgtaatatgtattttaaggtagacattaccccttttcattgaagacagttgatgtgattgaagtattattcccaacagcttagcatgagacatttaataacattttaagacatttcaataacaacatggaagttttatattttaaaaagatttgagagatcaaaaaatgataagtatatgaagtaatgcatatgttaattagcttgatttagccattccacaatgtgtatatattttgaaacaacatgttgtgtatgactatgtaatttttattggtcaacttaaataagatttgaaagttttagaatctagaatgtcctgcctctaagctacctgtaatctgactttttggcataggcaaggaagaaacttttcattttggcatgaggaaaatattcaaatgtaagagcagtttcatacacctatagacaaatgtcttttacttgtctggaaaaatccagaacaattcaagaagaagaaatagcttttacaaaaaagtgatgtataataatttaagtggtatttccgcttccttactcagtttagtctctgatacgtcctatcactgtctaaattactccattattaggggaaaaggccaatttttaaaagcaggttgggtgcagtggtatgtgtatgtagtcccagctactcgggaggctgaggcaggaggcttggttgagcccaggaggtcaaagctgtagggcactaagattgagcctgtgaataaccactgcacaccaacctgaacaaaacagtgagataccgtctctttaaatcaaacaaacgagacgaaaccaggttactactattgaccaactgtagaaatcactgggttcagtattcctttctt

SEQ ID NO: 113637 - DNA, 441 bp, Homo sapiens
gtatcggcacagaaaaatgtgttatcatacagatctttaggtcagaagtctgaaacaggccctactggactaaaataaagatgtctgcagagctgcattccttctggagctccaggggagaatctgtttccctgccttttccagcttctggaggctgagtgcattccttggctcaaggctgccttccagcaatagcatcattctgatttcttgtgtcctcacatctccctctctggcctgactcttccattttcctcttttccttatgattacattgggcctactcagatattctagggttttcttcccatctgcaaagccttaaaattaattacatcagtgaaattccttttgtcatgtaaggcaaggtattcacagatttcagggattattaggacagggatatctttgactaaacattattctgcttactgcaccagg

SEQ ID NO: 113638 - DNA, 408 bp, Homo sapiens
agaaggcaagaaaataatcatttccacccttttatctactttgaaatcaccacttttcttactttggtcttctgtttcctctataaactatgcttaagagaccagagtgagcagacttcttcgtgaaaacctgagcttgggagttgggatggtttacagtcttggcttcagtccacttttctgacttaacacccagacccctttccggctaaatttattgtctcctgttcctgctgggcctttctggagcgtccgcctctggagtgccctctgctcttgaggtcccaaactgcccatcccacacctacctggtcacagctttgcagtttaagtccccacatgccagtgactgcttcctttctggacccctttactgcatttcagcagtgctgtcaatccttcctttaa

SEQ ID NO: 113639 - DNA, 246 bp, Homo sapiens
tgagacagactcatacagtcccaggagatggatgtgacacctctgtaccactcagaattgcctgaagtggggtggggtggaggagaacggggggaagcactcaggtaaaagtacaaagagggtgaacttaatgtggagaagacaggaagggggagaggaagggaatgtcatgaatattaaaaacagggaacataaaaacaatgcaaccaattaaaatattgtttagagacagacaaaaagagatac

SEQ ID NO: 113640 - DNA, 242 bp, Homo sapiens
ggcaggggatagaggatgagtggtgacaggcagcttggtgtagatcagaatggcccaactccacatacccagtacagctgaggggcttcaggcacattcctggacatctttgggcctcagtttcctcatctgtaagttggacagctgtgaggataaagagctgagagactggatacacaaatggaggagggccaggctgtatataaaaacaggactctgccccacagtctgcagcaacctgg

SEQ ID NO: 113641 - DNA, 387 bp, Homo sapiens
agctggcagccagtgcacacgcagaaacgacatttcaggacccagcacagtctcatttggctggagccaccggctctgcggagctgacttgcccattccctctacacctcactgtgtccttcaccctgtctgacctagtcccgggaaacctggtgactcccaaaagcatcttctgctgccagtaacataggtcgaggctgggagtcgggagacttgagttctagtttacaggctgtgtaaacccgggcagtcatccctcagctctgcgccttgtgctcgcttttcctgggccaccatttgtaaaacgggcctcctgctcctgttgcctgcataccccatgggacagaaggggaaagggggattggacctcagagtctcttatctcga

SEQ ID NO: 113642 - DNA, 298 bp, Homo sapiens
tggcctgctttctcctacctgagttgcagtagctttgtgatttgtcttaaagcttaaagcacttttaaatgttactgtttaaaaataaacatgaatctggcgggtacggtggctcatgcctgtaatcctagcactttgggaggctgaggtgggcaggtaacgaggtcccaggagatggagaccgtcctagctaacacggtgaaaccccatctctactaaaaatgcaaaaagaaattagccgggtatggcggtgtgtgcccgtagtcccagctactcgggaggctgaggcaggagagtg

SEQ ID NO: 113643 - DNA, 330 bp, Homo sapiens
ccccagcttctttaccagcagcggctcagggtttgaggccttcttcacggcggccgggaccctggtggtggctgtgtgcacacggaaggagtatttgaccatgagtttgcccgaagtgtcctttgccgactctgcctggcactgcgtggctatcgtccatgtgcctgggcgccggcccttcagccagaacctggtccatgtctacaaagacggccatctggtcaagacagcaccccttcgctgcccctccctcagtgagcctttctcctcctgctgtatcggctccgctggataccgcacaacgaccaccaccacagggctgcccacacc

SEQ ID NO: 113644 - DNA, 559 bp, Homo sapiens
ttacggcatatcgtcgaccacgcgctccgcggacgcgtgggctggaagtgcttttttatgactatgcttatcatactgttagcttactggacatattagaacaagcctcttacagagtaagatttgaagaggtaattgaatatgtaacagaaccaagtgaagcactaatatttacagatgggtgggcaaatgagaagaaaaaaatgaaactgaattttatgatacatcctaaaactactttctaaaatagcattaagtcagctaacttcgaacaaagcagaacaattgtgattagatgaatattttattaaactaggaattgatagagatctttttaaactaagagtatgttagcaatattgtacctgtttaatggcatggcatgccatgccaagccttctaatgggcatgcttggggaccagttgctggcatcaaggggtgaatgtacagtttatgagctgaagcaatctactttctcagttttcaacactttttctttgtcattagtacctttgaatctgcttttgtcacttagccatacttttgtttttcctaccg

SEQ ID NO: 113645 - DNA, 131 bp, Homo sapiens
atagattactttagataatatgacactttaacaatatttattctttcaatccatggacatgaaatattttaaaatttgtgtcttcaataatttatttcattgatatatcttttttgttttgttttgttttt

SEQ ID NO: 113646 - DNA, 165 bp, Homo sapiens
cttccttctccacagtgttgctgtgttttgaatctgtgcttctcaaactgtggcacccaggccagtagcatcagtatcacctggaatttgacatgcacgtttattcagccccaagcaaatctgttgaatcagaaactctgaggacaggtagggtccagcaagcaa

SEQ ID NO: 113647 - DNA, 396 bp, Homo sapiens
gaaaggatcttatttcttctttggaccaaagttgctgagaaatgagcctagcctttgactcacggttaagctggggaaatgacaggggcagctgaaatcaactgaaaagatgaagggtataaaaaccttctatgagtaatgcaagacccttctcctgtagcttgttgaatttgcgtgtaattcatgctagccgagtatgtcgtgtgatgtgaagaacttagtatgaggtagaaacagtgcaagggaatggttgtggcttataaagatctttgattctttaggttattgctttgggaaaatgctttcctttgcttggctgtcataggcaggatttttattttcaaccccagtaaagcatatttgtacttgtattgctctttccttctcattttattt

SEQ ID NO: 113648 - DNA, 301 bp, Homo sapiens
catgtgctttcccgacggggtggggtagggattgggtgaagcctgagttaggatttcaaatttaagagtataatgtaccacaacaaaaataaatgtcagaaacaaaggagtgcatactgtatgactctaattatgtaaactttttatagagcaggcaaaactaatctataaagacaaaaagcagatcagtagtggagtggggtgagctacctaacaaagaacacaaagcaacatataaaaatgttctggccaggcacggtggctcatgcctataatcccagcactttgcccccgtcgaggt

SEQ ID NO: 113649 - DNA, 749 bp, Homo sapiens
taactcagaatcctgtaagagagtacagaaaaaaacatgcttcagtttcttctaacatcagtaataacaatttctccctgaatcttgtattcacattagattacttacattttgcctttaacttttattggcagagacagaggttctggtcagtgtcaaacttcctaaattaatcacctatattcatttgcatcactttttcacccactttccctcccaaactactgcaattagatttctatcctccaacattctacagagatgattctagaaaagattttgaaatactgaataatgcccaattccttataacttagccctcctcttccactccctgaacaaccagcatcactccctcccatcacctgaagactctcttttaaagctcttctgcttgtcttgttttctgaatgcagatcactcttgctaaaattctttcaaagattttcccatcttcaagtatgtgttaatcatagatatttcccaggatactaccttcaggcatctttcttttctgtttcatccttcctagcaatcaatctctaattctcacagcttcctctgtcacagatgtacttcttttttgtcaaatcttttttatcatatctacatctgaagtctgtcctacgtttatttagtctatgttcctactagacatttccaaatagatattttatggcaactcaaataaacattattgcatgggcaattcgaactaacatatcaaatttatctctccccctcctcac

SEQ ID NO: 113650 - DNA, 653 bp, Homo sapiens
gggcactgtagtcccagctactcagaggctgaagcaggagaatcactggaaccggggaggtgggaggttgcagtgagccgagatcgccccattgcactccggcctggacaacagagcgagagcacattcctggctgtggtggctatggggagagtctccttctgcctgaggaagggagaggaaagagtaaaggggattttgtcttgcagcttaggtatcagctcagttacagtgagatagagtgccaggcaggccctagggttcctgattccaggccttggctcccagatggcatctctgggtctgcccggcattaggaggaactcatcatacttaggaggaactcatcctcttagaaagaactcatcacactaaaaggaaggacataagcctggataactttgccacctgctgagtgtagagcccttggtccatgagtgaaaataggctgtagccaggcagtagtcactgcaggccttaggtgagacccagtgctgtgcagtcccagtggtggtggccatagggatgcttgcattacccctctcccagctccaggaagctcagcacagagagagaccctgtttgtttggagggaatgtggttctgaatcattatttaggggaatattgtctgaacatggtctactttgaagt

SEQ ID NO: 113651 - DNA, 302 bp, Homo sapiens
aactttttctgatgaaattctttcctgctccacctaactcccgtgtcccacccccaccagcagagtggtatatctagcacaagaggcatgaaattaatttagtaaatagcaggactactagaaacttttaaggattatttaacttatttttaatcaaaattttatactcagataatgaccttttgggaagttatgtctcttaatgatctcaagtggtgacacttttctgttgacacggtttctcttgggtagttctcatagtagtttgggcatgagaaaacaacttttaccactttagactt

SEQ ID NO: 113652 - DNA, 153 bp, Homo sapiens
tgctacgattacatgcattagctaccatacaccgattgtacaggccacaggctagccccacacaccagattttgaagattaagtgtggtttaaaaaaatgcaaaatatcctgttaataatttttgataatattacatgttgaaatgataaagt

SEQ ID NO: 113653 - DNA, 591 bp, Homo sapiens
attaatgtccactatctgtttatgtttttatggatgcaatatctgtttgtgtctctgatgctaacaattcaatatatacttgaatatattgaatgttttgaatgatcagtaagtctcctcaggtataaactctgtttacaacttgcggtttcctttcaaggtgttggcattcctcaaatgcacagtgattacttaatatgtgctcatttgtggctgaaatttcctgttagttggctaacaggaaaaatgagatgagatggatcgaagggagctgtggggtcctatgggaggatgtaacagaaaaccctccagaacctcaaacagggtcatgggctcccttaagctgagtcttaagggtgagtgagtgtttgccaggagaagaaatggccaaggagtgacttattccagggagagagaacagtgtgttcaaaggccctgatggtgagggaggcaatgttcttacccaaagtaggaaatctccctctttccaaattatgtaggcattattcagtaattgggggcaaacgctatttgttctaagggtctctggaacagctgatcagtaaattcccacatggtttctacccaaca

SEQ ID NO: 113654 - DNA, 463 bp, Homo sapiens
gtgccaccgcacccggctaatgttttgtatatttagtagagacagggttttaccatgttgcctacacttgctgcccgctgtggcctcccaaagtgctgagattacaggcgtgagccacagtgcccagacgaaaccccactatttaaaggcatgggaatgcaaccaaagcaagtagaaatggaggggaactgatccttgacagaaagagactccactggatgagatttgaattatgacttttctcctgaaaccagtacccagtccatatggtctacagctactaactctcatacctgacactgcagttatacatagtccaaaggtagagtttgaaccttgctctgtggttggaaagtgaaggggaaatcctagggggaaaaaagtcacataaaagagattgccctcaaatccgcatataaactcttaccaaatctttgcctgaccccagaagtgctcatgagag

SEQ ID NO: 113655 - DNA, 725 bp, Homo sapiens
cacggtggctcatgcctgtaatcccagcactttgggaggccaaggcaggcagatcacgaggtcaggacatcgagaccatcctggttaacacggtgaaaccccgtctctactaaaaaaaaacgtgaaactaaaaaatgtgtgtaataatcgagacgaaaactcaataaatgggataaaatctgactggaaaaatcaaagagaattactgaatttgaaaatagtattgaagaatttaccaagaaagaagcacaaagaaataaagagggaaaaatattaagaagatgttaagtgaaataacagttggattgagagactcaatattgttcctcccacctccaaaattcaacccacccacaaacttctattgaaagcactactaaagaactcagaacgttctttagtagttctttcaaaaaaaagaaaacctggaatgatatgggatgtaagaagcattaatgaacaaagtaatagataaaaagatgttgttaaattaattactgacaattcaagattaacatttttgtttgcttaaaagagttgggaataaaatgtagacagtaaatacaaggaggatagaagaggtggaattcaattttgtttaaaaagatgaggatattaaatttctttagactttgtcaggaaatataacattttatatgtatgttgaaagtaatcaccaagatgatagaaacgcaatctatagcttccaaaccattagaagagaa

SEQ ID NO: 113656 - DNA, 3485 bp, Homo sapiens
  misc_feature (991)..(991): n is a, c, g, or t
agtgtattcttgggacaggtggcacaaatatatggcccattctgctggggtgacctaaaagggagatgagattatatactcactaaagaattcttttctgtttgttttgttaaaattgaaaaataggccgggcatggtggttcacgcctataatcccaacacttcgggaggctgaggcgggcagatcacatgagtctaatttatatatatatatgtatgtatgtatgtatgaaaaattagggaggggcagaatttctttaggggcagtagcagggaggatcccgaactcagtcatagaatttttaggattgaaacaaagtttgaggtcagaggggaacataaaaccttggtaataccccgcccccggccaccatctttgtacatgtgtctttgcagcttagtgcatctctttgacaaagatttgtgcaatgatgtattttattcaacacatcattctgaaagaacgtgtggaaaactaatgactgagcacaaacctgttgaagatgcagttcttcttggtagcctaaataggattatcttggacctaagatagtgaccttgttttttttcttaatttttccattgaaatacatggccttaaggaaatatgcaaaaaaaaaaaaaaatgaacctggaaaaaaaaggtcctggaccaggtggatgcctcatatattaagaaatccccgaggccgggtacagtggcttacgcctgtaatcccagcactttgggaggccaaggcgggcggatcacgaggtcaagagatcgagaccatcctggctaacacggtgaaaccctgtctctactaaaaatataaaaaatttggtgggcgcctgtagtcccagctacttgggaggctgaggtaggagaatggcgtgaacgcaggaggtggagcttgcggtgagtggagattgcgccaccgcactccagcctgagcgacacagcgagactccgtctcaaaaaaaaaaaaagaagaagaaaaagtatccccgntactattcaaatggaactttatcactaataaacacaagggaagaccatgccccatgttagcaatgcaaattattgctacagctgcctatgataatttggtctttagttgataatatacaagagaatgtggacttctaagtccccttgccttgcatcctctgtttcaaatgatttaatgtgttgtgtaggaaagcagataataaaacttaggagaatccttcccagatttacaagggtcatgaaggagatacttctataggtataaagtgtatgagtgttagaagatcattagcaggaacccaagtacgaaatggttatttgaataaacattctcagatttgagttagcctgtcttgagatctggctgggagcgtaggacacgtgctcccttttgttctgctcaggtagttcccaagtgtgggccgacaggttctttttccttgatgttcaggttcagcagactgtacaggatctttttggcagagccccaagtaaagctgtcaatcctgatgaggctgtggccattggagctgccattcagggaggtgtgttggccggcgatgtcacggatgtgctgctccttgatgtcactcccctgtctctgggtattgaaactctaggaggtgtctttaccaaacttattaataggaataccactattccaaccaagaagagccaggtaagagccatcacttcctaccttgtcacatgggttttaggttctatgacggatgtaattgcagccactttcatgagttttttctagaaaacttcatttttatctgttttacagtttagaatattaaacagttaactgtgggtggtgagaatcctgtgttttgttttttgtttttttgttaccagaaaagttcttacatgttagctggtagtgatgattataagaaggacatcagtagtctcctccacaggattaacataatttgctaaaagggatctcagtcatttgagactgaatttcctgtagtcttctgttctcaaagacagtaaaaagggtagtctggaccagacttaggggagtgttcttatcttatggatgaatgaagggggtggtatgagggtgccgagataccaagcagggctacttggacatggcttgttcttgaagtaggaattatttctggctgggcaccgtggctcatgcctgtaatcccagcactttgggaggctgtggcgagaggattacttgagctgaggagtttgagaccagcctgggtaacatggtgaagctccctctctccaaaaagttaaattagccaggcatggtgctgtgtacctgtagtcccagctactcaggaggctgaggtgggtggatcacttgagcatgggaggcagaggttgcaatgagctgaggtcatgccactgcactccagcctgggcgacagtatgaagtgaggtcttgtctcaaaaaaaaaaaaaaaattatttcctgacttacccaatcttgtgatgtttttccataaaactatggttgttggtatatttgtgccgtgatgtatttgtcaacacatcactctgaagaaaagtatgtggtgactttctgtgactgagcatgatacatcttctttctctgatcccgtttccccagatgagcatgtttcaacattttagttccttttgaggacttctgtcctaatgctgcgtctttgtacaatgcatttgcttagctgaaacagttgctattgtatgcccatttgctgtactaatcctacttctattccctataaagacatcagcctttgttctgaacataccgtaaattaggagtcttccagtcttggaatgtaaacctttggctttcattttttctatagaaatggagtaggttaatcacattgacaacccaggagggtttcttcttccctaggtattctctactgccgctgatggtcaaacgcaagtggaaattaaagtgtgtcagggtgaaagagagatggctggagacaacaaactccttggacagtttactttggtaggttattgtgaatcctgaatactatgcctccttcactgtaaagtgagataatattctaagccataaaaatattagtataaactgctggcatacacatacatactgagtagtcttgagaagaagggatgcaactagatacccatggcatcagtttttacctgaaagccttgctttttccttgtgccttaggaatttcctcagaaataaactcctgattactcatttaaaagacatttgatattgttactggtttctgatcagcattgcttattggttattggtgaggtgaataataggagatttgctatctgtcatttagtgtgtccacaggtacatacagccattatggttacttgctatagctaaacttcactggtataaaaccagttgatttcaggcagcgaactactactgttgcttataaactttgtgttttgtacattaaatcacttgtttctcccaggaaccaagtgacttgtttactagaaaaccatatagatt

SEQ ID NO: 113657 - DNA, 703 bp, Homo sapiens
  misc_feature (690)..(690): n is a, c, g, or t
  misc_feature (702)..(703): n is a, c, g, or t
cggctagtgcgaggctgggtgttgaatcggccgagggcccgcgctgccgccaccgcatcgcgcagctctttgccgtcggagcgcttgtttgctgcctcgtactcctccatttatccgccatgataagtgccagccgagctgcagcagcccgtctcgtgggcgccgcagcctcccggggccctacggccgcccgccaccaggatagctggaatggccttagtcatgaggcttttagacttgtttcaaggcgggattatgcatcagaagcaatcaagggagcagttgttggtattgatttgggtactaccaactcctgcgtggcagttatggaaggtaaacaagcaaaggtgctggagaatgccgaaggtgccagaaccaccccttcagttgtggcctttacagcagatggtgagcgacttgttggaatgccggccaagcgacaggctgtcaccaacccaaacaatacattttatgctaccaagcgtctcattggccggcgatatgatgatcctgaagtacagaaagacattaaaaatgttccctttaaaattgtccgtgcctccaatggtgatgcctgggttgaggctcatgggaaattgtattctccgagtcagattggagcatttgtgttgatgaagatgaaagagactgcagaaaattacttgggacacacagcaaaaaaaattgggnccccttttgggnn

SEQ ID NO: 113658 - DNA, 342 bp, Homo sapiens
tcctcctcctcttcagggttttcttttacttctatgtgaactgtgtttccttctactttttctgtctcctcatcactttcactgccttcactttctccctcctcttcctcctcttcttcactttcttcatcctcttcttcctcttcttcctcctcctcctcctcttcagggttttcttttattctatatataatttccttaatttgtaaatttagtgaccattagctagtgatcatttaatggacagtgattctaacagtataaagttcacaatattctatgtccctagcctgtcatttttcagctgcatgtaaaaggacagacgaccagcagagcacgccg

SEQ ID NO: 113659 - DNA, 2868 bp, Homo sapiens
gtgaccaacccccgcccctcaccccacgtggttggaggtttccagaagcgctgccgccaccgcatcgcgcagctctttgccgtcggagcgcttgtttgctgcctcgtactcctccatttatccgccatgataagtgccagccgagctgcagcagcccgtctcgtgggcgccgcagcctcccggggccctacggccgcccgccaccaggatagctggaatggccttagtcatgaggcttttagacttgtttcaaggcgggattatgcatcagaagcaatcaagggagcagttgttggtattgatttgggtactaccaactcctgcgtggcagttatggaaggtaaacaagcaaaggtgctggagaatgccgaaggtgccagaaccaccccttcagttgtggcctttacagcagatggtgagcgacttgttggaatgccggccaagcgacaggctgtcaccaacccaaacaatacattttatgctaccaagcgtctcattggccggcgatatgatgatcctgaagtacagaaagacattaaaaatgttccctttaaaattgtccgtgcctccaatggtgatgcctgggttgaggctcatgggaaattgtattctccgagtcagattggagcatttgtgttgatgaagatgaaagagactgcagaaaattacttggggcacacagcaaaaaatgctgtgatcacagtcccagcttatttcaatgactcgcagagacaggccactaaagatgctggccagatatctggactgaatgtgcttcgggtgattaatgagcccacagctgctgctcttgcctatggtctagacaaatcagaagacaaagtcattgctgtatatgatttaggtggtggaacttttgatatttctatcctggaaattcagaaaggagtatttgaggtgaaatccacaaatggggataccttcttaggtggggaagactttgaccaggccttgctacggcacattgtgaaggagttcaagagagagacaggggttgatttgactaaagacaacatggcacttcagagggtacgggaagctgctgaaaaggctaaatgtgaactctcctcatctgtgcagactgacatcaatttgccctatcttacaatggattcttctggacccaagcatttgaatatgaagttgacccgtgctcaatttgaagggattgtcactgatctaatcagaaggactatcgctccatgccaaaaagctatgcaagatgcagaagtcagcaagagtgacataggagaagtgattcttgtgggtggcatgactaggatgcccaaggttcagcagactgtacaggatctttttggcagagccccaagtaaagctgtcaatcctgatgaggctgtggccattggagctgccattcagggaggtgtgttggccggcgatgtcacggatgtgctgctccttgatgtcactcccctgtctctgggtattgaaactctaggaggtgtctttaccaaacttattaataggaataccactattccaaccaagaagagccaggtattctctactgccgctgatggtcaaacgcaagtggaaattaaagtgtgtcagggtgaaagagagatggctggagacaacaaactccttggacagtttactttgattggaattccaccagcccctcgtggagttcctcagattgaagttacatttgacattgatgccaatgggatagtacatgtttctgctaaagataaaggcacaggacgtgagcagcagattgtaatccagtcttctggtggattaagcaaagatgatattgaaaatatggttaaaaatgcagagaaatatgctgaagaagaccggcgaaagaaggaacgagttgaagcagttaatatggctgaaggaatcattcacgacacagaaaccaagatggaagaattcaaggaccaattacctgctgatgagtgcaacaagctgaaagaagagatttccaaaatgagggagctcctggctagaaaagacagcgaaacaggagaaaatattagacaggcagcatcctctcttcagcaggcatcactgaagctgttcgaaatggcatacaaaaagatggcatctgagcgagaaggctctggaagttctggcactggggaacaaaaggaagatcaaaaggaggaaaaacagtaataatagcagaaattttgaagccagaaggacaacatatgaagcttaggagtgaagagacttcctgagcagaaatgggcgaacttcagtctttttactgtgtttttgcagtattctatatataatttccttaatttgtaaatttagtgaccattagctagtgatcatttaatggacagtgattctaacagtataaagttcacaatattctatgtccctagcctgtcatttttcagctgcatgtaaaaggaggtaggatgaattgatcattataaagatttaactattttatgctgaagtgaccatattttcaaggggtgaaaccatctcgcacacagcaatgaaggtagtcatccatagacttgaaatgagaccacatatggggatgagatccttctagttagcctagtactgctgtactggcctgtatgtacatggggtccttcaactgaggccttgcaagtcaagctggctgtgccatgtttgtagatggggcagaggaatctagaacaatgggaaacttagctatttatattaggtacagctattaaaacaaggtaggaatgaggctagacctttaacttccctaaggcatacttttctagctaccttctgccctgtgtctggcacctacatccttgatgattgttctcttacccattctggaatttttttttttttaaataaatacagaaagcatcttga

SEQ ID NO: 113660 - DNA, 2865 bp, Homo sapiens
  misc_feature (13)..(13): n is a, c, g, or t
  misc_feature (16)..(16): n is a, c, g, or t
  misc_feature (43)..(43): n is a, c, g, or t
tctcttcagtacnccncggggtattgtagcgaggctgggtggnggcgctgccgccaccgcatcgcgcagctctttgccgtcggagcgcttgtttgctgcctcgtactcctccatttatccgccatgataagtgccagccgagctgcagcagcccgtctcgtgggcgccgcagcctcccggggccctacggccgcccgccaccaggatagctggaatggccttagtcatgaggcttttagacttgtttcaaggcgggattatgcatcagaagcaatcaagggagcagttgttggtattgatttgggtactaccaactcctgcgtggcagttatggaaggtaaacaagcaaaggtgctggagaatgccgaaggtgccagaaccaccccttcagttgtggcctttacagcagatggtgagcgacttgttggaatgccggccaagcgacaggctgtcaccaacccaaacaatacattttatgctaccaagcgtctcattggccggcgatatgatgatcctgaagtacagaaagacattaaaaatgttccctttaaaattgtccgtgcctccaatggtgatgcctgggttgaggctcatgggaaattgtattctccgagtcagattggagcatttgtgttgatgaagatgaaagagactgcagaaaattacttggggcacacagcaaaaaatgctgtgatcacagtcccagcttatttcaatgactcgcagagacaggccactaaagatgctggccagatatctggactgaatgtgcttcgggtgattaatgagcccacagctgctgctcttgcctatggtctagacaaatcagaagacaaagtcattgctgtatatgatttaggtggtggaacttttgatatttctatcctggaaattcagaaaggagtatttgaggtgaaatccacaaatggggataccttcttaggtggggaagactttgaccaggccttgctacggcacattgtgaaggagttcaagagagagacaggggttgatttgactaaagacaacatggcacttcagagggtacgggaagctgctgaaaaggctaaatgtgaactctcctcatctgtgcagactgacatcaatttgccctatcttacaatggattcttctggacccaagcatttgaatatgaagttgacccgtgctcaatttgaagggattgtcactgatctaatcagaaggactatcgctccatgccaaaaagctatgcaagatgcagaagtcagcaagagtgacataggagaagtgattcttgtgggtggcatgactaggatgcccaaggttcagcagactgtacaggatctttttggcagagccccaagtaaagctgtcaatcctgatgaggctgtggccattggagctgccattcagggaggtgtgttggccggcgatgtcacggatgtgctgctccttgatgtcactcccctgtctctgggtattgaaactctaggaggtgtctttaccaaacttattaataggaataccactattccaaccaagaagagccaggtattctctactgccgctgatggtcaaacgcaagtggaaattaaagtgtgtcagggtgaaagagagatggctggagacaacaaactccttggacagtttactttgattggaattccaccagcccctcgtggagttcctcagattgaagttacatttgacattgatgccaatgggatagtacatgtttctgctaaagataaaggcacaggacgtgagcagcagattgtaatccagtcttctggtggattaagcaaagatgatattgaaaatatggttaaaaatgcagagaaatatgctgaagaagaccggcgaaagaaggaacgagttgaagcagttaatatggctgaaggaatcattcacgacacagaaaccaagatggaagaattcaaggaccaattacctgctgatgagtgcaacaagctgaaagaagagatttccaaaatgagggagctcctggctagaaaagacagcgaaacaggagaaaatattagacaggcagcatcctctcttcagcaggcatcactgaagctgttcgaaatggcatacaaaaagatggcatctgagcgagaaggctctggaagttctggcactggggaacaaaaggaagatcaaaaggaggaaaaacagtaataatagcagaaattttgaagccagaaggacaacatatgaagcttaggagtgaagagacttcctgagcagaaatgggcgaacttcagtctttttactgtgtttttgcagtattctatatataatttccttaatttgtaaatttagtgaccattagctagtgatcatttaatggacagtgattctaacagtataaagttcacaatattctatgtccctagcctgtcatttttcagctgcatgtaaaaggaggtaggatgaattgatcattataaagatttaactattttatgctgaagtgaccatattttcaaggggtgaaaccatctcgcacacagcaatgaaggtagtcatccatagacttgaaatgagaccacatatggggatgagatccttctagttagcctagtactgctgtactggcctgtatgtacatggggtccttcaactgaggccttgcaagtcaagctggctgtgccatgtttgtagatggggcagaggaatctagaacaatgggaaacttagctatttatattaggtacagctattaaaacaaggtaggaatgaggctagacctttaacttccctaaggcatacttttctagctaccttctgccctgtgtctggcacctacatccttgatgattgttctcttacccattctggaatttttttttttttaaataaatacagaaagcatcttga

SEQ ID NO: 113661 - DNA, 2858 bp, Homo sapiens
taggggtcaggtacgaggcgggtgttgatcggccgaggcgctgccgccaccgcatcgcgcagctctttgccgtcggagcgcttgtttgctgcctcgtactcctccatttatccgccatgataagtgccagccgagctgcagcagcccgtctcgtgggcgccgcagcctcccggggccctacggccgcccgccaccaggatagctggaatggccttagtcatgaggcttttagacttgtttcaaggcgggattatgcatcagaagcaatcaagggagcagttgttggtattgatttgggtactaccaactcctgcgtggcagttatggaaggtaaacaagcaaaggtgctggagaatgccgaaggtgccagaaccaccccttcagttgtggcctttacagcagatggtgagcgacttgttggaatgccggccaagcgacaggctgtcaccaacccaaacaatacattttatgctaccaagcgtctcattggccggcgatatgatgatcctgaagtacagaaagacattaaaaatgttccctttaaaattgtccgtgcctccaatggtgatgcctgggttgaggctcatgggaaattgtattctccgagtcagattggagcatttgtgttgatgaagatgaaagagactgcagaaaattacttggggcacacagcaaaaaatgctgtgatcacagtcccagcttatttcaatgactcgcagagacaggccactaaagatgctggccagatatctggactgaatgtgcttcgggtgattaatgagcccacagctgctgctcttgcctatggtctagacaaatcagaagacaaagtcattgctgtatatgatttaggtggtggaacttttgatatttctatcctggaaattcagaaaggagtatttgaggtgaaatccacaaatggggataccttcttaggtggggaagactttgaccaggccttgctacggcacattgtgaaggagttcaagagagagacaggggttgatttgactaaagacaacatggcacttcagagggtacgggaagctgctgaaaaggctaaatgtgaactctcctcatctgtgcagactgacatcaatttgccctatcttacaatggattcttctggacccaagcatttgaatatgaagttgacccgtgctcaatttgaagggattgtcactgatctaatcagaaggactatcgctccatgccaaaaagctatgcaagatgcagaagtcagcaagagtgacataggagaagtgattcttgtgggtggcatgactaggatgcccaaggttcagcagactgtacaggatctttttggcagagccccaagtaaagctgtcaatcctgatgaggctgtggccattggagctgccattcagggaggtgtgttggccggcgatgtcacggatgtgctgctccttgatgtcactcccctgtctctgggtattgaaactctaggaggtgtctttaccaaacttattaataggaataccactattccaaccaagaagagccaggtattctctactgccgctgatggtcaaacgcaagtggaaattaaagtgtgtcagggtgaaagagagatggctggagacaacaaactccttggacagtttactttgattggaattccaccagcccctcgtggagttcctcagattgaagttacatttgacattgatgccaatgggatagtacatgtttctgctaaagataaaggcacaggacgtgagcagcagattgtaatccagtcttctggtggattaagcaaagatgatattgaaaatatggttaaaaatgcagagaaatatgctgaagaagaccggcgaaagaaggaacgagttgaagcagttaatatggctgaaggaatcattcacgacacagaaaccaagatggaagaattcaaggaccaattacctgctgatgagtgcaacaagctgaaagaagagatttccaaaatgagggagctcctggctagaaaagacagcgaaacaggagaaaatattagacaggcagcatcctctcttcagcaggcatcactgaagctgttcgaaatggcatacaaaaagatggcatctgagcgagaaggctctggaagttctggcactggggaacaaaaggaagatcaaaaggaggaaaaacagtaataatagcagaaattttgaagccagaaggacaacatatgaagcttaggagtgaagagacttcctgagcagaaatgggcgaacttcagtctttttactgtgtttttgcagtattctatatataatttccttaatttgtaaatttagtgaccattagctagtgatcatttaatggacagtgattctaacagtataaagttcacaatattctatgtccctagcctgtcatttttcagctgcatgtaaaaggaggtaggatgaattgatcattataaagatttaactattttatgctgaagtgaccatattttcaaggggtgaaaccatctcgcacacagcaatgaaggtagtcatccatagacttgaaatgagaccacatatggggatgagatccttctagttagcctagtactgctgtactggcctgtatgtacatggggtccttcaactgaggccttgcaagtcaagctggctgtgccatgtttgtagatggggcagaggaatctagaacaatgggaaacttagctatttatattaggtacagctattaaaacaaggtaggaatgaggctagacctttaacttccctaaggcatacttttctagctaccttctgccctgtgtctggcacctacatccttgatgattgttctcttacccattctggaatttttttttttttaaataaatacagaaagcatcttga

SEQ ID NO: 113662 - DNA, 2861 bp, Homo sapiens
cggctagtgcgaggctgggtgttgaatcggccgagggcccgcgctgccgccaccgcatcgcgcagctctttgccgtcggagcgcttgtttgctgcctcgtactcctccatttatccgccatgataagtgccagccgagctgcagcagcccgtctcgtgggcgccgcagcctcccggggccctacggccgcccgccaccaggatagctggaatggccttagtcatgaggcttttagacttgtttcaaggcgggattatgcatcagaagcaatcaagggagcagttgttggtattgatttgggtactaccaactcctgcgtggcagttatggaaggtaaacaagcaaaggtgctggagaatgccgaaggtgccagaaccaccccttcagttgtggcctttacagcagatggtgagcgacttgttggaatgccggccaagcgacaggctgtcaccaacccaaacaatacattttatgctaccaagcgtctcattggccggcgatatgatgatcctgaagtacagaaagacattaaaaatgttccctttaaaattgtccgtgcctccaatggtgatgcctgggttgaggctcatgggaaattgtattctccgagtcagattggagcatttgtgttgatgaagatgaaagagactgcagaaaattacttggggcacacagcaaaaaatgctgtgatcacagtcccagcttatttcaatgactcgcagagacaggccactaaagatgctggccagatatctggactgaatgtgcttcgggtgattaatgagcccacagctgctgctcttgcctatggtctagacaaatcagaagacaaagtcattgctgtatatgatttaggtggtggaacttttgatatttctatcctggaaattcagaaaggagtatttgaggtgaaatccacaaatggggataccttcttaggtggggaagactttgaccaggccttgctacggcacattgtgaaggagttcaagagagagacaggggttgatttgactaaagacaacatggcacttcagagggtacgggaagctgctgaaaaggctaaatgtgaactctcctcatctgtgcagactgacatcaatttgccctatcttacaatggattcttctggacccaagcatttgaatatgaagttgacccgtgctcaatttgaagggattgtcactgatctaatcagaaggactatcgctccatgccaaaaagctatgcaagatgcagaagtcagcaagagtgacataggagaagtgattcttgtgggtggcatgactaggatgcccaaggttcagcagactgtacaggatctttttggcagagccccaagtaaagctgtcaatcctgatgaggctgtggccattggagctgccattcagggaggtgtgttggccggcgatgtcacggatgtgctgctccttgatgtcactcccctgtctctgggtattgaaactctaggaggtgtctttaccaaacttattaataggaataccactattccaaccaagaagagccaggtattctctactgccgctgatggtcaaacgcaagtggaaattaaagtgtgtcagggtgaaagagagatggctggagacaacaaactccttggacagtttactttgattggaattccaccagcccctcgtggagttcctcagattgaagttacatttgacattgatgccaatgggatagtacatgtttctgctaaagataaaggcacaggacgtgagcagcagattgtaatccagtcttctggtggattaagcaaagatgatattgaaaatatggttaaaaatgcagagaaatatgctgaagaagaccggcgaaagaaggaacgagttgaagcagttaatatggctgaaggaatcattcacgacacagaaaccaagatggaagaattcaaggaccaattacctgctgatgagtgcaacaagctgaaagaagagatttccaaaatgagggagctcctggctagaaaagacagcgaaacaggagaaaatattagacaggcagcatcctctcttcagcaggcatcactgaagctgttcgaaatggcatacaaaaagatggcatctgagcgagaaggctctggaagttctggcactggggaacaaaaggaagatcaaaaggaggaaaaacagtaataatagcagaaattttgaagccagaaggacaacatatgaagcttaggagtgaagagacttcctgagcagaaatgggcgaacttcagtctttttactgtgtttttgcagtattctatatataatttccttaatttgtaaatttagtgaccattagctagtgatcatttaatggacagtgattctaacagtataaagttcacaatattctatgtccctagcctgtcatttttcagctgcatgtaaaaggaggtaggatgaattgatcattataaagatttaactattttatgctgaagtgaccatattttcaaggggtgaaaccatctcgcacacagcaatgaaggtagtcatccatagacttgaaatgagaccacatatggggatgagatccttctagttagcctagtactgctgtactggcctgtatgtacatggggtccttcaactgaggccttgcaagtcaagctggctgtgccatgtttgtagatggggcagaggaatctagaacaatgggaaacttagctatttatattaggtacagctattaaaacaaggtaggaatgaggctagacctttaacttccctaaggcatacttttctagctaccttctgccctgtgtctggcacctacatccttgatgattgttctcttacccattctggaatttttttttttttaaataaatacagaaagcatcttga

SEQ ID NO: 113663 - DNA, 3412 bp, Homo sapiens
gtgaccaacccccgcccctcaccccacgtggttggaggtttccagaagcgctgccgccaccgcatcgcgcagctctttgccgtcggagcgcttgtttgctgcctcgtactcctccatttatccgccatgataagtgccagccgagctgcagcagcccgtctcgtgggcgccgcagcctcccggggccctacggccgcccgccaccaggatagctggaatggccttagtcatgaggcttttagacttgtttcaaggcgggattatgcatcagaagcaatcaagggagcagttgttggtattgatttgggtactaccaactcctgcgtggcagttatggaaggtaaacaagcaaaggtgctggagaatgccgaaggtgccagaaccaccccttcagttgtggcctttacagcagatggtgagcgacttgttggaatgccggccaagcgacaggctgtcaccaacccaaacaatacattttatgctaccaagcgtctcattggccggcgatatgatgatcctgaagtacagaaagacattaaaaatgttccctttaaaattgtccgtgcctccaatggtgatgcctgggttgaggctcatgggaaattgtattctccgagtcagattggagcatttgtgttgatgaagatgaaagagactgcagaaaattacttggggcacacagcaaaaaatgctgtgatcacagtcccagcttatttcaatgactcgcagagacaggccactaaagatgctggccagatatctggactgaatgtgcttcgggtgattaatgagcccacagctgctgctcttgcctatggtctagacaaatcagaagacaaagtcattgctgtatatgatttaggtggtggaacttttgatatttctatcctggaaattcagaaaggagtatttgaggtgaaatccacaaatggggataccttcttaggtggggaagactttgaccaggccttgctacggcacattgtgaaggagttcaagagagagacaggggttgatttgactaaagacaacatggcacttcagagggtacgggaagctgctgaaaaggctaaatgtgaactctcctcatctgtgcagactgacatcaatttgccctatcttacaatggattcttctggacccaagcatttgaatatgaagttgacccgtgctcaatttgaagggattgtcactgatctaatcagaaggactatcgctccatgccaaaaagctatgcaagatgcagaagtcagcaagagtgacataggagaagtgattcttgtgggtggcatgactaggatgcccaaggttcagcagactgtacaggatctttttggcagagccccaagtaaagctgtcaatcctgatgaggctgtggccattggagctgccattcagggaggtgtgttggccggcgatgtcacggatgtgctgctccttgatgtcactcccctgtctctgggtattgaaactctaggaggtgtctttaccaaacttattaataggaataccactattccaaccaagaagagccaggtattctctactgccgctgatggtcaaacgcaagtggaaattaaagtgtgtcagggtgaaagagagatggctggagacaacaaactccttggacagtttactttgattggaattccaccagcccctcgtggagttcctcagattgaagttacatttgacattgatgccaatgggatagtacatgtttctgctaaagataaaggcacaggacgtgagcagcagattgtaatccagtcttctggtggattaagcaaagatgatattgaaaatatggttaaaaatgcagagaaatatgctgaagaagaccggcgaaagaaggaacgagttgaagcagttaatatggctgaaggaatcattcacgacacagaaaccaagatggaagaattcaaggaccaattacctgctgatgagtgcaacaagctgaaagaagagatttccaaaatgagggagctcctggctagaaaagacagcgaaacaggagaaaatattagacaggcagcatcctctcttcagcaggcatcactgaagctgttcgaaatggcatacaaaaagatggcatctgagcgagaaggctctggaagttctggcactggggaacaaaaggaagatcaaaaggaggaaaaacagtaataatagcagaaattttgaagccagaaggacaacatatgaagcttaggagtgaagagacttcctgagcagaaatgggcgaacttcagtctttttactgtgtttttgcagtattctatatataatttccttaatttgtaaatttagtgaccattagctagtgatcatttaatggacagtgattctaacagtataaagttcacaatattctatgtccctagcctgtcatttttcagctgcatgtaaaaggaggtaggatgaattgatcattataaagatttaactattttatgctgaagtgaccatattttcaaggggtgaaaccatctcgcacacagcaatgaaggtagtcatccatagacttgaaatgagaccacatatggggatgagatccttctagttagcctagtactgctgtactggcctgtatgtacatggggtccttcaactgaggccttgcaagtcaagctggctgtgccatgtttgtagatggggcagaggaatctagaacaatgggaaacttagctatttatattaggtacagctattaaaacaaggtaggaatgaggctagacctttaacttccctaaggcatacttttctagctaccttctgccctgtgtctggcacctacatccttgatgattgttctcttacccattctggaatttttttttttttaaataaatacagaaagcatcttgaaaaaaaaaaaaaaaaaaaaaaaaaaaaaaaaaaaaaaaaaaaaaaaaaaaaaaaaaaaaaagaacaaagaaaaagaagaaaacaaaaacaacaaagaaaaaaaaagaaacaacaggaaccaccagaacatgaaaaaataatgagagaaccaagatataagcgcgacaatcaagcacgagccaataaagaaagacacacaactaagacagtgtaaggaacgagtagcaggtcagccaaaggggacaagcaaaaagagagagaaatactaagaacggggctagcggagcacacatggagaagagacaacaggtaatgacacacgacgcgagcacacagaaatgagaaagaaaaagcagacgggggtccgacgacgcccagcaaaccaaggaccagcagaggaagagctgggagaagcaaatatcgacacaggggcaaagagcacacagagacgaggaacggatcgaagaaagagaaaaacataagaacgcggagacacagcgaacagagaagcaacacatcgagagagacaaagaaacgaaagcaa

SEQ ID NO: 113664 - DNA, 3321 bp, Homo sapiens
gtgaccaacccccgcccctcaccccacgtggttggaggtttccagaagcgctgccgccaccgcatcgcgcagctctttgccgtcggagcgcttgtttgctgcctcgtactcctccatttatccgccatgataagtgccagccgagctgcagcagcccgtctcgtgggcgccgcagcctcccggggccctacggccgcccgccaccaggatagctggaatggccttagtcatgaggcttttagacttgtttcaaggcgggattatgcatcagaagcaatcaagggagcagttgttggtattgatttgggtactaccaactcctgcgtggcagttatggaaggtaaacaagcaaaggtgctggagaatgccgaaggtgccagaaccaccccttcagttgtggcctttacagcagatggtgagcgacttgttggaatgccggccaagcgacaggctgtcaccaacccaaacaatacattttatgctaccaagcgtctcattggccggcgatatgatgatcctgaagtacagaaagacattaaaaatgttccctttaaaattgtccgtgcctccaatggtgatgcctgggttgaggctcatgggaaattgtattctccgagtcagattggagcatttgtgttgatgaagatgaaagagactgcagaaaattacttggggcacacagcaaaaaatgctgtgatcacagtcccagcttatttcaatgactcgcagagacaggccactaaagatgctggccagatatctggactgaatgtgcttcgggtgattaatgagcccacagctgctgctcttgcctatggtctagacaaatcagaagacaaagtcattgctgtatatgatttaggtggtggaacttttgatatttctatcctggaaattcagaaaggagtatttgaggtgaaatccacaaatggggataccttcttaggtggggaagactttgaccaggccttgctacggcacattgtgaaggagttcaagagagagacaggggttgatttgactaaagacaacatggcacttcagagggtacgggaagctgctgaaaaggctaaatgtgaactctcctcatctgtgcagactgacatcaatttgccctatcttacaatggattcttctggacccaagcatttgaatatgaagttgacccgtgctcaatttgaagggattgtcactgatctaatcagaaggactatcgctccatgccaaaaagctatgcaagatgcagaagtcagcaagagtgacataggagaagtgattcttgtgggtggcatgactaggatgcccaaggttcagcagactgtacaggatctttttggcagagccccaagtaaagctgtcaatcctgatgaggctgtggccattggagctgccattcagggaggtgtgttggccggcgatgtcacggatgtgctgctccttgatgtcactcccctgtctctgggtattgaaactctaggaggtgtctttaccaaacttattaataggaataccactattccaaccaagaagagccaggtattctctactgccgctgatggtcaaacgcaagtggaaattaaagtgtgtcagggtgaaagagagatggctggagacaacaaactccttggacagtttactttgattggaattccaccagcccctcgtggagttcctcagattgaagttacatttgacattgatgccaatgggatagtacatgtttctgctaaagataaaggcacaggacgtgagcagcagattgtaatccagtcttctggtggattaagcaaagatgatattgaaaatatggttaaaaatgcagagaaatatgctgaagaagaccggcgaaagaaggaacgagttgaagcagttaatatggctgaaggaatcattcacgacacagaaaccaagatggaagaattcaaggaccaattacctgctgatgagtgcaacaagctgaaagaagagatttccaaaatgagggagctcctggctagaaaagacagcgaaacaggagaaaatattagacaggcagcatcctctcttcagcaggcatcactgaagctgttcgaaatggcatacaaaaagatggcatctgagcgagaaggctctggaagttctggcactggggaacaaaaggaagatcaaaaggaggaaaaacagtaataatagcagaaattttgaagccagaaggacaacatatgaagcttaggagtgaagagacttcctgagcagaaatgggcgaacttcagtctttttactgtgtttttgcagtattctatatataatttccttaatttgtaaatttagtgaccattagctagtgatcatttaatggacagtgattctaacagtataaagttcacaatattctatgtccctagcctgtcatttttcagctgcatgtaaaaggaggtaggatgaattgatcattataaagatttaactattttatgctgaagtgaccatattttcaaggggtgaaaccatctcgcacacagcaatgaaggtagtcatccatagacttgaaatgagaccacatatggggatgagatccttctagttagcctagtactgctgtactggcctgtatgtacatggggtccttcaactgaggccttgcaagtcaagctggctgtgccatgtttgtagatggggcagaggaatctagaacaatgggaaacttagctatttatattaggtacagctattaaaacaaggtaggaatgaggctagacctttaacttccctaaggcatacttttctagctaccttctgccctgtgtctggcacctacatccttgatgattgttctcttacccattctggaatttttttttttttaaataaatacagaaagcatcttgatctcttgtttgtgaggggtgatgccctgagatttagcttcaagaatatgccatggctcatgcttcccatatttcccaaagagggaaatacaggatttgctaacactggttaaaaatgcaaattcaagatttggaagggctgttataatgaaataatgagcagtatcagcatgtgcaaatcttgtttgaaggattttattttctccccttagacctttggtacatttagaatcttgaaagtttctagatctctaacatgaaagtttctagatctctaacatgaaagtttttagatctctaacatgaaaaccaaggtggctattttcaggttgctttcagctccaagtagaaataaccagaattggcttacattaaagaaactgcatctagaaataagtcctaagatactatttctatggctcaaaaataaaaggaacccagatttctttcccta

SEQ ID NO: 113665 - DNA, 4428 bp, Homo sapiens
gtgaccaacccccgcccctcaccccacgtggttggaggtttccagaagcgctgccgccaccgcatcgcgcagctctttgccgtcggagcgcttgtttgctgcctcgtactcctccatttatccgccatgataagtgccagccgagctgcagcagcccgtctcgtgggcgccgcagcctcccggggccctacggccgcccgccaccaggatagctggaatggccttagtcatgaggcttttagacttgtttcaaggcgggattatgcatcagaagcaatcaagggagcagttgttggtattgatttgggtactaccaactcctgcgtggcagttatggaaggtaaacaagcaaaggtgctggagaatgccgaaggtgccagaaccaccccttcagttgtggcctttacagcagatggtgagcgacttgttggaatgccggccaagcgacaggctgtcaccaacccaaacaatacattttatgctaccaagcgtctcattggccggcgatatgatgatcctgaagtacagaaagacattaaaaatgttccctttaaaattgtccgtgcctccaatggtgatgcctgggttgaggctcatgggaaattgtattctccgagtcagattggagcatttgtgttgatgaagatgaaagagactgcagaaaattacttggggcacacagcaaaaaatgctgtgatcacagtcccagcttatttcaatgactcgcagagacaggccactaaagatgctggccagatatctggactgaatgtgcttcgggtgattaatgagcccacagctgctgctcttgcctatggtctagacaaatcagaagacaaagtcattgctgtatatgatttaggtggtggaacttttgatatttctatcctggaaattcagaaaggagtatttgaggtgaaatccacaaatggggataccttcttaggtggggaagactttgaccaggccttgctacggcacattgtgaaggagttcaagagagagacaggggttgatttgactaaagacaacatggcacttcagagggtacgggaagctgctgaaaaggctaaatgtgaactctcctcatctgtgcagactgacatcaatttgccctatcttacaatggattcttctggacccaagcatttgaatatgaagttgacccgtgctcaatttgaagggattgtcactgatctaatcagaaggactatcgctccatgccaaaaagctatgcaagatgcagaagtcagcaagagtgacataggagaagtgattcttgtgggtggcatgactaggatgcccaaggttcagcagactgtacaggatctttttggcagagccccaagtaaagctgtcaatcctgatgaggctgtggccattggagctgccattcagggaggtgtgttggccggcgatgtcacggatgtgctgctccttgatgtcactcccctgtctctgggtattgaaactctaggaggtgtctttaccaaacttattaataggaataccactattccaaccaagaagagccaggtattctctactgccgctgatggtcaaacgcaagtggaaattaaagtgtgtcagggtgaaagagagatggctggagacaacaaactccttggacagtttactttgattggaattccaccagcccctcgtggagttcctcagattgaagttacatttgacattgatgccaatgggatagtacatgtttctgctaaagataaaggcacaggacgtgagcagcagattgtaatccagtcttctggtggattaagcaaagatgatattgaaaatatggttaaaaatgcagagaaatatgctgaagaagaccggcgaaagaaggaacgagttgaagcagttaatatggctgaaggaatcattcacgacacagaaaccaagatggaagaattcaaggaccaattacctgctgatgagtgcaacaagctgaaagaagagatttccaaaatgagggagctcctggctagaaaagacagcgaaacaggagaaaatattagacaggcagcatcctctcttcagcaggcatcactgaagctgttcgaaatggcatacaaaaagatggcatctgagcgagaaggctctggaagttctggcactggggaacaaaaggaagatcaaaaggaggaaaaacagtaataatagcagaaattttgaagccagaaggacaacatatgaagcttaggagtgaagagacttcctgagcagaaatgggcgaacttcagtctttttactgtgtttttgcagtattctatatataatttccttaatttgtaaatttagtgaccattagctagtgatcatttaatggacagtgattctaacagtataaagttcacaatattctatgtccctagcctgtcatttttcagctgcatgtaaaaggaggtaggatgaattgatcattataaagatttaactattttatgctgaagtgaccatattttcaaggggtgaaaccatctcgcacacagcaatgaaggtagtcatccatagacttgaaatgagaccacatatggggatgagatccttctagttagcctagtactgctgtactggcctgtatgtacatggggtccttcaactgaggccttgcaagtcaagctggctgtgccatgtttgtagatggggcagaggaatctagaacaatgggaaacttagctatttatattaggtacagctattaaaacaaggtaggaatgaggctagacctttaacttccctaaggcatacttttctagctaccttctgccctgtgtctggcacctacatccttgatgattgttctcttacccattctggaatttttttttttttaaataaatacagaaagcatcttgatctcttgtttgtgaggggtgatgccctgagatttagcttcaagaatatgccatggctcatgcttcccatatttcccaaagagggaaatacaggatttgctaacactggttaaaaatgcaaattcaagatttggaagggctgttataatgaaataatgagcagtatcagcatgtgcaaatcttgtttgaaggattttattttctccccttagacctttggtacatttagaatcttgaaatttctagatctctaacatgaaagtttttagatctctaacatgaaaaccaaggtggctattttcaggttgctttcagctccaagtagaaataaccagaattggcttacattaaagaaactgcatctagaaataagtcctaagatactatttctatggctcaaaaataaaaggaacccagatttctttccctatttctgcttttctgtcctcagtgtactggcttgtcccaaattctctgatgtagttctaataattatcatgtgctgacaacctgagcagaaaggcaactacatctttattcaatgttaagatttcccaaaagtcttccagcacatttcccttatgtttcatggatgaatgtcatatgccatgttcaaaagagtctgttatcaagatgggcttagaatatcagacacaatggctccttttataatgttttgtaatatgtagaaatgagattactgtatttccaaaaatcagtataagaaatcaatttaatttgcaagtatgaaggaagtgatttagacaacatttttggaagattcagtgcttgttaacacccatgtaaaagattcttgggattcgtgaaaaattctaggctcaggtttccaaccacatgaacactcaatgggaacattgtaggattatgaaggattgttatatggtgtgttggaaaataacttttagcatttttggttggcccttgcccactgcctctactgtctcctaaagataactttaaaagccctccaggatttccaaagtactccagttgagaactactggcttaatgctagtcaagattcatccttgggatcagagagaggagccaaatgcccaagcaaaatatatatttgagttctattaggagggagaagttgcttgggtatgggtggacacagtatttcagtcacctatcagtaaagctaatagcataaatagcaagaaggtatatggagatttcctacagccaataggatatatatctagaataagatttactgtaagaaagaaactggctcacaattatggaaccgaggtcccacccacagtccactgctgggaaagctgttggggtaaaatttcagtgaccaggaacacagtggtgtcctagtccgaggttagaagaatatggatgtcttagctctggcagttctatataggcccttaactgattagatgatgtccactcacatcaaagcagagcaatctccaattcaatactaatctcttctggagagagacaaatgtttaacccgttaaatggcatcaatggctaaactgacacataaaattaactatcacaaaaggcaaaaagaaat

SEQ ID NO: 113666 - DNA, 3708 bp, Homo sapiens
  misc_feature (1697)..(1697): n is a, c, g, or t
gtgaccaacccccgcccctcaccccacgtggttggaggtttccagaagcgctgccgccaccgcatcgcgcagctctttgccgtcggagcgcttgtttgctgcctcgtactcctccatttatccgccatgataagtgccagccgagctgcagcagcccgtctcgtgggcgccgcagcctcccggggccctacggccgcccgccaccaggatagctggaatggccttagtcatgaggcttttagacttgtttcaaggcgggattatgcatcagaagcaatcaagggagcagttgttggtattgatttgggtactaccaactcctgcgtggcagttatggaaggtaaacaagcaaaggtgctggagaatgccgaaggtgccagaaccaccccttcagttgtggcctttacagcagatggtgagcgacttgttggaatgccggccaagcgacaggctgtcaccaacccaaacaatacattttatgctaccaagcgtctcattggccggcgatatgatgatcctgaagtacagaaagacattaaaaatgttccctttaaaattgtccgtgcctccaatggtgatgcctgggttgaggctcatgggaaattgtattctccgagtcagattggagcatttgtgttgatgaagatgaaagagactgcagaaaattacttggggcacacagcaaaaaatgctgtgatcacagtcccagcttatttcaatgactcgcagagacaggccactaaagatgctggccagatatctggactgaatgtgcttcgggtgattaatgagcccacagctgctgctcttgcctatggtctagacaaatcagaagacaaagtcattgctgtatatgatttaggtggtggaacttttgatatttctatcctggaaattcagaaaggagtatttgaggtgaaatccacaaatggggataccttcttaggtggggaagactttgaccaggccttgctacggcacattgtgaaggagttcaagagagagacaggggttgatttgactaaagacaacatggcacttcagagggtacgggaagctgctgaaaaggctaaatgtgaactctcctcatctgtgcagactgacatcaatttgccctatcttacaatggattcttctggacccaagcatttgaatatgaagttgacccgtgctcaatttgaagggattgtcactgatctaatcagaaggactatcgctccatgccaaaaagctatgcaagatgcagaagtcagcaagagtgacataggagaagtgattcttgtgggtggcatgactaggatgcccaaggaaatatgcaaaaaaaaaaaaaaatgaacctggaaaaaaaaggtcctggaccaggtggatgcctcatatattaagaaatccccgaggccgggtacagtggcttacgcctgtaatcccagcactttgggaggccaaggcgggcggatcacgaggtcaagagatcgagaccatcctggctaacacggtgaaaccctgtctctactaaaaatataaaaaatttggtgggcgcctgtagtcccagctacttgggaggctgaggtaggagaatggcgtgaacgcaggaggtggagcttgcggtgagtggagattgcgccaccgcactccagcctgagcgacacagcgagactccgtctcaaaaaaaaaaaaagaagaagaaaaagtatccccgntactattcaaatggaactttatcactaataaacacaagggaagaccatgccccatgttagcaatgcaaattattgctacagctgcctatgataatttggtctttagttgataatatacaagagaatgtggacttctaagtccccttgccttgcatcctctgtttcaaatgatttaatgtgttgtgtaggaaagcagataataaaacttaggagaatccttcccagatttacaagggtcatgaaggagatacttctataggtataaagtgtatgagtgttagaagatcattagcaggaacccaagtacgaaatggttatttgaataaacattctcagatttgagttagcctgtcttgagatctggctgggagcgtaggacacgtgctcccttttgttctgctcaggtagttcccaagtgtgggccgacaggttctttttccttgatgttcaggttcagcagactgtacaggatctttttggcagagccccaagtaaagctgtcaatcctgatgaggctgtggccattggagctgccattcagggaggtgtgttggccggcgatgtcacggatgtgctgctccttgatgtcactcccctgtctctgggtattgaaactctaggaggtgtctttaccaaacttattaataggaataccactattccaaccaagaagagccaggtattctctactgccgctgatggtcaaacgcaagtggaaattaaagtgtgtcagggtgaaagagagatggctggagacaacaaactccttggacagtttactttgattggaattccaccagcccctcgtggagttcctcagattgaagttacatttgacattgatgccaatgggatagtacatgtttctgctaaagataaaggcacaggacgtgagcagcagattgtaatccagtcttctggtggattaagcaaagatgatattgaaaatatggttaaaaatgcagagaaatatgctgaagaagaccggcgaaagaaggaacgagttgaagcagttaatatggctgaaggaatcattcacgacacagaaaccaagatggaagaattcaaggaccaattacctgctgatgagtgcaacaagctgaaagaagagatttccaaaatgagggagctcctggctagaaaagacagcgaaacaggagaaaatattagacaggcagcatcctctcttcagcaggcatcactgaagctgttcgaaatggcatacaaaaagatggcatctgagcgagaaggctctggaagttctggcactggggaacaaaaggaagatcaaaaggaggaaaaacagtaataatagcagaaattttgaagccagaaggacaacatatgaagcttaggagtgaagagacttcctgagcagaaatgggcgaacttcagtctttttactgtgtttttgcagtattctatatataatttccttaatttgtaaatttagtgaccattagctagtgatcatttaatggacagtgattctaacagtataaagttcacaatattctatgtccctagcctgtcatttttcagctgcatgtaaaaggaggtaggatgaattgatcattataaagatttaactattttatgctgaagtgaccatattttcaaggggtgaaaccatctcgcacacagcaatgaaggtagtcatccatagacttgaaatgagaccacatatggggatgagatccttctagttagcctagtactgctgtactggcctgtatgtacatggggtccttcaactgaggccttgcaagtcaagctggctgtgccatgtttgtagatggggcagaggaatctagaacaatgggaaacttagctatttatattaggtacagctattaaaacaaggtaggaatgaggctagacctttaacttccctaaggcatacttttctagctaccttctgccctgtgtctggcacctacatccttgatgattgttctcttacccattctggaatttttttttttttaaataaatacagaaagcatcttga

SEQ ID NO: 113667 - DNA, 2792 bp, Homo sapiens
gtgaccaacccccgcccctcaccccacgtggttggaggtttccagaagcgctgccgccaccgcatcgcgcagctctttgccgtcggagcgcttgtttgctgcctcgtactcctccatttatccgccatgataagtgccagccgagctgcagcagcccgtctcgtgggcgccgcagcctcccggggccctacggccgcccgccaccaggatagctggaatggccttagtcatgaggcttttagacttgtttcaaggcgggattatgcatcagaagcaatcaagggagcagttgttggtattgatttgggtactaccaactcctgcgtggcagttatggaaggtaaacaagcaaaggtgctggagaatgccgaaggtgccagaaccaccccttcagttgtggcctttacagcagatggtgagcgacttgttggaatgccggccaagcgacaggctgtcaccaacccaaacaatacattttatgctaccaagcgtctcattggccggcgatatgatgatcctgaagtacagaaagacattaaaaatgttccctttaaaattgtccgtgcctccaatggtgatgcctgggttgaggctcatgggaaattgtattctccgagtcagattggagcatttgtgttgatgaagatgaaagagactgcagaaaattacttggggcacacagcaaaaaatgctgtgatcacagtcccagcttatttcaatgactcgcagagacaggccactaaagatgctggccagatatctggactgaatgtgcttcgggtgattaatgagcccacagctgctgctcttgcctatggtctagacaaatcagaagacaaagtcattgctgtatatgatttaggtggtggaacttttgatatttctatcctggaaattcagaaaggagtatttgaggtgaaatccacaaatggggataccttcttaggtggggaagactttgaccaggccttgctacggcacattgtgaaggagttcaagagagagacaggggttgatttgactaaagacaacatggcacttcagagggtacgggaagctgctgaaaaggctaaatgtgaactctcctcatctgtgcagactgacatcaatttgccctatcttacaatggattcttctggacccaagcatttgaatatgaagttgacccgtgctcaatttgaagggattgtcactgatctaatcagaaggactatcgctccatgccaaaaagctatgcaagatgcagaagtcagcaagagtgacataggagaagtgattcttgtgggtggcatgactaggatgcccaaggttcagcagactgtacaggatctttttggcagagccccaagtaaagctgtcaatcctgatgaggctgtggccattggagctgccattcagggaggtgtgttggccggcgatgtcacggatgtgctgctccttgatgtcactcccctgtctctgggtattgaaactctaggaggtgtctttaccaaacttattaataggaataccactattccaaccaagaagagccaggtattctctactgccgctgatggtcaaacgcaagtggaaattaaagtgtgtcagggtgaaagagagatggctggagacaacaaactccttggacagtttactttgattggaattccaccagcccctcgtggagttcctcagattgaagttacatttgacattgatgccaatgggatagtacatgtttctgctaaagataaaggcacaggacgtgagcagcagattgtaatccagtcttctggtggattaagcaaagatgatattgaaaatatggttaaaaatgcagagaaatatgctgaagaagaccggcgaaagaaggaacgagttgaagcagttaatatggctgaaggaatcattcacgacacagaaaccaagatggaagaattcaaggaccaattacctgctgatgagtgcaacaagctgaaagaagagatttccaaaatgagggagctcctggctagaaaagacagcgaaacaggagaaaatattagacaggcagcatcctctcttcagcaggcatcactgaagctgttcgaaatggcatacaaaaagatggcatctgagcgagaaggctctggaagttctggcactggggaacaaaaggaagatcaaaaggaggaaaaacagtaataatagcagaaattttgaagccagaaggacaacatatgaagcttaggagtgaagagacttcctgagcagaaatgggcgaacttcagtctttttactgtgtttttgcagtattctatatataatttccttaatttgtaaatttagtgaccattagctagtgatcatttaatggacagtgattctaacagtataaagttcacaatattctatgtccctagcctgtcatttttcagctgcatgtaaaaggaggtaggatgaattgatcattataaagatttaactattttatgctgaagtgaccatattttcaaggggtgaaaccatctcgcacacagcaatgaaggtagtcatccatagacttgaaatgagaccacatatggggatgagatccttctagttagcctagtactgctgtactggcctgtatgtacatggggtccttcaactgaggccttgcaagtcaagctggctgtgccatgtttgtagatggggcagaggaatctagaacaatgggaaacttagctatttatattaggtacagctattaaacagtagatgggaaaaccttacttcctagatcttagtaccttagcctctgtaggacaaacccgggtgaatgttctcta

SEQ ID NO: 113668 - DNA, 4074 bp, Homo sapiens
gtgaccaacccccgcccctcaccccacgtggttggaggtttccagaagcgctgccgccaccgcatcgcgcagctctttgccgtcggagcgcttgtttgctgcctcgtactcctccatttatccgccatgataagtgccagccgagctgcagcagcccgtctcgtgggcgccgcagcctcccggggccctacggccgcccgccaccaggatagctggaatggccttagtcatgaggcttttagacttgtttcaaggcgggattatgcatcagaagcaatcaagggagcagttgttggtattgatttgggtactaccaactcctgcgtggcagttatggaaggtaaacaagcaaaggtgctggagaatgccgaaggtgccagaaccaccccttcagttgtggcctttacagcagatggtgagcgacttgttggaatgccggccaagcgacaggctgtcaccaacccaaacaatacattttatgctaccaagcgtctcattggccggcgatatgatgatcctgaagtacagaaagacattaaaaatgttccctttaaaattgtccgtgcctccaatggtgatgcctgggttgaggctcatgggaaattgtattctccgagtcagattggagcatttgtgttgatgaagatgaaagagactgcagaaaattacttggggcacacagcaaaaaatgctgtgatcacagtcccagcttatttcaatgactcgcagagacaggccactaaagatgctggccagatatctggactgaatgtgcttcgggtgattaatgagcccacagctgctgctcttgcctatggtctagacaaatcagaagacaaagtcattgctgtatatgatttaggtggtggaacttttgatatttctatcctggaaattcagaaaggagtatttgaggtgaaatccacaaatggggataccttcttaggtggggaagactttgaccaggccttgctacggcacattgtgaaggagttcaagagagagacaggggttgatttgactaaagacaacatggcacttcagagggtacgggaagctgctgaaaaggctaaatgtgaactctcctcatctgtgcagactgacatcaatttgccctatcttacaatggattcttctggacccaagcatttgaatatgaagttgacccgtgctcaatttgaagggattgtcactgatctaatcagaaggactatcgctccatgccaaaaagctatgcaagatgcagaagtcagcaagagtgacataggagaagtgattcttgtgggtggcatgactaggatgcccaaggttcagcagactgtacaggatctttttggcagagccccaagtaaagctgtcaatcctgatgaggctgtggccattggagctgccattcagggaggtgtgttggccggcgatgtcacggatgtgctgctccttgatgtcactcccctgtctctgggtattgaaactctaggaggtgtctttaccaaacttattaataggaataccactattccaaccaagaagagccaggtaagagccatcacttcctaccttgtcacatgggttttaggttctatgacggatgtaattgcagccactttcatgagttttttctagaaaacttcatttttatctgttttacagtttagaatattaaacagttaactgtgggtggtgagaatcctgtgttttgttttttgtttttttgttaccagaaaagttcttacatgttagctggtagtgatgattataagaaggacatcagtagtctcctccacaggattaacataatttgctaaaagggatctcagtcatttgagactgaatttcctgtagtcttctgttctcaaagacagtaaaaagggtagtctggaccagacttaggggagtgttcttatcttatggatgaatgaagggggtggtatgagggtgccgagataccaagcagggctacttggacatggcttgttcttgaagtaggaattatttctggctgggcaccgtggctcatgcctgtaatcccagcactttgggaggctgtggcgagaggattacttgagctgaggagtttgagaccagcctgggtaacatggtgaagctccctctctccaaaaagttaaattagccaggcatggtgctgtgtacctgtagtcccagctactcaggaggctgaggtgggtggatcacttgagcatgggaggcagaggttgcaatgagctgaggtcatgccactgcactccagcctgggcgacagtatgaagtgaggtcttgtctcaaaaaaaaaaaaaaaattatttcctgacttacccaatcttgtgatgtttttccataaaactatggttgttggtatatttgtgccgtgatgtatttgtcaacacatcactctgaagaaaagtatgtggtgactttctgtgactgagcatgatacatcttctttctctgatcccgtttccccagatgagcatgtttcaacattttagttccttttgaggacttctgtcctaatgctgcgtctttgtacaatgcatttgcttagctgaaacagttgctattgtatgcccatttgctgtactaatcctacttctattccctataaagacatcagcctttgttctgaacataccgtaaattaggagtcttccagtcttggaatgtaaacctttggctttcattttttctatagaaatggagtaggttaatcacattgacaacccaggagggtttcttcttccctaggtattctctactgccgctgatggtcaaacgcaagtggaaattaaagtgtgtcagggtgaaagagagatggctggagacaacaaactccttggacagtttactttgattggaattccaccagcccctcgtggagttcctcagattgaagttacatttgacattgatgccaatgggatagtacatgtttctgctaaagataaaggcacaggacgtgagcagcagattgtaatccagtcttctggtggattaagcaaagatgatattgaaaatatggttaaaaatgcagagaaatatgctgaagaagaccggcgaaagaaggaacgagttgaagcagttaatatggctgaaggaatcattcacgacacagaaaccaagatggaagaattcaaggaccaattacctgctgatgagtgcaacaagctgaaagaagagatttccaaaatgagggagctcctggctagaaaagacagcgaaacaggagaaaatattagacaggcagcatcctctcttcagcaggcatcactgaagctgttcgaaatggcatacaaaaagatggcatctgagcgagaaggctctggaagttctggcactggggaacaaaaggaagatcaaaaggaggaaaaacagtaataatagcagaaattttgaagccagaaggacaacatatgaagcttaggagtgaagagacttcctgagcagaaatgggcgaacttcagtctttttactgtgtttttgcagtattctatatataatttccttaatttgtaaatttagtgaccattagctagtgatcatttaatggacagtgattctaacagtataaagttcacaatattctatgtccctagcctgtcatttttcagctgcatgtaaaaggaggtaggatgaattgatcattataaagatttaactattttatgctgaagtgaccatattttcaaggggtgaaaccatctcgcacacagcaatgaaggtagtcatccatagacttgaaatgagaccacatatggggatgagatccttctagttagcctagtactgctgtactggcctgtatgtacatggggtccttcaactgaggccttgcaagtcaagctggctgtgccatgtttgtagatggggcagaggaatctagaacaatgggaaacttagctatttatattaggtacagctattaaaacaaggtaggaatgaggctagacctttaacttccctaaggcatacttttctagctaccttctgccctgtgtctggcacctacatccttgatgattgttctcttacccattctggaatttttttttttttaaataaatacagaaagcatcttga

SEQ ID NO: 113669 - DNA, 2814 bp, Homo sapiens
gtgaccaacccccgcccctcaccccacgtggttggaggtttccagaagcgctgccgccaccgcatcgcgcagctctttgccgtcggagcgcttgtttgctgcctcgtactcctccatttatccgccatgataagtgccagccgagctgcagcagcccgtctcgtgggcgccgcagcctcccggggccctacggccgcccgccaccaggatagctggaatggccttagtcatgaggcttttagacttgtttcaaggcgggattatgcatcagaagcaatcaagggagcagttgttggtattgatttgggtactaccaactcctgcgtggcagttatggaaggtaaacaagcaaaggtgctggagaatgccgaaggtgccagaaccaccccttcagttgtggcctttacagcagatggtgagcgacttgttggaatgccggccaagcgacaggctgtcaccaacccaaacaatacattttatgctaccaagcgtctcattggccggcgatatgatgatcctgaagtacagaaagacattaaaaatgttccctttaaaattgtccgtgcctccaatggtgatgcctgggttgaggctcatgggaaattgtattctccgagtcagattggagcatttgtgttgatgaagatgaaagagactgcagaaaattacttggggcacacagcaaaaaatgctgtgatcacagtcccagcttatttcaatgactcgcagagacaggccactaaagatgctggccagatatctggactgaatgtgcttcgggtgattaatgagcccacagctgctgctcttgcctatggtctagacaaatcagaagacaaagtcattgctgtatatgatttaggtggtggaacttttgatatttctatcctggaaattcagaaaggagtatttgaggtgaaatccacaaatggggataccttcttaggtggggaagactttgaccaggccttgctacggcacattgtgaaggagttcaagagagagacaggggttgatttgactaaagacaacatggcacttcagagggtacgggaagctgctgaaaaggctaaatgtgaactctcctcatctgtgcagactgacatcaatttgccctatcttacaatggattcttctggacccaagcatttgaatatgaagttgacccgtgctcaatttgaagggattgtcactgatctaatcagaaggactatcgctccatgccaaaaagctatgcaagatgcagaagtcagcaagagtgacataggagaagtgattcttgtgggtggcatgactaggatgcccaaggttcagcagactgtacaggatctttttggcagagccccaagtaaagctgtcaatcctgatgaggctgtggccattggagctgccattcagggaggtgtgttggccggcgatgtcacggatgtgctgctccttgatgtcactcccctgtctctgggtattgaaactctaggaggtgtctttaccaaacttattaataggaataccactattccaaccaagaagagccaggtattctctactgccgctgatggtcaaacgcaagtggaaattaaagtgtgtcagggtgaaagagagatggctggagacaacaaactccttggacagtttactttgattggaattccaccagcccctcgtggagttcctcagattgaagttacatttgacattgatgccaatgggatagtacatgtttctgctaaagataaaggcacaggacgtgagcagcagattgtaatccagtcttctggtggattaagcaaagatgatattgaaaatatggttaaaaatgcagagaaatatgctgaagaagaccggcgaaagaaggaacgagttgaagcagttaatatggctgaaggaatcattcacgacacagaaaccaagatggaagaattcaaggaccaattacctgctgatgagtgcaacaagctgaaagaagagatttccaaaatgagggagctcctggctagaaaagacagcgaaacaggagaaaatattagacaggcagcatcctctcttcagcaggcatcactgaagctgttcgaaatggcatacaaaaagatggcatctgagcgagaaggctctggaagttctggcactggggaacaaaaggaagatcaaaaggaggaaaaacagtaataatagcagaaattttgaagccagaaggacaacatatgaagcttaggagtgaagagacttcctgagcagaaatgggcgaacttcagtctttttactgtgtttttgcagtattctatatataatttccttaatttgtaaatttagtgaccattagctagtgatcatttaatggacagtgattctaacagtataaagttcacaatattctatgtccctagcctgtcatttttcagctgcatgtatgaccatattttcaaggggtgaaaccatctcgcacacagcaatgaaggtagtcatccatagacttgaaatgagaccacatatggggatgagatccttctagttagcctagtactgctgtactggcctgtatgtacatggggtccttcaactgaggccttgcaagtcaagctggctgtgccatgtttgtagatggggcagaggaatctagaacaatgggaaacttagctatttatattaggtacagctattaaaacaaggtaggaatgaggctagacctttaacttccctaaggcatacttttctagctaccttctgccctgtgtctggcacctacatccttgatgattgttctcttacccattctggaatttttttttttttaaataaatacagaaagcatcttga

SEQ ID NO: 113670 - DNA, 2513 bp, Homo sapiens
gtgaccaacccccgcccctcaccccacgtggttggaggtttccagaagcgctgccgccaccgcatcgcgcagctctttgccgtcggagcgcttgtttgctgcctcgtactcctccatttatccgccatgataagtgccagccgagctgcagcagcccgtctcgtgggcgccgcagcctcccggggccctacggccgcccgccaccaggatagctggaatggccttagtcatgaggcttttagacttgtttcaaggcgggattatgcatcagaagcaatcaagggagcagttgttggtattgatttgggtactaccaactcctgcgtggcagttatggaaggtaaacaagcaaaggtgctggagaatgccgaaggtgccagaaccaccccttcagttgtggcctttacagcagatggtgagcgacttgttggaatgccggccaagcgacaggctgtcaccaacccaaacaatacattttatgctaccaagcgtctcattggccggcgatatgatgatcctgaagtacagaaagacattaaaaatgttccctttaaaattgtccgtgcctccaatggtgatgcctgggttgaggctcatgggaaattgtattctccgagtcagattggagcatttgtgttgatgaagatgaaagagactgcagaaaattacttggggcacacagcaaaaaatgctgtgatcacagtcccagcttatttcaatgactcgcagagacaggccactaaagatgctggccagatatctggactgaatgtgcttcgggtgattaatgagcccacagctgctgctcttgcctatggtctagacaaatcagaagacaaagtcattgctgtatatgatttaggtggtggaacttttgatatttctatcctggaaattcagaaaggagtatttgaggtgaaatccacaaatggggataccttcttaggtggggaagactttgaccaggccttgctacggcacattgtgaaggagttcaagagagagacaggggttgatttgactaaagacaacatggcacttcagagggtacgggaagctgctgaaaaggctaaatgtgaactctcctcatctgtgcagactgacatcaatttgccctatcttacaatggattcttctggacccaagcatttgaatatgaagttgacccgtgctcaatttgaagggattgtcactgatctaatcagaaggactatcgctccatgccaaaaagctatgcaagatgcagaagtcagcaagagtgacataggagaagtgattcttgtgggtggcatgactaggatgcccaaggttcagcagactgtacaggatctttttggcagagccccaagtaaagctgtcaatcctgatgaggctgtggccattggagctgccattcagggaggtgtgttggccggcgatgtcacggatgtgctgctccttgatgtcactcccctgtctctgggtattgaaactctaggaggtgtctttaccaaacttattaataggaataccactattccaaccaagaagagccaggtattctctactgccgctgatggtcaaacgcaagtggaaattaaagtgtgtcagggtgaaagagagatggctggagacaacaaactccttggacagtttactttgattggaattccaccagcccctcgtggagttcctcagattgaagttacatttgacattgatgccaatgggatagtacatgtttctgctaaagataaaggcacaggacgtgagcagcagattgtaatccagtcttctggtggattaagcaaagatgatattgaaaatatggttaaaaatgcagagaaatatgctgaagaagaccggcgaaagaaggaacgagttgaagcagttaatatggctgaaggaatcattcacgacacagaaaccaagatggaagaattcaaggaccaattacctgctgatgagtgcaacaagctgaaagaagagatttccaaaatgagggagctcctggctagaaaagacagcgaaacaggagaaaatattagacaggcagcatcctctcttcagcaggcatcactgaagctgttcgaaatggcatacaaaaagatggcatctgagcgagaaggctctggaagttctggcactggggaacaaaaggaagatcaaaaggaggaaaaacagtaataatagcagaaattttgaagccagaaggacaacatatgaagcttaggagtgaagagacttcctgagcagaaatgggcgaacttcagtctttttactgtgtttttgcagtattctatatataatttccttaatttgtaaatttagtgaccattagctagtgatcatttaatggacagtgattctaacagtataaagttcacaatattctatgtccctagcctgtcatttttcagctgcatgtaaaaggagggatgagcataggagggatgagcataaggagggatgagcataaggagggatgagcataaggagtggatgagcatacgacgggagagcataaggaggga

SEQ ID NO: 113671 - DNA, 2815 bp, Homo sapiens
gtgaccaacccccgcccctcaccccacgtggttggaggtttccagaagcgctgccgccaccgcatcgcgcagctctttgccgtcggagcgcttgtttgctgcctcgtactcctccatttatccgccatgataagtgccagccgagctgcagcagcccgtctcgtgggcgccgcagcctcccggggccctacggccgcccgccaccaggatagctggaatggccttagtcatgaggcttttagacttgtttcaaggcgggattatgcatcagaagcaatcaagggagcagttgttggtattgatttgggtactaccaactcctgcgtggcagttatggaaggtaaacaagcaaaggtgctggagaatgccgaaggtgccagaaccaccccttcagttgtggcctttacagcagatggtgagcgacttgttggaatgccggccaagcgacaggctgtcaccaacccaaacaatacattttatgctaccaagcgtctcattggccggcgatatgatgatcctgaagtacagaaagacattaaaaatgttccctttaaaattgtccgtgcctccaatggtgatgcctgggttgaggctcatgggaaattgtattctccgagtcagattggagcatttgtgttgatgaagatgaaagagactgcagaaaattacttggggcacacagcaaaaaatgctgtgatcacagtcccagcttatttcaatgactcgcagagacaggccactaaagatgctggccagatatctggactgaatgtgcttcgggtgattaatgagcccacagctgctgctcttgcctatggtctagacaaatcagaagacaaagtcattgctgtatatgatttaggtggtggaacttttgatatttctatcctggaaattcagaaaggagtatttgaggtgaaatccacaaatggggataccttcttaggtggggaagactttgaccaggccttgctacggcacattgtgaaggagttcaagagagagacaggggttgatttgactaaagacaacatggcacttcagagggtacgggaagctgctgaaaaggctaaatgtgaactctcctcatctgtgcagactgacatcaatttgccctatcttacaatggattcttctggacccaagcatttgaatatgaagttgacccgtgctcaatttgaagggattgtcactgatctaatcagaaggactatcgctccatgccaaaaagctatgcaagatgcagaagtcagcaagagtgacataggagaagtgattcttgtgggtggcatgactaggatgcccaaggttcagcagactgtacaggatctttttggcagagccccaagtaaagctgtcaatcctgatgaggctgtggccattggagctgccattcagggaggtgtgttggccggcgatgtcacggatgtgctgctccttgatgtcactcccctgtctctgggtattgaaactctaggaggtgtctttaccaaacttattaataggaataccactattccaaccaagaagagccaggtattctctactgccgctgatggtcaaacgcaagtggaaattaaagtgtgtcagggtgaaagagagatggctggagacaacaaactccttggacagtttactttgattggaattccaccagcccctcgtggagttcctcagattgaagttacatttgacattgatgccaatgggatagtacatgtttctgctaaagataaaggcacaggacgtgagcagcagattgtaatccagtcttctggtggattaagcaaagatgatattgaaaatatggttaaaaatgcagagaaatatgctgaagaagaccggcgaaagaaggaacgagttgaagcagttaatatggctgaaggaatcattcacgacacagaaaccaagatggaagaattcaaggaccaattacctgctgatgagtgcaacaagctgaaagaagagatttccaaaatgagggagctcctggctagaaaagacagcgaaacaggagaaaatattagacaggcagcatcctctcttcagcaggcatcactgaagctgttcgaaatggcatacaaaaagatggcatctgagcgagaaggctctggaagttctggcactggggaacaaaaggaagatcaaaaggaggaaaggagtgaagagacttcctgagcagaaatgggcgaacttcagtctttttactgtgtttttgcagtattctatatataatttccttaatttgtaaatttagtgaccattagctagtgatcatttaatggacagtgattctaacagtataaagttcacaatattctatgtccctagcctgtcatttttcagctgcatgtaaaaggaggtaggatgaattgatcattataaagatttaactattttatgctgaagtgaccatattttcaaggggtgaaaccatctcgcacacagcaatgaaggtagtcatccatagacttgaaatgagaccacatatggggatgagatccttctagttagcctagtactgctgtactggcctgtatgtacatggggtccttcaactgaggccttgcaagtcaagctggctgtgccatgtttgtagatggggcagaggaatctagaacaatgggaaacttagctatttatattaggtacagctattaaaacaaggtaggaatgaggctagacctttaacttccctaaggcatacttttctagctaccttctgccctgtgtctggcacctacatccttgatgattgttctcttacccattctggaatttttttttttttaaataaatacagaaagcatcttga

SEQ ID NO: 113672 - DNA, 2388 bp, Homo sapiens
gtgaccaacccccgcccctcaccccacgtggttggaggtttccagaagcgctgccgccaccgcatcgcgcagctctttgccgtcggagcgcttgtttgctgcctcgtactcctccatttatccgccatgataagtgccagccgagctgcagcagcccgtctcgtgggcgccgcagcctcccggggccctacggccgcccgccaccaggatagctggaatggccttagtcatgaggcttttagacttgtttcaaggcgggattatgcatcagaagcaatcaagggagcagttgttggtattgatttgggtactaccaactcctgcgtggcagttatggaaggtaaacaagcaaaggtgctggagaatgccgaaggtgccagaaccaccccttcagttgtggcctttacagcagatggtgagcgacttgttggaatgccggccaagcgacaggctgtcaccaacccaaacaatacattttatgctaccaagcgtctcattggccggcgatatgatgatcctgaagtacagaaagacattaaaaatgttccctttaaaattgtccgtgcctccaatggtgatgcctgggttgaggctcatgggaaattgtattctccgagtcagattggagcatttgtgttgatgaagatgaaagagactgcagaaaattacttggggcacacagcaaaaaatgctgtgatcacagtcccagcttatttcaatgactcgcagagacaggccactaaagatgctggccagatatctggactgaatgtgcttcgggtgattaatgagcccacagctgctgctcttgcctatggtctagacaaatcagaagacaaagtcattgctgtatatgatttaggtggtggaacttttgatatttctatcctggaaattcagaaaggagtatttgaggtgaaatccacaaatggggataccttcttaggtggggaagactttgaccaggccttgctacggcacattgtgaaggagttcaagagagagacaggggttgatttgactaaagacaacatggcacttcagagggtacgggaagctgctgaaaaggctaaatgtgaactctcctcatctgtgcagactgacatcaatttgccctatcttacaatggattcttctggacccaagcatttgaatatgaagttgacccgtgctcaatttgaagggattgtcactgatctaatcagaaggactatcgctccatgccaaaaagctatgcaagatgcagaagtcagcaagagtgacataggagaagtgattcttgtgggtggcatgactaggatgcccaaggttcagcagactgtacaggatctttttggcagagccccaagtaaagctgtcaatcctgatgaggctgtggccattggagctgccattcagggaggtgtgttggccggcgatgtcacggatgtgctgctccttgatgtcactcccctgtctctgggtattgaaactctaggaggtgtctttaccaaacttattaataggaataccactattccaaccaagaagagccaggtattctctactgccgctgatggtcaaacgcaagtggaaattaaagtgtgtcagggtgaaagagagatggctggagacaacaaactccttggacagtttactttgattggaattccaccagcccctcgtggagttcctcagattgaagttacatttgacattgatgccaatgggatagtacatgtttctgctaaagataaaggcacaggacgtgagcagcagattgtaatccagtcttctggtggattaagcaaagatgatattgaaaatatggttaaaaatgcagagaaatatgctgaagaagaccggcgaaagaaggaacgagttgaagcagttaatatggctgaaggaatcattcacgacacagaaaccaagatggaagaattcaaggaccaattacctgctgatgagtgcaacaagctgaaagaagagatttccaaaatgagggagctcctggctagaaaagacagcgaaacaggagaaaatattagacaggcagcatcctctcttcagcaggcatcactgaagctgttcgaaatggcatacaaaaagatggcatctgagcgagaaggctctggaagttctggcactggggaacaaaaggaagatcaaaaggaggaaaaacagtaataatagcagaaattttgaagccagaaggacaacatatgaagcttaggagtgaagagacttcctgagcagaaatgggcgaacttcagtctttttactgtgtttttgcagtattctatatataatttccttaatttgtaaatttagtgaccattagctagtgatcatttaatggacagtgattctaacactgggagtgatgcccacgcagtgatgcccacatgg

SEQ ID NO: 113673 - DNA, 2366 bp, Homo sapiens
ggctaggagcgaggctgggtggtgcagaaagacataaaaatgttccctttaaaattgtccgtgcctccaatggtgatgcctgggttgaggctcatgggaaattgtattctccgagtcagattggagcatttgtgttgatgaagatgaaagagactgcagaaaattacttggggcacacagcaaaaaatgctgtgatcacagtcccagcttatttcaatgactcgcagagacaggccactaaagatgctggccagatatctggactgaatgtgcttcgggtgattaatgagcccacagctgctgctcttgcctatggtctagacaaatcagaagacaaagtcattgctgtatatgatttaggtggtggaacttttgatatttctatcctggaaattcagaaaggagtatttgaggtgaaatccacaaatggggataccttcttaggtggggaagactttgaccaggccttgctacggcacattgtgaaggagttcaagagagagacaggggttgatttgactaaagacaacatggcacttcagagggtacgggaagctgctgaaaaggctaaatgtgaactctcctcatctgtgcagactgacatcaatttgccctatcttacaatggattcttctggacccaagcatttgaatatgaagttgacccgtgctcaatttgaagggattgtcactgatctaatcagaaggactatcgctccatgccaaaaagctatgcaagatgcagaagtcagcaagagtgacataggagaagtgattcttgtgggtggcatgactaggatgcccaaggttcagcagactgtacaggatctttttggcagagccccaagtaaagctgtcaatcctgatgaggctgtggccattggagctgccattcagggaggtgtgttggccggcgatgtcacggatgtgctgctccttgatgtcactcccctgtctctgggtattgaaactctaggaggtgtctttaccaaacttattaataggaataccactattccaaccaagaagagccaggtattctctactgccgctgatggtcaaacgcaagtggaaattaaagtgtgtcagggtgaaagagagatggctggagacaacaaactccttggacagtttactttgattggaattccaccagcccctcgtggagttcctcagattgaagttacatttgacattgatgccaatgggatagtacatgtttctgctaaagataaaggcacaggacgtgagcagcagattgtaatccagtcttctggtggattaagcaaagatgatattgaaaatatggttaaaaatgcagagaaatatgctgaagaagaccggcgaaagaaggaacgagttgaagcagttaatatggctgaaggaatcattcacgacacagaaaccaagatggaagaattcaaggaccaattacctgctgatgagtgcaacaagctgaaagaagagatttccaaaatgagggagctcctggctagaaaagacagcgaaacaggagaaaatattagacaggcagcatcctctcttcagcaggcatcactgaagctgttcgaaatggcatacaaaaagatggcatctgagcgagaaggctctggaagttctggcactggggaacaaaaggaagatcaaaaggaggaaaaacagtaataatagcagaaattttgaagccagaaggacaacatatgaagcttaggagtgaagagacttcctgagcagaaatgggcgaacttcagtctttttactgtgtttttgcagtattctatatataatttccttaatttgtaaatttagtgaccattagctagtgatcatttaatggacagtgattctaacagtataaagttcacaatattctatgtccctagcctgtcatttttcagctgcatgtaaaaggaggtaggatgaattgatcattataaagatttaactattttatgctgaagtgaccatattttcaaggggtgaaaccatctcgcacacagcaatgaaggtagtcatccatagacttgaaatgagaccacatatggggatgagatccttctagttagcctagtactgctgtactggcctgtatgtacatggggtccttcaactgaggccttgcaagtcaagctggctgtgccatgtttgtagatggggcagaggaatctagaacaatgggaaacttagctatttatattaggtacagctattaaaacaaggtaggaatgaggctagacctttaacttccctaaggcatacttttctagctaccttctgccctgtgtctggcacctacatccttgatgattgttctcttacccattctggaatttttttttttttaaataaatacagaaagcatcttga

SEQ ID NO: 113674 - DNA, 3002 bp, Homo sapiens
  misc_feature (991)..(991): n is a, c, g, or t
agtgtattcttgggacaggtggcacaaatatatggcccattctgctggggtgacctaaaagggagatgagattatatactcactaaagaattcttttctgtttgttttgttaaaattgaaaaataggccgggcatggtggttcacgcctataatcccaacacttcgggaggctgaggcgggcagatcacatgagtctaatttatatatatatatgtatgtatgtatgtatgaaaaattagggaggggcagaatttctttaggggcagtagcagggaggatcccgaactcagtcatagaatttttaggattgaaacaaagtttgaggtcagaggggaacataaaaccttggtaataccccgcccccggccaccatctttgtacatgtgtctttgcagcttagtgcatctctttgacaaagatttgtgcaatgatgtattttattcaacacatcattctgaaagaacgtgtggaaaactaatgactgagcacaaacctgttgaagatgcagttcttcttggtagcctaaataggattatcttggacctaagatagtgaccttgttttttttcttaatttttccattgaaatacatggccttaaggaaatatgcaaaaaaaaaaaaaaatgaacctggaaaaaaaaggtcctggaccaggtggatgcctcatatattaagaaatccccgaggccgggtacagtggcttacgcctgtaatcccagcactttgggaggccaaggcgggcggatcacgaggtcaagagatcgagaccatcctggctaacacggtgaaaccctgtctctactaaaaatataaaaaatttggtgggcgcctgtagtcccagctacttgggaggctgaggtaggagaatggcgtgaacgcaggaggtggagcttgcggtgagtggagattgcgccaccgcactccagcctgagcgacacagcgagactccgtctcaaaaaaaaaaaaagaagaagaaaaagtatccccgntactattcaaatggaactttatcactaataaacacaagggaagaccatgccccatgttagcaatgcaaattattgctacagctgcctatgataatttggtctttagttgataatatacaagagaatgtggacttctaagtccccttgccttgcatcctctgtttcaaatgatttaatgtgttgtgtaggaaagcagataataaaacttaggagaatccttcccagatttacaagggtcatgaaggagatacttctataggtataaagtgtatgagtgttagaagatcattagcaggaacccaagtacgaaatggttatttgaataaacattctcagatttgagttagcctgtcttgagatctggctgggagcgtaggacacgtgctcccttttgttctgctcaggtagttcccaagtgtgggccgacaggttctttttccttgatgttcaggttcagcagactgtacaggatctttttggcagagccccaagtaaagctgtcaatcctgatgaggctgtggccattggagctgccattcagggaggtgtgttggccggcgatgtcacggatgtgctgctccttgatgtcactcccctgtctctgggtattgaaactctaggaggtgtctttaccaaacttattaataggaataccactattccaaccaagaagagccaggtattctctactgccgctgatggtcaaacgcaagtggaaattaaagtgtgtcagggtgaaagagagatggctggagacaacaaactccttggacagtttactttgattggaattccaccagcccctcgtggagttcctcagattgaagttacatttgacattgatgccaatgggatagtacatgtttctgctaaagataaaggcacaggacgtgagcagcagattgtaatccagtcttctggtggattaagcaaagatgatattgaaaatatggttaaaaatgcagagaaatatgctgaagaagaccggcgaaagaaggaacgagttgaagcagttaatatggctgaaggaatcattcacgacacagaaaccaagatggaagaattcaaggaccaattacctgctgatgagtgcaacaagctgaaagaagagatttccaaaatgagggagctcctggctagaaaagacagcgaaacaggagaaaatattagacaggcagcatcctctcttcagcaggcatcactgaagctgttcgaaatggcatacaaaaagatggcatctgagcgagaaggctctggaagttctggcactggggaacaaaaggaagatcaaaaggaggaaaaacagtaataatagcagaaattttgaagccagaaggacaacatatgaagcttaggagtgaagagacttcctgagcagaaatgggcgaacttcagtctttttactgtgtttttgcagtattctatatataatttccttaatttgtaaatttagtgaccattagctagtgatcatttaatggacagtgattctaacagtataaagttcacaatattctatgtccctagcctgtcatttttcagctgcatgtaaaaggaggtaggatgaattgatcattataaagatttaactattttatgctgaagtgaccatattttcaaggggtgaaaccatctcgcacacagcaatgaaggtagtcatccatagacttgaaatgagaccacatatggggatgagatccttctagttagcctagtactgctgtactggcctgtatgtacatggggtccttcaactgaggccttgcaagtcaagctggctgtgccatgtttgtagatggggcagaggaatctagaacaatgggaaacttagctatttatattaggtacagctattaaaacaaggtaggaatgaggctagacctttaacttccctaaggcatacttttctagctaccttctgccctgtgtctggcacctacatccttgatgattgttctcttacccattctggaatttttttttttttaaataaatacagaaagcatcttga

SEQ ID NO: 113675 - DNA, 1672 bp, Homo sapiens
agaatatcgggctagtgaggccgcggttaatcgcacgagggcagatgcagaagtcagcaagagtgacataggagaagtgattcttgtgggtggcatgactaggatgcccaaggttcagcagactgtacaggatctttttggcagagccccaagtaaagctgtcaatcctgatgaggctgtggccattggagctgccattcagggaggtgtgttggccggcgatgtcacggatgtgctgctccttgatgtcactcccctgtctctgggtattgaaactctaggaggtgtctttaccaaacttattaataggaataccactattccaaccaagaagagccaggtattctctactgccgctgatggtcaaacgcaagtggaaattaaagtgtgtcagggtgaaagagagatggctggagacaacaaactccttggacagtttactttgattggaattccaccagcccctcgtggagttcctcagattgaagttacatttgacattgatgccaatgggatagtacatgtttctgctaaagataaaggcacaggacgtgagcagcagattgtaatccagtcttctggtggattaagcaaagatgatattgaaaatatggttaaaaatgcagagaaatatgctgaagaagaccggcgaaagaaggaacgagttgaagcagttaatatggctgaaggaatcattcacgacacagaaaccaagatggaagaattcaaggaccaattacctgctgatgagtgcaacaagctgaaagaagagatttccaaaatgagggagctcctggctagaaaagacagcgaaacaggagaaaatattagacaggcagcatcctctcttcagcaggcatcactgaagctgttcgaaatggcatacaaaaagatggcatctgagcgagaaggctctggaagttctggcactggggaacaaaaggaagatcaaaaggaggaaaaacagtaataatagcagaaattttgaagccagaaggacaacatatgaagcttaggagtgaagagacttcctgagcagaaatgggcgaacttcagtctttttactgtgtttttgcagtattctatatataatttccttaatttgtaaatttagtgaccattagctagtgatcatttaatggacagtgattctaacagtataaagttcacaatattctatgtccctagcctgtcatttttcagctgcatgtaaaaggaggtaggatgaattgatcattataaagatttaactattttatgctgaagtgaccatattttcaaggggtgaaaccatctcgcacacagcaatgaaggtagtcatccatagacttgaaatgagaccacatatggggatgagatccttctagttagcctagtactgctgtactggcctgtatgtacatggggtccttcaactgaggccttgcaagtcaagctggctgtgccatgtttgtagatggggcagaggaatctagaacaatgggaaacttagctatttatattaggtacagctattaaaacaaggtaggaatgaggctagacctttaacttccctaaggcatacttttctagctaccttctgccctgtgtctggcacctacatccttgatgattgttctcttacccattctggaatttttttttttttaaataaatacagaaagcatcttga

SEQ ID NO: 113676 - DNA, 2368 bp, Homo sapiens
ttcattggccggcgatatgatgtatggttgggttggtgacagcctgtcgctggccggcgatatgatgatcctgaagtacaggaaagacattaaaaatgttccctttaaaattgtccgtgcctccaatggtgatgcctgggttgaggctcatgggaaattgtattctccgagtcagattggagcatttgtgttgatgaagatgaaagagactgcagaaaattacttggggcacacagcaaaaaatgctgtgatcacagtcccagcttatttcaatgactcgcagagacaggccactaaagatgctggccagatatctggactgaatgtgcttcgggtgattaatgagcccacagctgctgctcttgcctatggtctagacaaatcagaagacaaagtcattgctgtatatgatttaggtggtggaacttttgatatttctatcctggaaattcagaaaggagtatttgaggtgaaatccacaaatggggataccttcttaggtggggaagactttgaccaggccttgctacggcacattgtgaaggagttcaagagagagacaggggttgatttgactaaagacaacatggcacttcagagggtacgggaagctgctgaaaaggctaaatgtgaactctcctcatctgtgcagactgacatcaatttgccctatcttacaatggattcttctggacccaagcatttgaatatgaagttgacccgtgctcaatttgaagggattgtcactgatctaatcagaaggactatcgctccatgccatgtgggtggcatgactaggatgcccaaggttcagcagactgtacaggatctttttggcagagccccaagtaaagctgtcaatcctgatgaggctgtggccattggagctgccattcagggaggtgtgttggccggcgatgtcacggatgtgctgctccttgatgtcactcccctgtctctgggtattgaaactctaggaggtgtctttaccaaacttattaataggaataccactattccaaccaagaagagccaggtattctctactgccgctgatggtcaaacgcaagtggaaattaaagtgtgtcagggtgaaagagagatggctggagacaacaaactccttggacagtttactttgattggaattccaccagcccctcgtggagttcctcagattgaagttacatttgacattgatgccaatgggatagtacatgtttctgctaaagataaaggcacaggacgtgagcagcagattgtaatccagtcttctggtggattaagcaaagatgatattgaaaatatggttaaaaatgcagagaaatatgctgaagaagaccggcgaaagaaggaacgagttgaagcagttaatatggctgaaggaatcattcacgacacagaaaccaagatggaagaattcaaggaccaattacctgctgatgagtgcaacaagctgaaagaagagatttccaaaatgagggagctcctggctagaaaagacagcgaaacaggagaaaatattagacaggcagcatcctctcttcagcaggcatcactgaagctgttcgaaatggcatacaaaaagatggcatctgagcgagaaggctctggaagttctggcactggggaacaaaaggaagatcaaaaggaggaaaaacagtaataatagcagaaattttgaagccagaaggacaacatatgaagcttaggagtgaagagacttcctgagcagaaatgggcgaacttcagtctttttactgtgtttttgcagtattctatatataatttccttaatttgtaaatttagtgaccattagctagtgatcatttaatggacagtgattctaacagtataaagttcacaatattctatgtccctagcctgtcatttttcagctgcatgtaaaaggaggtaggatgaattgatcattataaagatttaactattttatgctgaagtgaccatattttcaaggggtgaaaccatctcgcacacagcaatgaaggtagtcatccatagacttgaaatgagaccacatatggggatgagatccttctagttagcctagtactgctgtactggcctgtatgtacatggggtccttcaactgaggccttgcaagtcaagctggctgtgccatgtttgtagatggggcagaggaatctagaacaatgggaaacttagctatttatattaggtacagctattaaaacaaggtaggaatgaggctagacctttaacttccctaaggcatacttttctagctaccttctgccctgtgtctggcacctacatccttgatgattgttctcttacccattctggaatttttttttttttaaataaatacagaaagcatcttga

SEQ ID NO: 113677 - DNA, 2093 bp, Homo sapiens
gtgaccaacccccgcccctcaccccacgtggttggaggtttccagaagcgctgccgccaccgcatcgcgcagctctttgccgtcggagcgcttgtttgctgcctcgtactcctccatttatccgccatgataagtgccagccgagctgcagcagcccgtctcgtgggcgccgcagcctcccggggccctacggccgcccgccaccaggatagctggaatggccttagtcatgaggcttttagacttgtttcaaggcgggattatgcatcagaagcaatcaagggagcagttgttggtattgatttgggtactaccaactcctgcgtggcagttatggaaggtaaacaagcaaaggtgctggagaatgccgaaggtgccagaaccaccccttcagttgtggcctttacagcagatggtgagcgacttgttggaatgccggccaagcgacaggctgtcaccaacccaaacaatacattttatgctaccaagcgtctcattggccggcgatatgatgatcctgaagtacagaaagacattaaaaatgttccctttaaaattgtccgtgcctccaatggtgatgcctgggttgaggctcatgggaaattgtattctccgagtcagattggagcatttgtgttgatgaagatgaaagagactgcagaaaattacttggggcacacagcaaaaaatgctgtgatcacagtcccagcttatttcaatgactcgcagagacaggccactaaagatgctggccagatatctggactgaatgtgcttcgggtgattaatgagcccacagctgctgctcttgcctatggtctagacaaatcagaagacaaagtcattgctgtatatgatttaggtggtggaacttttgatatttctatcctggaaattcagaaaggagtatttgaggtgaaatccacaaatggggataccttcttaggtggggaagactttgaccaggccttgctacggcacattgtgaaggagttcaagagagagacaggggttgatttgactaaagacaacatggcacttcagagggtacgggaagctgctgaaaaggctaaatgtgaactctcctcatctgtgcagactgacatcaatttgccctatcttacaatggattcttctggacccaagcatttgaatatgaagttgacccgtgctcaatttgaagggattgtcactgatctaatcagaaggactatcgctccatgccaaaaagctatgcaagatgcagaagtcagcaagagtgacataggagaagtgattcttgtgggtggcatgactaggatgcccaaggttcagcagactgtacaggatctttttggcagagccccaagtaaagctgtcaatcctgatgaggctgtggccattggagctgccattcagggaggtgtgttggccggcgatgtcacggatgtgctgctccttgatgtcactcccctgtctctgggtattgaaactctaggaggtgtctttaccaaacttattaataggaataccactattccaaccaagaagagccaggtattctctactgccgctgatggtcaaacgcaagtggaaattaaagtgtgtcagggtgaaagagagatggctggagacaacaaactccttggacagtttactttgattggaattccaccagcccctcgtggagttcctcagattgaagttacatttgacattgatgccaatgggatagtacatgtttctgctaaagataaaggcacaggacgtgagcagcagattgtaatccagtcttctggtggattaagcaaagatgatattgaaaatatggttaaaaatgcagagaaatatgctgaagaagaccggcgaaagaaggaacgagttgaagcagttaatatggctgaaggaatcattcacgacacagaaaccaagatggaagaattcaaggaccaattacctgctgatgagtgcaacaagtgaaggaagagattcccaaatgaggggagctcctggtagaaaagaagggaaccggggaattttcgacgggggattctcctcttcagagggtactgaagcggtccggaggcctacaacgagggtttggggaaaggcgg

SEQ ID NO: 113678 - DNA, 2145 bp, Homo sapiens
gtgaccaacccccgcccctcaccccacgtggttggaggtttccagaagcgctgccgccaccgcatcgcgcagctctttgccgtcggagcgcttgtttgctgcctcgtactcctccatttatccgccatgataagtgccagccgagctgcagcagcccgtctcgtgggcgccgcagcctcccggggccctacggccgcccgccaccaggatagctggaatggccttagtcatgaggcttttagacttgtttcaaggcgggattatgcatcagaagcaatcaagggagcagttgttggtattgatttgggtactaccaactcctgcgtggcagttatggaaggtaaacaagcaaaggtgctggagaatgccgaaggtgccagaaccaccccttcagttgtggcctttacagcagatggtgagcgacttgttggaatgccggccaagcgacaggctgtcaccaacccaaacaatacattttatgctaccaagcgtctcattggccggcgatatgatgatcctgaagtacagaaagacattaaaaatgttccctttaaaattgtccgtgcctccaatggtgatgcctgggttgaggctcatgggaaattgtattctccgagtcagattggagcatttgtgttgatgaagatgaaagagactgcagaaaattacttggggcacacagcaaaaaatgctgtgatcacagtcccagcttatttcaatgactcgcagagacaggccactaaagatgctggccagatatctggactgaatgtgcttcgggtgattaatgagcccacagctgctgctcttgcctatggtctagacaaatcagaagacaaagtcattgctgtatatgatttaggtggtggaacttttgatatttctatcctggaaattcagaaaggagtatttgaggtgaaatccacaaatggggataccttcttaggtggggaagactttgaccaggccttgctacggcacattgtgaaggagttcaagagagagacaggggttgatttgactaaagacaacatggcacttcagagggtacgggaagctgctgaaaaggctaaatgtgaactctcctcatctgtgcagactgacatcaatttgccctatcttacaatggattcttctggacccaagcatttgaatatgaagttgacccgtgctcaatttgaagggattgtcactgatctaatcagaaggactatcgctccatgccaaaaagctatgcaagatgcagaagtcagcaagagtgacataggagaagtgattcttgtgggtggcatgactaggatgcccaaggttcagcagactgtacaggatctttttggcagagccccaagtaaagctgtcaatcctgatgaggctgtggccattggagctgccattcagggaggtgtgttggccggcgatgtcacggatgtgctgctccttgatgtcactcccctgtctctgggtattgaaactctaggaggtgtctttaccaaacttattaataggaataccactattccaaccaagaagagccaggtattctctactgccgctgatggtcaaacgcaagtggaaattaaagtgtgtcagggtgaaagagagatggctggagacaacaaactccttggacagtttactttggtaggttattgtgaatcctgaatactatgcctccttcactgtaaagtgagataatattctaagccataaaaatattagtataaactgctggcatacacatacatactgagtagtcttgagaagaagggatgcaactagatacccatggcatcagtttttacctgaaagccttgctttttccttgtgccttaggaatttcctcagaaataaactcctgattactcatttaaaagacatttgatattgttactggtttctgatcagcattgcttattggttattggtgaggtgaataataggagatttgctatctgtcatttagtgtgtccacaggtacatacagccattatggttacttgctatagctaaacttcactggtataaaaccagttgatttcaggcagcgaactactactgttgcttataaactttgtgttttgtacattaaatcacttgtttctcccaggaaccaagtgacttgtttactagaaaaccatatagatt

SEQ ID NO: 113679 - DNA, 1758 bp, Homo sapiens
gtgaccaacccccgcccctcaccccacgtggttggaggtttccagaagcgctgccgccaccgcatcgcgcagctctttgccgtcggagcgcttgtttgctgcctcgtactcctccatttatccgccatgataagtgccagccgagctgcagcagcccgtctcgtgggcgccgcagcctcccggggccctacggccgcccgccaccaggatagctggaatggccttagtcatgaggcttttagacttgtttcaaggcgggattatgcatcagaagcaatcaagggagcagttgttggtattgatttgggtactaccaactcctgcgtggcagttatggaaggtaaacaagcaaaggtgctggagaatgccgaaggtgccagaaccaccccttcagttgtggcctttacagcagatggtgagcgacttgttggaatgccggccaagcgacaggctgtcaccaacccaaacaatacattttatgctaccaagcgtctcattggccggcgatatgatgatcctgaagtacagaaagacattaaaaatgttccctttaaaattgtccgtgcctccaatggtgatgcctgggttgaggctcatgggaaattgtattctccgagtcagattggagcatttgtgttgatgaagatgaaagagactgcagaaaattacttggggcacacagcaaaaaatgctgtgatcacagtcccagcttatttcaatgactcgcagagacaggccactaaagatgctggccagatatctggactgaatgtgcttcgggtgattaatgagcccacagctgctgctcttgcctatggtctagacaaatcagaagacaaagtcattgctgtatatgatttaggtggtggaacttttgatatttctatcctggaaattcagaaaggagtatttgaggtgaaatccacaaatggggataccttcttaggtggggaagactttgaccaggccttgctacggcacattgtgaaggagttcaagagagagacaggggttgatttgactaaagacaacatggcacttcagagggtacgggaagctgctgaaaaggctaaatgtgaactctcctcatctgtgcagaggaatctagaacaatgggaaacttagctatttatattaggtacagctattaaaacaaggtaggaatgaggctagacctttaacttccctaaggcatacttttctagctaccttctgccctgtgtctggcacctacatccttgatgattgttctcttacccattctggaatttttttttttttaaataaatacagaaagcatcttgatctcttgtttgtgaggggtgatgccctgagatttagcttcaagaatatgccatggctcatgcttcccatatttcccaaagagggaaatacaggatttgctaacactggttaaaaatgcaaattcaagatttggaagggctgttataatgaaataatgagcagtatcagcatgtgcaaatcttgtttgaaggattttattttctccccttagacctttggtacatttagaatcttgaaagtttctagatctctaacatgaaagtttctagatctctaacatgaaagtttttagatctctaacatgaaaaccaaggtggctattttcaggttgctttcagctccaagtagaaataaccagaattggcttacattaaagaaactgcatctagaaataagtcctaagatactatttctatggctcaaaaataaaaggaacccagatttctttcccta

SEQ ID NO: 113680 - DNA, 1305 bp, Homo sapiens
gtgaccaacccccgcccctcaccccacgtggttggaggtttccagaagcgctgccgccaccgcatcgcgcagctctttgccgtcggagcgcttgtttgctgcctcgtactcctccatttatccgccatgataagtgccagccgagctgcagcagcccgtctcgtgggcgccgcagcctcccggggccctacggccgcccgccaccaggatagctggaatggccttagtcatgaggcttttagacttgtttcaaggcgggattatgcatcagaagcaatcaagggagcagttgttggtattgatttgggtactaccaactcctgcgtggcagttatggaaggtaaacaagcaaaggtgctggagaatgccgaaggtgccagaaccaccccttcagttgtggcctttacagcagatggtgagcgacttgttggaatgccggccaagcgacaggctgtcaccaacccaaacaatacattttatgctaccaagcgtctcattggccggcgatatgatgatcctgaagtacagaaagacattaaaaatgttccctttaaaattgtccgtgcctccaatggtgatgcctgggttgaggctcatgggaaattgtattctccgagtcagattggagcatttgtgttgatgaagatgaaagagactgcagaaaattacttggggcacacagcaaaaaatgctgtgatcacagtcccagcttatttcaatgactcgcagagacaggccactaaagatgctggccagatatctggactgaatgtgcttcgggtgattaatgagcccacagctgctgctcttgcctatggtctagacaaatcagaagacaaagtcattgctgtatatgatttaggtggtggaacttttgatatttctatcctggaaattcagaaaggagtatttgaggtgaaatccacaaatggggataccttcttaggtggggaagactttgaccaggccttgctacggcacattgtgaaggagttcaagagagagacaggggttgatttgactaaagacaacatggcacttcagagggtacgggaagctgctgaaaaggctaaatgtgaactctcctcatctgtgcagaggaatctagaacaatgggaaacttagctatttatattaggtacagctattaaaacaaggtaggaatgaggctagacctttaacttccctaaggcatacttttctagctaccttctgccctgtgtctggcacctacatccttgatgattgttctcttacccattctggaatttttttttttttaaataaatacagaaagcatcttga

SEQ ID NO: 113681 - DNA, 701 bp, Homo sapiens
acattcagctcgtacccagcgccctagcctatacatgaagcttaggagtgaagagacttcctgagcagaaatgggcgaacttcagtctttttactgtgtttttgcagtattctatatataatttccttaatttgtaaatttagtgaccattagctagtgatcatttaatggacagtgattctaacagtataaagttcacaatattctatgtccctagcctgtcatttttcagctgcatgtaaaaggaggtaggatgaattgatcattataaagatttaactattttatgctgaagtgaccatattttcaaggggtgaaaccatctcgcacacagcaatgaaggtagtcatccatagacttgaaatgagaccacatatggggatgagatccttctagttagcctagtactgctgtactggcctgtatgtacatggggtccttcaactgaggccttgcaagtcaagctggctgtgccatgtttgtagatggggcagaggaatctagaacaatgggaaacttagctatttatattaggtacagctattaaaacaaggtaggaatgaggctagacctttaacttccctaaggcatacttttctagctaccttctgccctgtgtctggcacctacatccttgatgattgttctcttacccattctggaatttttttttttttaaataaatacagaaagcatcttga

SEQ ID NO: 113682 - DNA, 4452 bp, Homo sapiens
gtgaccaacccccgcccctcaccccacgtggttggaggtttccagaagcgctgccgccaccgcatcgcgcagctctttgccgtcggagcgcttgtttgctgcctcgtactcctccatttatccgccatgataagtgccagccgagctgcagcagcccgtctcgtgggcgccgcagcctcccggggccctacggccgcccgccaccaggatagctggaatggccttagtcatgaggcttttagacttgtttcaaggcgggattatgcatcagaagcaatcaagggagcagttgttggtattgatttgggtactaccaactcctgcgtggcagttatggaaggtaaacaagcaaaggtgctggagaatgccgaaggtgccagaaccaccccttcagttgtggcctttacagcagatggtgagcgacttgttggaatgccggccaagcgacaggctgtcaccaacccaaacaatacattttatgctaccaagcgtctcattggccggcgatatgatgatcctgaagtacagaaagacattaaaaatgttccctttaaaattgtccgtgcctccaatggtgatgcctgggttgaggctcatgggaaattgtattctccgagtcagattggagcatttgtgttgatgaagatgaaagagactgcagaaaattacttggggcacacagcaaaaaatgctgtgatcacagtcccagcttatttcaatgactcgcagagacaggccactaaagatgctggccagatatctggactgaatgtgcttcgggtgattaatgagcccacagctgctgctcttgcctatggtctagacaaatcagaagacaaagtcattgctgtatatgatttaggtggtggaacttttgatatttctatcctggaaattcagaaaggagtatttgaggtgaaatccacaaatggggataccttcttaggtggggaagactttgaccaggccttgctacggcacattgtgaaggagttcaagagagagacaggggttgatttgactaaagacaacatggcacttcagagggtacgggaagctgctgaaaaggctaaatgtgaactctcctcatctgtgcagactgacatcaatttgccctatcttacaatggattcttctggacccaagcatttgaatatgaagttgacccgtgctcaatttgaagggattgtcactgatctaatcagaaggactatcgctccatgccaaaaagctatgcaagatgcagaagtcagcaagagtgacataggagaagtgattcttgtgggtggcatgactaggatgcccaaggttcagcagactgtacaggatctttttggcagagccccaagtaaagctgtcaatcctgatgaggctgtggccattggagctgccattcagggaggtgtgttggccggcgatgtcacggatgtgctgctccttgatgtcactcccctgtctctgggtattgaaactctaggaggtgtctttaccaaacttattaataggaataccactattccaaccaagaagagccaggtattctctactgccgctgatggtcaaacgcaagtggaaattaaagtgtgtcagggtgaaagagagatggctggagacaacaaactccttggacagtttactttgattggaattccaccagcccctcgtggagttcctcagattgaagttacatttgacattgatgccaatgggatagtacatgtttctgctaaagataaaggcacaggacgtgagcagcagattgtaatccagtcttctggtggattaagcaaagatgatattgaaaatatggttaaaaatgcagagaaatatgctgaagaagaccggcgaaagaaggaacgagttgaagcagttaatatggctgaaggaatcattcacgacacagaaaccaagatggaagaattcaaggaccaattacctgctgatgagtgcaacaagctgaaagaagagatttccaaaatgagggagctcctggctagaaaagacagcgaaacaggagaaaatattagacaggcagcatcctctcttcagcaggcatcactgaagctgttcgaaatggcatacaaaaagatggcatctgagcgagaaggctctggaagttctggcactggggaacaaaaggaagatcaaaaggaggaaaaacagtaataatagcagaaattttgaagccagaaggacaacatatgaagcttaggagtgaagagacttcctgagcagaaatgggcgaacttcagtctttttactgtgtttttgcagtattctatatataatttccttaatttgtaaatttagtgaccattagctagtgatcatttaatggacagtgattctaacagtataaagttcacaatattctatgtccctagcctgtcatttttcagctgcatgtaaaaggaggtaggatgaattgatcattataaagatttaactattttatgctgaagtgaccatattttcaaggggtgaaaccatctcgcacacagcaatgaaggtagtcatccatagacttgaaatgagaccacatatggggatgagatccttctagttagcctagtactgctgtactggcctgtatgtacatggggtccttcaactgaggccttgcaagtcaagctggctgtgccatgtttgtagatggggcagaggaatctagaacaatgggaaacttagctatttatattaggtacagctattaaaacaaggtaggaatgaggctagacctttaacttccctaaggcatacttttctagctaccttctgccctgtgtctggcacctacatccttgatgattgttctcttacccattctggaatttttttttttttaaataaatacagaaagcatcttgatctcttgtttgtgaggggtgatgccctgagatttagcttcaagaatatgccatggctcatgcttcccatatttcccaaagagggaaatacaggatttgctaacactggttaaaaatgcaaattcaagatttggaagggctgttataatgaaataatgagcagtatcagcatgtgcaaatcttgtttgaaggattttattttctccccttagacctttggtacatttagaatcttgaaagtttctagatctctaacatgaaagtttctagatctctaacatgaaagtttttagatctctaacatgaaaaccaaggtggctattttcaggttgctttcagctccaagtagaaataaccagaattggcttacattaaagaaactgcatctagaaataagtcctaagatactatttctatggctcaaaaataaaaggaacccagatttctttccctatttctgcttttctgtcctcagtgtactggcttgtcccaaattctctgatgtagttctaataattatcatgtgctgacaacctgagcagaaaggcaactacatctttattcaatgttaagatttcccaaaagtcttccagcacatttcccttatgtttcatggatgaatgtcatatgccatgttcaaaagagtctgttatcaagatgggcttagaatatcagacacaatggctccttttataatgttttgtaatatgtagaaatgagattactgtatttccaaaaatcagtataagaaatcaatttaatttgcaagtatgaaggaagtgatttagacaacatttttggaagattcagtgcttgttaacacccatgtaaaagattcttgggattcgtgaaaaattctaggctcaggtttccaaccacatgaacactcaatgggaacattgtaggattatgaaggattgttatatggtgtgttggaaaataacttttagcatttttggttggcccttgcccactgcctctactgtctcctaaagataactttaaaagccctccaggatttccaaagtactccagttgagaactactggcttaatgctagtcaagattcatccttgggatcagagagaggagccaaatgcccaagcaaaatatatatttgagttctattaggagggagaagttgcttgggtatgggtggacacagtatttcagtcacctatcagtaaagctaatagcataaatagcaagaaggtatatggagatttcctacagccaataggatatatatctagaataagatttactgtaagaaagaaactggctcacaattatggaaccgaggtcccacccacagtccactgctgggaaagctgttggggtaaaatttcagtgaccaggaacacagtggtgtcctagtccgaggttagaagaatatggatgtcttagctctggcagttctatataggcccttaactgattagatgatgtccactcacatcaaagcagagcaatctccaattcaatactaatctcttctggagagagacaaatgtttaacccgttaaatggcatcaatggctaaactgacacataaaattaactatcacaaaaggcaaaaagaaat

SEQ ID NO: 113683 - DNA, 3020 bp, Homo sapiens
gtgaccaacccccgcccctcaccccacgtggttggaggtttccagaagcgctgccgccaccgcatcgcgcagctctttgccgtcggagcgcttgtttgctgcctcgtactcctccatttatccgccatgataagtgccagccgagctgcagcagcccgtctcgtgggcgccgcagcctcccggggccctacggccgcccgccaccaggatagctggaatggccttagtcatgaggcttttagacttgtttcaaggcgggattatgcatcagaagcaatcaagggagcagttgttggtattgatttgggtactaccaactcctgcgtggcagttatggaaggtaaacaagcaaaggtgctggagaatgccgaaggtgccagaaccaccccttcagttgtggcctttacagcagatggtgagcgacttgttggaatgccggccaagcgacaggctgtcaccaacccaaacaatacattttatgctaccaagcgtctcattggccggcgatatgatgatcctgaagtacagaaagacattaaaaatgttccctttaaaattgtccgtgcctccaatggtgatgcctgggttgaggctcatgggaaattgtattctccgagtcagattggagcatttgtgttgatgaagatgaaagagactgcagaaaattacttggggcacacagcaaaaaatgctgtgatcacagtcccagcttatttcaatgactcgcagagacaggccactaaagatgctggccagatatctggactgaatgtgcttcgggtgattaatgagcccacagctgctgctcttgcctatggtctagacaaatcagaagacaaagtcattgctgtatatgatttaggtggtggaacttttgatatttctatcctggaaattcagaaaggagtatttgaggtgaaatccacaaatggggataccttcttaggtggggaagactttgaccaggccttgctacggcacattgtgaaggagttcaagagagagacaggggttgatttgactaaagacaacatggcacttcagagggtacgggaagctgctgaaaaggctaaatgtgaactctcctcatctgtgcagactgacatcaatttgccctatcttacaatggattcttctggacccaagcatttgaatatgaagttgacccgtgctcaatttgaagggattgtcactgatctaatcagaaggactatcgctccatgccaaaaagctatgcaagatgcagaagtcagcaagagtgacataggagaagtgattcttgtgggtggcatgactaggatgcccaaggaaatatgcaaaaaaaaaaaaaaatgaacctggaaaaaaaaggtcctggaccaggtggatgcctcatatattaagaaatccccgaggccgggtacagtggcttacgcctgtaatcccagcactttgggaggccaaggcgggcggatcacgaggttcagcagactgtacaggatctttttggcagagccccaagtaaagctgtcaatcctgatgaggctgtggccattggagctgccattcagggaggtgtgttggccggcgatgtcacggatgtgctgctccttgatgtcactcccctgtctctgggtattgaaactctaggaggtgtctttaccaaacttattaataggaataccactattccaaccaagaagagccaggtattctctactgccgctgatggtcaaacgcaagtggaaattaaagtgtgtcagggtgaaagagagatggctggagacaacaaactccttggacagtttactttgattggaattccaccagcccctcgtggagttcctcagattgaagttacatttgacattgatgccaatgggatagtacatgtttctgctaaagataaaggcacaggacgtgagcagcagattgtaatccagtcttctggtggattaagcaaagatgatattgaaaatatggttaaaaatgcagagaaatatgctgaagaagaccggcgaaagaaggaacgagttgaagcagttaatatggctgaaggaatcattcacgacacagaaaccaagatggaagaattcaaggaccaattacctgctgatgagtgcaacaagctgaaagaagagatttccaaaatgagggagctcctggctagaaaagacagcgaaacaggagaaaatattagacaggcagcatcctctcttcagcaggcatcactgaagctgttcgaaatggcatacaaaaagatggcatctgagcgagaaggctctggaagttctggcactggggaacaaaaggaagatcaaaaggaggaaaaacagtaataatagcagaaattttgaagccagaaggacaacatatgaagcttaggagtgaagagacttcctgagcagaaatgggcgaacttcagtctttttactgtgtttttgcagtattctatatataatttccttaatttgtaaatttagtgaccattagctagtgatcatttaatggacagtgattctaacagtataaagttcacaatattctatgtccctagcctgtcatttttcagctgcatgtaaaaggaggtaggatgaattgatcattataaagatttaactattttatgctgaagtgaccatattttcaaggggtgaaaccatctcgcacacagcaatgaaggtagtcatccatagacttgaaatgagaccacatatggggatgagatccttctagttagcctagtactgctgtactggcctgtatgtacatggggtccttcaactgaggccttgcaagtcaagctggctgtgccatgtttgtagatggggcagaggaatctagaacaatgggaaacttagctatttatattaggtacagctattaaaacaaggtaggaatgaggctagacctttaacttccctaaggcatacttttctagctaccttctgccctgtgtctggcacctacatccttgatgattgttctcttacccattctggaatttttttttttttaaataaatacagaaagcatcttga

SEQ ID NO: 113684 - DNA, 2814 bp, Homo sapiens
gtgaccaacccccgcccctcaccccacgtggttggaggtttccagaagcgctgccgccaccgcatcgcgcagctctttgccgtcggagcgcttgtttgctgcctcgtactcctccatttatccgccatgataagtgccagccgagctgcagcagcccgtctcgtgggcgccgcagcctcccggggccctacggccgcccgccaccaggatagctggaatggccttagtcatgaggcttttagacttgtttcaaggcgggattatgcatcagaagcaatcaagggagcagttgttggtattgatttgggtactaccaactcctgcgtggcagttatggaaggtaaacaagcaaaggtgctggagaatgccgaaggtgccagaaccaccccttcagttgtggcctttacagcagatggtgagcgacttgttggaatgccggccaagcgacaggctgtcaccaacccaaacaatacattttatgctaccaagcgtctcattggccggcgatatgatgatcctgaagtacagaaagacattaaaaatgttccctttaaaattgtccgtgcctccaatggtgatgcctgggttgaggctcatgggaaattgtattctccgagtcagattggagcatttgtgttgatgaagatgaaagagactgcagaaaattacttggggcacacagcaaaaaatgctgtgatcacagtcccagcttatttcaatgactcgcagagacaggccactaaagatgctggccagatatctggactgaatgtgcttcgggtgattaatgagcccacagctgctgctcttgcctatggtctagacaaatcagaagacaaagtcattgctgtatatgatttaggtggtggaacttttgatatttctatcctggaaattcagaaaggagtatttgaggtgaaatccacaaatggggataccttcttaggtggggaagactttgaccaggccttgctacggcacattgtgaaggagttcaagagagagacaggggttgatttgactaaagacaacatggcacttcagagggtacgggaagctgctgaaaaggctaaatgtgaactctcctcatctgtgcagactgacatcaatttgccctatcttacaatggattcttctggacccaagcatttgaatatgaagttgacccgtgctcaatttgaagggattgtcactgatctaatcagaaggactatcgctccatgccatgtgggtggcatgactaggatgcccaaggttcagcagactgtacaggatctttttggcagagccccaagtaaagctgtcaatcctgatgaggctgtggccattggagctgccattcagggaggtgtgttggccggcgatgtcacggatgtgctgctccttgatgtcactcccctgtctctgggtattgaaactctaggaggtgtctttaccaaacttattaataggaataccactattccaaccaagaagagccaggtattctctactgccgctgatggtcaaacgcaagtggaaattaaagtgtgtcagggtgaaagagagatggctggagacaacaaactccttggacagtttactttgattggaattccaccagcccctcgtggagttcctcagattgaagttacatttgacattgatgccaatgggatagtacatgtttctgctaaagataaaggcacaggacgtgagcagcagattgtaatccagtcttctggtggattaagcaaagatgatattgaaaatatggttaaaaatgcagagaaatatgctgaagaagaccggcgaaagaaggaacgagttgaagcagttaatatggctgaaggaatcattcacgacacagaaaccaagatggaagaattcaaggaccaattacctgctgatgagtgcaacaagctgaaagaagagatttccaaaatgagggagctcctggctagaaaagacagcgaaacaggagaaaatattagacaggcagcatcctctcttcagcaggcatcactgaagctgttcgaaatggcatacaaaaagatggcatctgagcgagaaggctctggaagttctggcactggggaacaaaaggaagatcaaaaggaggaaaaacagtaataatagcagaaattttgaagccagaaggacaacatatgaagcttaggagtgaagagacttcctgagcagaaatgggcgaacttcagtctttttactgtgtttttgcagtattctatatataatttccttaatttgtaaatttagtgaccattagctagtgatcatttaatggacagtgattctaacagtataaagttcacaatattctatgtccctagcctgtcatttttcagctgcatgtaaaaggaggtaggatgaattgatcattataaagatttaactattttatgctgaagtgaccatattttcaaggggtgaaaccatctcgcacacagcaatgaaggtagtcatccatagacttgaaatgagaccacatatggggatgagatccttctagttagcctagtactgctgtactggcctgtatgtacatggggtccttcaactgaggccttgcaagtcaagctggctgtgccatgtttgtagatggggcagaggaatctagaacaatgggaaacttagctatttatattaggtacagctattaaaacaaggtaggaatgaggctagacctttaacttccctaaggcatacttttctagctaccttctgccctgtgtctggcacctacatccttgatgattgttctcttacccattctggaatttttttttttttaaataaatacagaaagcatcttga
